United States Patent Application Publication US 2006/0154250 A1 - sequence listing, part 2

SEQ ID NO: 118 - DNA, 73723 bp, Homo sapiens
  misc_feature (1)...(73723): n = A,T,C or G
acagtactaaccctcagggaaatgtaaattaaaatcacaatgagataccacctgattcctgcaagaatagccattattaaaaagtcaaaaaacaatagatgttggtatggttgtggtgaaaagggaacacttttatactgctggtataatttacattgtattagtgtaaattagtacaaccactattgaaaacagtgtgaagattccttaaagaattaaaagaagctctaccattcgatccagcaatcccactactgggtgtctacccaatggaaaagaagtcatcgtacaaaaaagatacatgcacatgcatgtttatagcagcacaattctcaattgcaaagatgtggaaccaaactgagtgcccatcaaccaacaaatggataaagaaaatgtaatatatatacaccatggaatacttctcagccataaagcaaaatgaaataatgtcttttgcagcaactcagatggagctggaggccattattttaagtgaagtaactcaggaatggaaaaccaaatattatatattctcacttgtaagtgggagctaagctatgaggacataaaggcgtaaagatgatataatggactaaagaacttatccatgtaaccaaaatcacctgtatctcaaactattgaaataaaaaaagtttgaattatgtaaatgataatatagaaaaatatatgggtagagaaaacaatgaaataaaaaagataaacagaaaaagagcataatgattcctacttagaaatatctgcagtggctttagttagggctttgctgagggtaatcctccaaatgaggccactagggtaatgggagagaactttatccataaaacagagttcccagatgaaaagaactccaggaccaaagctgctgcagtgcaaggctaaaaccctcttggaattctactcaacatggagcaatagagaaggtaaagagggtgggatttcacagaatgcatatcatgaatgtgcttaaagagggaatggaagatacattactaggcagcattcaagcccagggaggaattggatcccccaaatgtgacaatcaagagggaaataagaatacatacaaaaattgtattatgaaaaatttcaaccactcacaaaagtagagagaaaaataccatacgttcccatcatgtagccccagcaaccataaaattgtcattacttccgttttaactttatctcataagattttatgaaggtatatgttaaaggtccaggtgtcatatcatttcaccaataaataatgaaaaggctttaaacacactagatgaacacagagaggactggcaaagccttgcataaaactggagaagtatcaagctggcacatttcaaaattttagaagaaagtattttaagtgccactgtctattggcaagacagtgtatacaagtgatttccccattggtgcggggagctcaatgttacaataaatgggcaatttctcacgtggatttaaattctctcataatgacctctggaccaaatgccctgttgatgtctatattggttagcctgaaacaaaaaatattatatctataactttgcatttcttcatgttcctgcctttccccaaattgtactatttacaaaactagggacagaaaatctggtttaggacagctgctctaggagcatgggatttgctcatgcttcctgttttttggctcagcatgagtaatctgtagttgggttcgttcaactttgtcgttgctgaagagtctatagacattctagtgctccaaagatggccccaaacatcacagctggtgaagaaaatctggcaccacgagactgagcccaatccaacaaaattagaaagcaaagtcagaaaaagttcaaatttagcttacagaaggaaggggaatttgatttcaaactttagggctttttctcacaatttaataatcaaataacattcaaattcaggtgtttgaatagtgtatccgcaatgtattttttgagtatttttttaaatggcatacttttttgctgacgtggttaaacacaacttgtcgtcaacacaattaaaaaaaaattgtataggaggaaatgttaatcctttggtgtggggtgaagttaaggcaatttcgctgagttcctattctccctacagccttcaagtgcagcagttaggccactttacacactagccctaggaggatacaaaacacgcaaccacatgaacgcaggagcagacctgctcagacacaatgcaggcttgctctcccgagtggaccagccctgctccaacaggtttaaagaaaaaagacctggggagagttaacagggagcccttcactcacatggccacatttgtaccaaaatcacgaagaaggccacccaggtcatcatagaaaagtactgcacgcgcctaggcaacgacttctacacgaacaaatgtgtgtgcgagatcgccattatcctcagcaagaagctccgcaacaagatagtaggctatgtcaagcatctgatgaagcggattcggaagggcccagtgagaggtatctccatcaagctgcaggaggaggagagagaaaacagagacaattatgttcccgagatctcagtcctggatcaggagaccgttgaagtagatcctgacactaaggaaatgctggagcttttggactttgtcagtctgtccaacctgcaggtcactcgacctacagttgagataaatttcaaaatgcctcggggagctctttgaagctgtctgcaatgctgtaatattttcaataatcctgggacaacagcaaataaaacaaaacaaaaccccctcccccacaaaaaactgaaaaaacagggagcccttctgcttctatccctacatttccacagtggtccacgaaggaggaaacttctacctccacttctgacctcctgaaagagtcatagaaagcatatcccactcttaatcccttggatcagggatggtcagtgggtgatccaagcaccgcattggctgggccacgccttactagaagtaagtttcctgtgctgaggtgcagagaaggttgagccttttatctctttatctgatcagtcaaaatgagcgcagaagcttgaggggtggtggatgtagccctaagatcctctttctggctgctgtctctgcaaaaggcaacccttcttcccctctatagagaggttgagtacttggaagtagattctactgtgcagatagattttaccccagcaagtgtgtctcagagtatgctgtcctcggctttcctgtagatttgaagtgagatgtgggaagcctctggtctaagccgcattatcaaacaaagttcaccaaaagccttacattcttggtgtaccctgttcttgtcagctgtctattttgtgtgtattctcttttggttatcatggtggaaaggaaaggcctgaggttttggctattgaatctctaacagaacaattttgtttttcacttagaaataaatctagttttaagagtagattttggtggaatccaatactgtttgaatcttaaattcctgataattaattggttctgctttttcccatttcaacaattctcaagattatagtgtcataaaggacatggcttaagtaagaagctaggaagacattttttgttttttgttttgttttttttacagaaagaatattcctttaacatttaaaaactgtatgttatttatagtccctccattttgaagcccaaataccctgctgaaaaacttttaaaattacccttttagcaaggattcaaagggtaagcaaatattcataattcatagtctttttagtgattttgttgaggaacctgggaatctcgaagagcctctccaacagctgctagaacacaatgtttctgttacaggtttaattgagatttataggttctgattatattctgagaaacagttcttttccacacctagagtttagaaatgactgtcagttacttagatactggagcttctgactggatagtagaagtgtcattatttgtgaattcatatttatcctagccaacaaagaaacattcttgaagctacatatgatgcaaccaaaaaattgtcattgtatgctccatctttctttgtgaatttattttttttccccacagtaacgcaggacatttttatagaaataaaatcacattgtcctatgacatccattaaaacctgttggtctggatttaaatgaatatgtaaccacctgttgttgatttaaaattcatttgtaggaagaccttgggtgatagggtggggcacagtgtatgtgtttgtgtgtgatacaccaagtcacagtcttcaaagagtctcagagtagttttaaacttttaacttaaaacttttactttagatatagtgttaacatcagaaaattgtatttcaaagtaaattgaattttctctgcacaggtgacatgtagttttaactctgctggccatggaacatgatttaccttcttatctaagagaaccatagtgtttgtcatagaatttattatgtaatttagttggcttaagtgtaaataaaattcatcttaggtgctacttaaggattgctttgagcatagctataaattattaaagtttcaaagttcacaaaccatatacagaattgaatgaaatgaggaatgaatgaggcttcaatgcaaattaaaattttatttttgaaaaatggtattttctagtctttgtgcaaacttcttcacttgggattccttggatcctctcctaaataaactacctgcaagtccttgtctcaaggtctgctttgagggaactcacatagagacaccctctaacaaaggctgcctcaaaggctagattttgaattgatatgggaaaaactaaggggtgaaactatccaaatctgcttgattttgacatacttcatttcagaaaatatttccaagcgtattcagcttctcctagtctggagctttgtcttctctcctaagtctctttttctctttagagaaaaatgtagagatccgggagaggtgaggggcatgatgcctttctttgttagtttttacaaaaattttataatttaacacatagtgtcttttagctagtgaggtcagaattattacttggtgagatacagagtagcagttatattctaagaagaatgcaaatttatcaagtggacacttaatgggagatcaaagaaatgaattttctcagctcttatttcagaaattttgtgctaaaacaagttgcagcatggagtagcatgtctccatcttttccttcttggccttggctccagagctcacttcttttcacccatgaagtctttatcttgggttaggagtaggttccagccactgtgatgagcccgcattacctctgccttatgcagaaccagcagagactgaataaaacaagaagcccgtgagtgaattttttttctcatgatgggccctccaagatgtgcaagacagaagaggggacctatagactgaagtttattatttctattgaagaggtgtcctttctaaaagaaaagagatgatgtgctgtggacagaaagctgaggacaaaagcaggggattgcaggaaacagggtgaagagggcctgagttgggaatcaagggatttgcatctgggaccctccttattccccaggcttcagctgtaagattgtcccccctttgatgacatagggatgacatgactggatcacaggcattgtgtcagatttgcttcaacctggctgtatacagttttgggactcttcaatgaaaaaaatacctaaataacatccagtacgcattgggtgggccaaggccagccaaatagcctctagtgcaggtggaagaagattccccttttctctggtcgtcactgagtgatggacttctgagcatcaagaatcaacacagagataacagttcacagagggaaacagtgaggtctgcacccatttttccctcctcagagaatggctggaatgcacttgttgggtagaagaaggaaaggatcccctatccatgccacacacatttctacacttgcattgttaataaaatgatacaaattctctaatttaactcgttttcagtgatttttaatctcaccttcccactataatgaagagcagtggaaagaacatggagttggggtcacatcctgggttcatggccctggatcccacagaccagactttgtaaaggctgaaggaaagaaaccaagcattgaacagtgaatttggggtgggcttaatattgtccaagtgtttactatgggatttaattacccgtgaaatttttgaactttcatttctctatggaaatatactaatgggaggggtccatattattcaaatttaggggcaacttatgctaacatgtgacttttttcaggtggggacagctaagataggtctatggtgagcttgaaaataggataggggatgaattttgggatgatgacatcgtgtggctttcaagcaaacttaattacagtcctgtcctggcccatttcagaagcttggagtagggtggggcaaaatatgaaacttccatttcactggtctcagagagggataaatagcaagggaaaggccacatgaatgagacggtggaattttcctataacccagggcctgtgttgtctgaagtattctctgttaacactaggggctgagagagaactaagactgggcattgtggagctccagggagatggagaggggacttctcagtatgtctccctacccaaagcaaacttagcttctcgacaccctgaccccacaatcttcaatgacctcttacaagaatgaggagctctcaagtgattggttagattctgtaaagctgattggatcccattcactaatgggtgagattaccgcaccatgcaaagttacactggcctgggaggttccactcttcagttctttctttcattgtggctggatgggcaagctgagacagggcacactgactgcaacaggctgggccatcctgttctttctctttgctgcttctcacttgcgtgtcgcatcttgcagtagccagcaggtattaatattgagatttagggacagtcaagaattcctctttggtccttgtgcctaagttttgagtccatcccaattttatctgagaacctggaactaatgatcctggttaccaggtcacaaaacagcatgtaatttttaactgatattgtttcttgtgtgaatatctccttcaggaatctcatgaaaaatagtgattactgacagtacaggatttgagaatttgaggaactttggctgttagagtgaccaagtttgcttgtttgtctgtgagtgagggggtttcctgggacacacaactttcagtagtaaaccaggaaagtccctgataagctaggatgagttgatcaccctggctgaaaagccatctaaaggccaatacaccccacatgcaatttaactcctactggctgtgtgaccttggctatgttgccaaatctccctgagccttaaattactcaccaggagaagggtgagtattttctgcatattaaattagactaagttaaattccttggcatattttctggtccatagtagactctctattgttacatgtttccattttattttctcacttatgttggtacagcaaaataaaaaatgatattctaaaaagaaaacacaaaataggaagaattgaattccttttctggatggaggaattggagatgtttcctgagccccttttcttcaagcttttccccccaatgtgaagcagcatcaggaatgaacaatggaatagtgaatgtactccattcctggaataaagcaggggtcatacattcaaacatctgcaggggccacacggggaccatgaatgaaagaagagggatgaatggacttgtggcaagctggttgcaaatgcagcaggcaaccactcagccccaacagattgtggccatgtaagaagggcccagtgtgccagatcttacaagtttttcttgcaaaaagccatatgattttttaaatgttaaatatactgatttgaatgtgttgacatcaaacctaaaactttttaaaaagatgtgtaagccaatcaaaacattctatgggccattaatcttttgtcaagttgcttcattggttaaaagagtgaaactggatgtcacggatcaaccagagaatgtttattctactcagatggaataattgtgataaaagaaaaccaaagtaattcaataatgacaaaaaacaaaaggacaggaagtttctgaatttgtgttatcttgtatatctgacaactcgactgaacctgtggagttgcaaaatcataaaggtagaacctgctagcaaagctccatgaaatgcttgcaagcattagctgataggtttcaaaacagtatgaatattagtcatcacagatattcctgccaaaaagggtagcgtgtcagaagaacatctgcagcacacataaataccctctgctaagttaaactcagagaggaaataagcttccaaagttgcacaaagcaaagatgctgaaacagcagagttttgtattaaggggttgatagacttgctctcatggtgaaactgtttgttgaggaggtagttagctcccaataatattacatgcttgacctttagcttttagtgacaaaaattgtttcaggacgcatttgggctcagcctactcaataagaaatcacattgtataaattgagcattaattgtgtcaaaatggggatcataagtgattaatactcccaaattacaatgatatggtaaaatgaaaaaaaaatcagctaaccccaggatatacccaaatgtgttataggatcaagtgttaaaagcaagcaggtcataacatttgctaagaaaaaagaaagaaaaggaaaaaaaagctgcagaacccatggtattatcttgaactattttaaagtagaaaaatatgaaatcagacaggagcaacctgccacatggaagatgatctgaagaatcatcactcttatgatcagaatcctgtgaatacagagctttcatttctggtggcagaaccatttctcagtgagcaacattgttttgccataggacagaggaggttgtgatctgttgcagatttctgtgggtcctggatgccgagaccaggaaccctacagagagaaatccatgcgtgcggcattgctgaggatggctgcgtgagtttctctttcgaagtaatgtgttttgttttttttcttttttgtctcaacgtatccaaacagtacagttgtagagatggggatggaattttatttgtcttttgctttcattgttttctcttgttaaaagaaaaacaattgatttagagtttaaaggctgctctgcaactatcaattatataaagccaaatagagtcatatactaaatcctttcttgcttctcaactaaaaaaaaaaaaaaaaaaaaatcctgtgaaatcactttaggtttgcttaaccaatgtacagtcatgatttgagagcataagaaaccctataagaaaccctatgccttaagtgaatcccattgtgagatacttgagctatgaggcggaagtttcaggctaagcagtgtaatatcttttcaggaggctaatatgctgatccatttagagcacagaggctgattgataactgtgctatcaatccccatcactttggcaggtcttggttagagaggaaagatcttgcatttaggtgaagttgagtcaggaattggctttttgaacttagaaaacgttgctagtgtaaggctaccttttttattattaatctacagttcatatttatgcagcttaagaagacttatttggaataataagaccgtgattcaagatcttagcatcattgcttgcagatttgtccagtatgaaagatattttcatgagatgaatcacttaaagacattaagagtcagtgatgaaaccacacactctcgagtttgaaaagagacagggctgctttaagagagaaacaggaagttgtaactagaagccatctgaatactaagccagggcagaatgcttgtgaagtagcaactaaagtggcagtgtttcttctgaaattctcaggcagtcagactgtcttaggcaaatcttgataaaatagcccttatccaggtttttatctaaggaatcccaagaagactggggaatggagagacagtcaagggttatgtcagaaaaggatgagtatcagtttcaacatcagggagcggtggagctgcttgtcttcaattttttgctcatccttaccattttgacaatctggttatttaaaaatcatcgattccgcttcttgcatgaaactggaggagcaatggtgtatggtgagtgcataaattgtgagattgatgtgaaacttgttgcttgagcgtaattagagacttgtgctcagatagcaaagtaccgaaactggagaaaatgtgctgattgaaatgtcattagtttgatgaaaggtgctgcagcgtaacgaatgctaatctctttacagacaagccgccgaaatttgccatgtcacgagagcaaatgtcacagtcatgttctcacacggcacataatgcaagtctgttgacagatgcgggtccattgtcatgtggggagtcgagggcgagctgtttgtttttgtaatgatgttgggaagtgatggctctgcagtcacaaagagcagccttctctcactggctgcaccgatgaacattacgaagttctagaaaaaacatcacttcaaaatgcctggagtaattcctcttatatcaactaatttcaagaagaaaacttgcagaaactaaccccacccctcttaagagaatattgtgtccaagtcctttttatttatacgaacagtgtcttattttcttataataaaaagttataaataaacgagagtttctttatgcagtactttttacttcttagcctgatttcagatgttctaatttataatgatcattgctagtgttatttgttatgtatctcctatttatgtattggaggccaaggtgtggaaaaatatttaacacctgcagtattgctctttctgggcaacttaccgtatcattcctttcagaaagtttaataaagtctgacagagattatctgtctgtactctcatcttttaaagtaaaatgaaagacaccagtttttactggtgttactgatgaaatagtttacttcactgctcttatctcagcctgataatggataggaagtttgaacacaatggcaacaggcaaggcattgctataatttatagcaaataacatacttttatatttggggtttcctcattttggaaatcctgaaaccctttcctaagcctgagattcagggtacagatcaatgcacattgtatatgctaatcctgtggtgtcctgatattaacagtgtatagttgtgatttcagaacctaaggaatcctaagccttaagtggatcccactgtgagatacttgagctataaggcggaagtttcaggctcaggaggctgatatgctgatccattcagagcacagagttaaattccttggtactgagggtcttttaaaaattttttgcttgggagtgaggagggacagcattaggagatatacctgatgttaaatgacgagttaatgggtgcagcacaccaacatggcacatgtatacatatgtaactaacctgcacgttgtgcacatgtaccctaaaacttaaagtataattaaaaaaagaaaaaaaacataacccaaatgcaaaaaaaaaaaacctttttttgctgtattgttttatttattttttaaaatttagtggagacagggtctcactatgttgcccaggctggtctccaactcctggcctaaagagatccactgaccttggcctcccaaaatgctggcattacgggcatgagccaccattcccagccagtattgagggtcttaacgggcacaagaaaactctcatttaagagaaaaaaaaaatcacaatcaggtgggagagaaatagccaaacaaaaaggaggggatgccatcagatgtgaagccctaggttcctgtcatttgcctatctccatcatgaacagaatttttctcttgacttgactaataagtaatctgcaaggatatggaatagaatctgagaagccagaaacaatgtaattcttgatatcatattaaagggacatatgtgctttagcaaaactacccagatttaatagattgccaacctttattagagggaaagatttcttcacatccctgaatttgattgaactatgactcatttaccaagttcaatggtggggatattgttttcgtaaaagttttgataacctactaaaattcagtcatgttttgcattcacaatacatacagtaactcttacttttgaatctgaaaaattccaggttacctttaatcctgcaaaactctctgaaatatttttaaattgtgcttgaaataataaaatagtagttcattgaccactgctattgaggtagcatttctctaaattgctgttcttaaggcagataaaggcttaaagtttatgagtggaattaagttcggttctctgattcctattcttctttcatgagttttttaaagtaaaagttattgaaagcaaattctgaaccagtgcaatgtaaaaggattataaaaattatggagatatgcatatatatgtattctcttactagaaattttgagtatctttcagttatcttgaactatatagatcaatgaaaagacatattttagtgatgtttaactttttcttggcatagaatcataattgttaggatgtcaaagaattttagaggttatcttctctatcccctttattttagagaggcagaagctgaatcccagagaagtgaagggactttccaaaactgaatagccactcatgactggtccatgtgctttcactcatctgcatgtcttactaaggttcacgttcacctgaaagaactctccctgtgttttctgaaagtactccatatgggtggcattcatgacttgtcacatttcttcttcagggatgtcctaaatgttatatcttaaatgcttattaggaactttctatcagtaatgtaataaaatagtctgaaactacaccagaggaacatgatgggatactgtagtaaacactttttaatgataggggaaaggaaatgccaagtgaattaattgtccaacagctataaatgaacttggaatcatagatggggaaggagccttaaagatcataaatccagcattctcattttgcagacaaacaaatgaagacttagagagataaaagtcgtgtaattagttagctgttgaggtgggattcaacctccatctctttaataagagatgctaagatatttaaaaataagtaaattattgcaataattttcctggagaaaggatgtgtctgtgggatctagatgcatcctcatatggttaagctttcaggattagccagattctcttttccaggaggtctaaaagagtgaattttcagcatcccacattgtactatccccctttccattaaaggattaaactcttagcttttgcaagagcaggggggcatggtgataactaatggggaagaaaagaaacaaaactatgtttaaaacttaagctttttgagctatgattgtgccacttcactccagccttcactcgagcctaggtgacagagtgagactgtgtcagaaagaaagaaagaaagaaagaaagaaagaaagaaagaaagaaagaaagaaagaaagaaagaaagaaagaaagaaagagaaagaaagttaaacttttaaaatttcttgttcttaaggaagtgaacatttgagagtagactgtaacagtcatctccgtgctacagacacatatgcttgtaatgaaatatattttaagatttagtggacctgcacctaatgcttatcaatgaatttggctagcaactcccctactccaccgagtactgttcttgctctcactatttgtataatgtattacttgtcctgtatcaagaatgataaatgtttttccccagcatcaaatttcctataatacttcagcctattctgccatctgcttttctgccagtattcctttgacatgtgtcaaatgttctttagaagactcgatagagttgagtctattttatcaatgtacctgagagtccaatttaaaaattctagagaacaggggcttagaaaacaagcagtttaaaaattgcagagaaaagtgatcaagcagaatgtttaatgttcttttatatttcttgttagaaataattttcaagttgctaatcttaaaatatcatatgaacacttgtagagaccaagaaaaattgtgtggcatttggctagactctgtgtcaatcagagattcatatgatactccaaatagtataaataatccattatataaaaaataggtttttcttattattaagggtcataggaagcttataaaaattagtggcagctttataaccatatttttgcttcaccaggaacagtaatgggtaatctattatgatattcgatggttctcatttcaaaattgaaggattagaatccataactggtttaaaatataagccataatgatactcatttaaattggactggaagcataaatgacaattagcggttaaaatattgattgacagcagctggtgcacttagtaccactcacttagggcctgtatcccctgttcagtgctcataaaagaaatttgctccttgctccctgacagcattaagaattccattatatatcactgggggctgccatactttacaggacatttataatcctgtgcatttgagggctgggatctgagcttagggacagagcaatttaaacctcttagaattctgcctttgacttcctggccttcccatagaagttagtctgaattcatgtaaaaattgtggccactgtttagtgggcacataacaaatttcaaggcactaagtttacattttgaattcattaaactatatcatattaaagcgttttcagattctttaagaatgtgcttaacagttaagtaggacaaatttaattcactcaacaccaagtttttcaagatttaaagaaaatacaattacatagtgaatcatcaaggattgaaaaattatcttttctgaaaaatcttctgcaggcattaatttcttcctagcactccctgcaggttcctcaggattaaattgggttgttggacatgttggctacaccctcctgatccattttaccctcctccaggacagcccagcctccctgactgccaggcctatgggagatgcttcctactacttcacccccttcccgctggctgaaggtccttccaaggctctacttattccactgtggctttttttatagagaaaatattgatgtgctcccctggagatttaagtttcttaatcttgatgatttttttttcagtagctagatgcattattttgggcaagtgatgttacatctggccttatttttctcatctataaaatggggaagaaaggaacagatatcacatgtctcccttccagctgcaaaagtccttcaaaattcaggccaagactgagttcaaccatcaggcatctttcagccactccagcccaaaccagaagctttccttccagaacatggcagcctataatgatatccagtctgttctctcagacaagattttagttagtgttatttcagcactgttagtacttcctgcttctgctctgattttgcaaggagtgctcagtaaattctgttgaattcctgtcagaaaggtgaggagaacaagttaatagtgaggactggctatgtattccacagtttgcagaagcattttttatgaaaacaagagtagctctggtttaattttaagggatctgcaggaaaggtaatcacggttaggagcccagcatactaaacttcttctcccttttggtgtaaaaaacttgatttttaaggaacttcagagagttgtacaatgttttccatgtgttaatacatttgccagagacagggaaaataatggaagaatgaaagtcatactgcactctgtatgtttttttatgttttttggggtttttgtttgtttgtttgcttttttgagacggagtctcgctctgtcacccaggctagagtacagtggcacaatctcggctcactgccagctccgcctcccaggttcacgccattctcctgcctcagcctcctgagtagttgggactacaggcgcccaccaccacgcctggctaacttttttgtgtttttagtagagatggggtttcactgtgttagccaggatggtcttgatctcctgacctcgtgatctgcctgcctcagcctcccaaagtgctgggattacaggcgtgagccaccgcgcccggcctgcactctgtatgtttttaaaagttgattttaagaaaatagccgggccaggnnnnnnnnnnnnnnnnnnnncctgtaatcccagcactttgggaggccgaggcaagtggatcacctgaggtcaggagttcgagagcagcctgaccaacatgatgaaactctgtctttactaaaaaatacaaaaattagccaggtatagtggcggatgcctgtaatccgagctactcgggaggccgaggcaggagaattgcttgaactcaggatgcggaggttgcagtgagccgaggaattgaccactgcactccaacctaggtgacaggaagactctgtatcaaaaaagaaaaataaagaaaaaagaaaaaaaaagaaaagagcctctatattttggataagtaaactaaataaatgaataaactatattctgaatctcaaagaagatatagatgaaactttactgcaaactactgtggtgcctcgaaggactcccccctcagtgtttgaaaggctaatgaatgtgcatatcaagaaaatagatttatgattcaaattatttatgtagatatcatataccatctacattgaattaatgttacatagttaatgaagtggggatatggagagctgatgtttgttaaacatctattatgtcaaaaagttgatatacaaaaataaaaatagctaacacaaatagcattcctgatataaactatgctattataagcactttacatatattaacgcatttaatcctcacaacaaccattttttaggtaggaaaactgaggtaataaaacattaagtaacttgcctgaagttgcacatgtactaaatgccagggctaggtctcaaaccttagcagtttggcttcatgtggtcatctgctatcttaaacgtaggtgtgtttgtgtgtgtgtgtgcgtgtgtgtatgtgtagggggtgtgttatcattttcatattacagataaggaaaccaacactgagagagagaaggtaacttgctgataatcaacagggctgtactcaacttcaggactatataacctctgttctttcacctctatcgcttatgtagtcctagaataattgctgttttttaattaactgttcgctccgtgccagatgatggtaccttaggaagtttacagaagagaggtagagattgagatatgtaactatatgcattatcactaatcctcacaacaaccatgctaaataggcaagatcatctttagtttgcatataaggaaacagaaactcagaaaacttatgacttaaccaactctgcccagaataattggcaagaacactcttttgaaagcgtgcactctcaaattctggctgcagtcgttctctcatccaagtctgctcttgatatgcaactgtcccatgaagtcagggtagggaatgattgaaggtaaaagtagttaagtttcttctctaccttgaagcctctgaaatgttccactgtctatagcaaaaagcccactgtgggaaacagaatgggggcaaaactatgaaaatacatccatattaagtagctggagttgaaatattccaagcctacctggaaacattgtcccagcttgagggatagtcatgttgcaagttcatggtctttctggttttaaatgcctatggttgaaacaatgggtgggacaggtactataaatagtttgagaagggactgtgaatttatatgaatcatgcaaaataggctttcatcatatgttagttaaactgaatttaatttttggaagatactgaaggtagaaccattaacccataatgcttctgggttttccaagttctgaaatctgtgtgcatgagcccaagatggtatgggttttgatggaatttcaagactgtgaggacttatgttggtaggaactactatcttattactatcttatatgacaatgcttctcagtgtgtttcctgaccagcaccatcagcagcttgttagaaatgcaaatatgtagttcacagcccagacctagggaatcagaaactctggggtgggtgcggcccggtaaactgtgttttaacaaactttccaggaggttctgatgcactgaagtttgagaaatactttgctaggaaaataaacttgaaatatagtgcctagtttcatttcctctgttttctcttatttctttcttatcccattactctcctatggtgaaagggggagggttggaagaccatctccctttactaaagagtccttctttcaccgtctataacactttgtaatgtctccatctctggttcgagaaaaaaataaagtgtgttgtataaacattacaaagtaagaaaccatttgtttattcagtatacgtctagttagacatctctatttctatgtttcttctgtcaacttcctaagatgattgcaaggaaggatgttagctatatataagctgatggctgagatagtttctaaagaaaagttatctattatactgttagaaatcccagagttttgtgaagtgtgtacattgtgtatatgtgtatgtgttgtgtttgtatgtgcttgcatgtgtgttgtgtctatgtatgtgcatgtatgtttacatatgtgctatatgtgtgtgcatgtgtgcgcttgtgatgtgtgtgtgtgtgtgtgtgtatgtgtgttgtttgttgggaaccaaggatggattgtggacattagacaccccactctgatggaggatctgatgtttgggactttctggcagttttcatatgactctatcctgtgagaagagggaaactttgaacaaggcatcacaaggttaattagcttcatggactactttccactttggaatttaatgaggttctcttaattggcaggtgtcccagacctgttctgaaatcattctgggactcttcaccaaaacaagttgatggtgagctagtatggagcaataaattgtgactttttagcaagacctatagtttccttagtttttttaatttaaaaggttggtgggagaacagagaaagaacaaactcccccaccaaaaacagaaggcattgtacgttgttactacatcatgtttttactttttgttccatctctgactattctcagagcaaaactaaattgctaaaagggaaaacgttaggaaatgcatttagatatttgaagttcaaacccatattatctctctaaattcatgttctaaaagagacttttataaaatgggaagggataaatatcaaataaaaagttaaaaattttgtagatgcagttaaaatctgatctttgtgaatactatcttacagttaaatgttattcactgatttggtttccttaaattattattcagactatttccttcttctttatgctcacatttgaatccctagttcataattttttaatctgagtgactgaaataataatgtcacagattccctgccttaaagtcttgcattgtacaaagttctaatgatggtaaagaacattcttccttgagcgttattcctttcatcttggaattcctgaactcagatgttctaaattgtcccttatgtaaatatagactaaatatgatgttaacttcctctccatgtcctctctgtccctcaattctcttttctgtcttcaaataattatctctaaatgctgtttcctctgctctaaaacagagcaaatctgcctcccaacaaggaactcgctcgattcttcctcaagaccaccttgccgaccaccttgccaacaccctctccctcctgaacactctccagtcctctgctgtgccaaagccctttgcctgcactgccctaagtgcccatcgcaaactgcttgatgtgcgtcattgatgctgggctccttgatttctgtatacctctccctaaaacaacatgtcctcttctctacttggtgaactcttacacatccttgagaacctcttctattaagtttttccaatactgtagggagtggggttagttggtcttttctttagggtcccttaaaactttgtacattgctttgtgacaggaaaaccaatggcttttctatctgttaagatgcattcagttgcaagtaacagaaaccctgacagaaacagaattaagcaataaagacattatctcccataactggaagtccagagaagagtagtcttcaactctatttgattcagcacctactgttgtcatcaaaaaccaaggttctttccttttctctgttctgctaccttcagtgctgacttcaacatcaggctggcagtgaagtggctatgccagtgcctggtgtcctaaccgggcccattaatatgctggaaaagaagagagctcatctcttctgtgtctctcctgtaggatgtgaaaacctttctaagaagctccctagcaaattcccttcacttcttattgacaggaatagggtcacatacccattccaaaccggttatcagcagggagagtgagaacatccccggagctggagtgagttcaacttcccctgagcatatggctatgtgtggaggggtggacagcaaataaaccagagctttgtggggtaaacaaggatagacattgggctggcgatcaataggacctgatacacttaccagtttgaaatatgatattatataatattacatggtttgaggctatatcttcttattttagagaattggcgatgcctcatgaatctagattattcttggtagccactcaatgcagtgagagtgaaagaactgcaaaactcagttctcctacaatcttcatgtggtaactacatttgctttagactcctaaattcttccaacatcatgtagcacttaaatatagacctttgtaatagtctaattaggcatatgtatatagctgtgcttgctgcattgtgcaactctggggaagctctgctcctataggaatggagtctaaagcgatctggccagagttgtgccaagcagcagggaactctgtgtgatggtgtctggacacaattatagtgttgaacacagccaaagagattaaaatctcctttaaaacacttttgtgttttaaaaaacattctgaaatctgctttatttaagctttttaaaaaagtaagtccctattttttatttctctaagaaaagccactttaagaaaatgcttcagcctcatgtggaatgaccatcagtaagatgcaagggaaattggttatgaaatgcagacttcatataaaaaatttagtaaatacttgttataccttattcttactggaaattaagatggcaggatttggcagaagggaaggggctggtaggttaagatattttaatattttaagggcaaaatcatattttatttatctttataataactcctacaagtcctagagcaatgccttaggtgtctgtggcatgaacacataataagggagtaatagagtaagggactggagttttctcttattttcaatgtggataataaaatgagaatcagttcaggaaggtaaggctcatctttctaatgttccttggtttgagtactcctgaggctgtttcctccttccttctgtcccctctcttctttcttctctcacaaacatcatgctatcaactgtatgccatgcatgtgctatataagagttatgttgaacactctgcaaggacagggacttcacagcatttggtgtgatgttccttatttgtgacactttaaaatgttggtaactgactgactacataaactcggaggaccttttcttcttgactccagggagcttgtggacttggagaaagttgggctacaattctgcccaaagtgattggcttttctagaggaaaagagataaagaatagcacagagcctctgccctaaacagtctcattgtctggttgaggagaaaagccaagatctgtaaagaagcactgaataatatgtctttataaaactggtttctaaagtgtgtggttcaaacaataaatgctatcagaatgcaaagatgaaggagttcaatgagcacagactttatcagggttctggtgcccacgggtgggacttaagagggacattttaggatagtgagtgctttaggaatgaagtccattgtccatgctttctgtggtacttgtaggctgtggagagaagtcagggttcattaaagtgcaggtacactctgctgtcatcctaggtacccagacgcccagacttgaagaagcaggggatacatctagactagagttccttcctagagaaggagatgctgccaactggccaggggacagatctcagagaagtgttgtgtatgcaggaacctcaacctggggccagggctgtttgcacatggactgggtgggtatccctttgcaggggcaggctctcttctttcctcctccagcaagaaggggcctggtttcatggtttaccaacaagagtggtgcttttgtgctgttcataagccgtggcagccagtctcctctttccttcttctgtgaacaagtgatttctgctttcttaatcttgtatctttgaatggtataaaaacaacctactctcattaacattttctttctactagccgtcctactttatctgtcacctactcatatatgatattgtgtcagtgtacattaattcaacactccatatttctgtcagcatatggctaaaacactgagtcgatgtttcactataaaaagcattatgaggctctatgggtaagtagcctctgacaaataaggattttccagctgccgctgctgcagcaagagtgcacaaatgagtgcatgggttttttaaccagatgtgttaggaggctgagatttttcacactggctcttaccatctagcaagatgttgtttcttctcaacccttggggtttggggaaaaggagggctgaagccttttggtgagtgtgttaatttgggtcctccaagaagcagatgctagaaagagattcattgcacaaaagattttcattcctttagagaatgtggggagtgagcatgaggatgccaggacagctgtcaggttttgatgcaggcctgatcctgtgaagagagagaaggaaggaaagctgggtaggaaatctttaggctgtggtgcaattctaggaaaagtttggcaagattaatgatgggtccctgagccatggttgcccttcagaggagtccccatctgcttgccttagtatccctgctgtgttcagtcatcggctgggagcctgacctcagtgtgaaagtggtgatggattccagagcagagaagctgagaccactggtcaattgcctcctcagagtgggaggtacattttcatctatctgagaggtacattttcatggctattacatctggtcacctctgccacaatggcagcaagcagcttcctctgttcacttcaatgtgcttcttctcgaagaatgaggccagagctagtgcagagggatagtcagggccatttaggtttggaggtcttgtatgaatttaaccacactaggcaccaggccatcactattatgacaaagacttgctttctctgcttgggaactaatagtggacacttcatgtttatttcttgttgtttcattgaaagcattttgtaaaaaaaaaaaaaaaaaaaaaagagtgcctcgcccactaggaattacaaatgacattaatatggattctttccatttaggccccatgcagatagtatcttgtgcttcccgtctttgtagaagtagaaagaatagtaatggtgtcattcatggtacttgctgaataacttttaggaattaaatcctttctaagcaacgtgtgttgaaaaaatgatgttcttatgcaagcaccctaagccacgtagagtgtagatgatctatgttcccttcttgctcctgactagttttattgtcgtcattcaacactgagcatggaaggttgcctactgtgctgtggtggatcaagcactcagtgagggttacgtatctataacttattttctcttgctcccagagatttggatacaatttttctaattactctggaggagtcagccaaacactgaagcaggaataataaaataaaaatattcttgaaagaaatctgcttgcattctcatcctcactctgattagttctcaacattgttgccaaagtgatggttctcacatgaaagcctgattggtttactcccctgcctaaaatctttcaatagttctacattaccattgggttaaaaatcaaaacctctcagcatgagagaggagcctctttctgacctggctctgcctatggcctaggtctagagtctctctctgtctctctttctctctatttattctctttttacaccactagtgactccctaaatgcaccagatttcttatgtctttctgtatatatgcattgtgttagtaaggttatcactagtgatttcttacacagtatcccaacattcttccactggtaagaaccagccagatgcaagacaatcaggaagcatagcacctggctgagcagccacttgccaatagcaactctacacacagggagagtgtagatcctggtctacatacagggagagcatagatcctggtctacacacagggagagcatcccagctgtctctgctcttacgtgctgctacccatatgtgcaaactggatcccaactcattctgattcagctcatctggacaaatctatgtgaccttttaagatttatttcaagctttgcataattcaaagggcttcggaataccccctgtctatactcatgtatcacagagtgcttcccagcggtcatagcacatgtcatgttttattataattgtttgttcatgaatcttcacttacacaaacgagctcctgtaagactgggcctgtattctaattttatacctataaatgtctggtacacaatatgcaccccaaaaatgttttactaaagaaataaaaggttattagatgaccagattcataagagaggtaaaatctccaaaattagaagttttaaagagtgaactctggatcatttatcccaaaacacatacatcagtcctaattttaaattgacagagtttaggcttctgatgtttctctgttgcttgttaataaatctacatttaaaaagcccacagttatcagatcgccatgagcatcttaacagagtttaaaaacgtaaaaattcaaggattgtcacttaggttgaattgtttatgaaaaggaatgtggtatcattagaatgcatttggctacaagtaaccagaaactagattcaaaacggaaaaattagagaatgtattatattacacagcaagaagtttagagttagggtagctctagggcaggctggttgatctagtggctctgtgatgtccttcaacacctaggttctgtcttctgctactatcttagtcctaccctcctcagtatattggctgcattcttggactggatctacttatggtcacagataacctgccagcaaaaaaaaaaaaaagaactatattgccttagtcatgtcctgagagagagaacaagaacacctctcaccccaaccatggggtgtgacataataaagtctgatggggataactgagatttgtgctaatctgtggaccagaaacactcccaggggaattccatctcctgattagatgactcagtgtctatcacagagcaaaggttttcttaaagtatttggatggatagaaggagttaggtatcttttctctccaaaattagtaggtccactagggagaaaaaaaatgggaagatttgctgagtattgaagcaatggtgctcactacaaatattttaacactatattatgttgaactggtatccatgcaaaagtgaacacttttctagaccaggcaataacccaacactttatcctgtcacttctgaaggttccaaatcatataggtttccaatagtggcattttagattgccttcctccagtaccattatttattcttttttttttaggccttataatgggactaattttacgatatgctacagcaccaactgatattgaaagtggaactgtctatgactgtgtaaaactaactttcagtccatcaactctgctggttaatatcactgaccaagtttatgaatataaatacaaaagagaaataagtcagcacaacatcaatcctcatcaaggaaatgctatacttgaaaaggtaaggatcctgtctggtattatatatttgttttacagtataaataattgtatcatatttgagcctttatactttttatataatgcattcacacacacatatatgcctattttaacaccactcttttggagacgttaattgactaaggagtcaaaccctgagttatacccttattacaagctgagttgcctgtatttttttttcctagaagttaggaaagaaaggttttcttttttgtttttctgcaagccacagttatatttggttaaaagaaaaaaacatttatcaactctgcctttcctgatacttgattcaagttttcacacatgtgctttcagcaccgttgtatataatgccagctgaaagtgcagttcaaatctttcttaagccaaagggaaaatggagtagaataaaaacattttcacttgcaaacctggaaacctaggatgactggcttttggctaccaacacaaaacactggccacttggctatgtataaatacactgacatgcagtcagtgtcaagaaatcgtgactatcagtttggttaaggaatttaggtagaaaaaaattgtgaaatgagtcatcttttaaaaatagtttcataattgcagatttgtgaacggcttcagttactggaaggaaaactttcttctgctttcaggaatctgggtcagaaatcaggttaggttatcttttgtggtgccttgtaaaccctggatcagtctttggaataaatgaattcctgtttaacaagtgtgtactaagaaccaggatctcacatcacttatttgagattttttttcaggtcagagctgagaattttctgacactgtggaagtccattgtttcacttttatcccatatgtacttagtttttatgttaaaacacacctttttttttccattttaagaggtttggaacagaaggggaggtacttggtctgccatttttcctcagtcaagatgactaatttataataattgttttcatattatcttccactagcacatttttagattaacttcctcctagcacttggtaagggctcaggaaagtcaaactaattataatattagcctaaatcagacttgggaaagtaaactgaagcacaaaaaaagcaaattagataatgtatttctgaaataaagaggagcaacttctagatctgccactgcttttggattatctgttttggattatctcttccatgtgtttctctttgtttatatgataataataaattatctcttttaaaataaatattttttaaacttgttagcaacataggatttaaattaaaatacattcttgagttttacctttggttagtacctggacatgaattatttctctcttcactctcctacacatttttatctgcatttctatacagcactatttcttcaaacaggttgacacctctcctcccaccaaatgctgataattatccttgttgctgtagcaattatattcttgaacaggattgccaataaatgcctgaccagaaattttgttattgaattattcacatatttattccttcatcagcatccagagccaaatgtttgcttttgaaaaattagggcaagagatggagaaaacgtctaagttgctggagccctcttggtgttttcagtgagtggattatgagctctgcaagttcggtacataaaatgtttacttgaccttgagtggctcaagtagtttctagatgaacttgtcaatcatggcatctggagatgggaacaggtgactcagcaacctgactaagtcctcctctcattgctggtatagaaaggggcatctactagcatacttactgtattacatggctttaaggggaaaagattttgtttataaatacctggagtatgtcactatacatatttgttgcttatgtggcaatcctgggggacactagttaatctgcaaaactgaacaacctgtagcctgtcttccttactgagaattctcctttgggaggcttataaggaggtaacattgagtaatgtttaaacaaagttaggattagatagatcttccatcccccttctttgagtttcttaagcttcctaatccctaactttcttatttgtgaagtgaggagcttaaaacctattctgcaggattgttttaatgttcaaatgagatgatgtgtataaagtgcctggctaacatggggccttcacattgtaccattgttactaccaccactactactactagtactattgccactgcactaccactgccaatgtcattgccacttccactacttccaaaaataacgctaccattgctactattagataatgtttgaatgcttaatatatgccaggaattaataaaatgtgtatttcttttattaatttatttaacactcatttggggagataagaccaacgtataatggatacttgtatataattcagtcctaaattgtatcatatgaattatgaggactgtgaaactttacagactagttgtcataggtacttgagctggttacataagcttcttggggagatggcacttgagaagggctttgggtaggcagtagggattgaactcagaatggccatcagggcagggtggactggaaggtgagactgcagtaagtgagtatccaggtaagaattgaagagggcttcatgaaaaacctggatgctttggatcaacagagcctgcctgatttgtaggaacagtgtgaagagaagagtctaagtttccaggattttaagcccggataaaagaatatgaagtttgtagggtaaaagtttggggaggaaagaagacttgaggaaggggtgggtgcaaatgccctggatctgcatatacgtatcacctaatttagagcaagaaagagacccgacctcattaaattgaacctcatcatttcatagatgggcaaaacaagaaattaagcactaaaatcaatttaagtcagtggttcccaaactctctgcactttggaatcattgggaagcttcaaaacatactgatgactgtgtgactgtgttctgcctctgggtttgtgatttgactgatttagggagtatcaagggttttggaatttttagaagatcaccaaggtgacgctaatgggcaaatgagttagggattttagtcctacttcgagttcaggtgaaatggtgaggagagagatgctgcgtttgttcttctttacttcacatccactgctgcagatctaccagccccttattttgttcactcaacacaacaagaacttttttcttcaggacctctgtacctgtcattcctttcacctaaaatggcctcacgtctaccctttgaatatcagcctccttcacattactagagttttggcttgaagtaccatcttttcagagagggcttacccattttctcacactgtatcctccctcccttctcttctctctctctctctctgtgtgtgtgtgtgtgtgttggggtaggtatgtgcttgtttctttctctcttatttcatagtacttgacaccatctgaaattatacatgtatttgcttgctttttgtttattagcattcttacattgcttattgtccattagactgtaaactttacaaaggcagggaccataccttttttactgaccaatgtatccccaaagcctatcctggtgccccatgcctaatagctgctaaacaatgagtgaatgaataaataattgatgagtctgagatcttggcagagcacatatggctagagaaacatacagtatttagaaattatcattcttggagttggtagaattgtagtgtcctggatgcttaatgtttgtagacacctgagacattctttaatcttagctgtgcatatatggataatacattaatgtccagagaaaatacatggtgagttcagggtcccactactggttagagaagagatagaacttggactatagcacttaattctgagacctgagtaaattattataccccacactactggacaggctctctgagaggccacatggacagagaagggcagggcacctggggctaagacctagagcgtttcacagttagacaggcagaaggagatgaccagtgctagaaagagtgcagggaggtcagagttgaggaagaagtccggctcagcagagtcacagaagccattagtgtggccccactgggtccttttcctttgtgatatattttaaagggagtattttgcctttgtttctaaaagttacatgatttgaaaatgggttttactcttagaaaaatatagtttagtgtcttggatgaaatttctgacttcaggatttggagaggctggaatgaattcttgtgctatgtaatggcctcttagaagattttataagagcacgtgtatttctgggatggttaggcattgacgtgcttagagacagaactggtttgatggctctgtgagttccttccaataagaaggtataaaactggaaaatatgagagctgttggcatttatataaacagcaatgtactgtgattttatgccatgtttaaacatataaaaatttcaggaaacaccatatgccaaacttgttttgttcatgctcaacacagataaaagtgtagaaaagaaaaaaaatattttcacttaaagattggtgaaaacagtattcttctatatgttatgagcagacgatgaactcaaaacaaccttctaagaggataaaacaagaccatgttgctctgtatctgttcagccaatgtttccaccaccatttgtcaaattgttctgtgtatacaagatacctgcaactggttgtaaccctttagggcctacatcctattacatgatagctttgcaaacataagtttgttatgtaatatttaggaataccaaaatgtctaccaaatatttctgcattttatgtcaataggaagttcaaaacctgttttgaagagaagatgataaaataactttctgtttcatactttcattcatttattctttcaacacaaatgaactgagtcctatcaatttcaattctgaaacaagatgtggtcccaaggagtttagtagtaaatcagagaaaaacatagcatatgaataaatgaatgagtaacactaaaggcacgtatcaaaaaagtgggacaagaaccacaggcatccagaacaggacagtatggtctcttattaggggtaataggaaagatttctaagaagggcagttgattgactctgatgataggggtatgtgtggtgttggggggacagaggggaggaattccatgcagaaggagaagcatgatatggatgtgggaaaaggggtagacaatattccaggaaagaaaaagcatttccaatttgttgaagtgtggaagaccagtgaaacctagagctgaaaatgaaggcagaccttgatttggaagcccctgaatgccaggctgagtaatgccctctctatttgtagtcagaggaacagtgtaatgttgacaaaagcaaaaggatagtgtgcctgctgtgtacagggtagagagtgaaagcaaagagacagatgaagcctagacttggatggtaaccaagaggtagatgcaagaaaaacgaggaaggaaggctgtgaagggcttggcccaactagttagaagaagaggaaaaacagcttcctctgctaccctggtcatgtgggttcacagaagggtggtgaggcaaaaatgtggaagttaaaagttagaagaaggagttgatttgtaggagaaaatcacaaatcacaaatatggtggtttttttttttttttaagacagagtcttgctctgtcgcccaggctgcagtacagtggtacgattccagctcactgcaacctctgcctcctaggttcaagcaattctcatgccctagcctcccaagtagctgggactacaggtatgtgccaccacgcccagctacttttcgtattcttagtagagatggagtttcaccatgttgtccaggctggtctcaaactcctgacctccagtgatctgcctgcctcggcctcccaaaatgctgggattataggtgtgagccacagtgcctggtcacaaatgtggttttaaactgatgaatgaatgaatcaatctatttcatcattaatttattcatcattatttagcatgttaggtgtttataatactcagttggaagggtcagtgggccatttggctggaaaagtcttgcagatacagtagattatcaaaaagttgtcagtacagttaaatttacacttcctatcactcatagataagttgactgtaatgcaaaaagtcaaaggaaactacccagcgaaaattttgccaagtcttcacttcctgtgtgacaagtagacactatcgcttggtaaaggaagttactttgaagtgagttacactgctgagcaatctgtcctttctattctttcaataaagagaattgccaagctgcaaataggtcatcagagctcgtttcaattgtgttgataatactacatattttagagctactttaaggaagcccttatagaaacaactaaccataagacttttaaaagtaattttgtttttgaagaattaaataattaattttttgtagctttaaataaataaatcaaagtccttttttttttctcaccatccaacttttcctaatggtgattttgatttttcatcattcagagttttaattctcatatatttatttgtaaactacatttgcatttctagtcttttcctttacttgagcttcaataaggccaggggcaaacctcttcctgtaacaggaatcgcttgagcagagagagtcattgggccatgagataaatatgtacagttaacactaggacactcttggggaggataaacaaaggactgaaaagaaattttttaagaaacttttctaggcacactgagagaaagcaagcttcatgatgataaatcagcattgggggtgtggagaagcatttgtaggatactatcaattattcttcctttcaacagagaatagggctccatgatttgtgtttctctatcatgacaattcttggctcctaccacgtgagatggttccagagaatgtcaagtttggcagtaaatgggatgaggctgtttgggcggatgtagctcctttcatcctaaaccttatttaagagatctgctgttactaaagaaactaaaaatttgtttgctttagctgttttcttccactttcattcaacatttttggcaaaaagttggcctgtgagatgacctcagaaatgtatttaaagactcaaaatattccatttggttttgatttcatcattgaacaacacagattttcttcattccttcagtcattcaaaaaatatttatttattgagcacttgccacttgccaggcattggttttaggtgctgcaagtatggtagtgaacaaaacgaagtccttgtgctcatggggtttaacttcctggagggggatagacaaaggaagttcagcacaagcatttgtaatccagagccaagtggaggcaagtgctatgaagagaagttagcaaaattagaaggttcggagtgaagggtctttagatatgtcctgcagagaaggcctcactgaggtgaatcggagctgagtcctaatgaagtggggactatgccatgcagaaatctggaagaagggaatttcaaagcagaggacaaaactaagtaacagtaagtgcctgctgctttctggaaggcagttttttgtttttggttttttgttttttttttcctgccagctctttgccattttattcatgaatattctaagatcattttgtatatataaaaagttttagaaaaaaatattttttaaagtagagaagggcagagaagaagagagagatcatcttggaatagggattggaaatctagaaacacagggacactctgctcctaggggcaggaagtgccatgaggtaccatggccacttttgaaagcttgccttcagaatgcaccacgcaaatactaacttccaaacttttgattatgcacccaccagtgaaatgcgtttgagaatatatccatatacctttttatttacaagttggatgtaaggactactgtatcaatatactctatacattataaagcagatatcaaactagaattttttaaaaggatgagataaaatgaaatataaacagaagttccagtatgtcctttgcacaccaaaatcatcctttccattctctaagatatggacacctcatcttagagaacaatataatatcttatattttattaaaattttatttttattgtaactattaaatatttttgataacatctacctttaaaaattccactcttttctgaaatcttttttaatgtttaatttttaatttattttttaatttttttattttttatttttgtgggtacatagtaggtatatttatttatgggttacataaaatgttttgatacaggcatgcaatgtgaaataatcacataatggagaatgggaaagccatcccctcaagcatttatcctttgtgtcttttctgaaatcttaaattctgtattctgagtcttgcggcaccagtatgtgcatgggctgttggcctgtcatgaggatgttcttaggggctgattacctctgggagaacactcatcttcactctgaatgtccccatgctactctactacagtatccaggtcttttgtctcataggtctgcagtctcatagctccacctgacattcccccactgcattttagctgagttgtaagttaatatttacttctataatgttttgattcatgtctgtcttctcaatgtcacttgtctacagtctcactagactgtgggctccaggagggcagagactaggtctgtttagtggtcacattcattccatgattcctggcaaatggtgaattctctgtggatcttgataaatgaatggatgatgtaagcaggtatctatcattctctgcttgtcagtagctcctttttactgctactctgtcctgtcttaattgctggctattttgtaaccaagcatctacctcagatttctcctcagggtgaattatgtgtgctctgtgatggttgtttactactcagaggactgaactgctaaaaagtctgctctccaaataattgcgtagggatggaaggaggcagagagagattcaaggcagggagagagggagagaaaaggagcctgagcaaagaacagaaaacagagagagagtggaagggaaaaaagagatttcccattgtactttaagtctgagtaaataatatttacaatggatctttcaattcttttccccattgctttgttccttctaaaatattaaactgtggcaagagtgcacatttatcattgctggtctccagcgagtagttatttaaagttccacccagctgcatttccctgttctctcctgaggtcattaggaagctcctgtttagtaacagatacagcctgaggtaggctccacagacagctgggcacaggaggggaggggacctaacgaagctgcacattcagctggttgtctcttgttgccttttaagcttgcctggagttatggagtctcccagctgctcccttcacatccatttctgatcacaggactaagtgggctctgatttatcgagttctgccccaggttggggtgtgtggagcaagaatgtcctgcaaattcgagtggtcttcatctttctttctaactgtcatatgatgggttcccagaaaagtggtggaccctcaggtagtgtgtagtgagcaggaagttcatcaagtgcccttgagattgacacctttcagtagaagaggaaggaagcctgagtgggtagagagagaaatgaagctgagatgcaggcccaacaattgtggctgcctccttgggaagctgtggagctagaatgagccctcagagtcattctcagttggattcagaaggctaggcctctaaaacaccaaattgctctgttctttgatgtgggtcactctggaaagtgcatgacgttgggtgaggtgcttctctgcagtcttggcaatccctaaagggactgacagcgcttgctgcagcaaggacaacacagccttcattgaaggggagtcagagtggcacagcacagtgccgggcacactgacccccccataggctgggaagctttgtctagattttaaacctgagaacagtacctagatgatgagttaacacatagttggagtaaaatgactgcagtggagtgctggagcaggcttgtcccagcttttgagaactgattattaaatattcaacaacgttgtgagcctgttgaaaacttgaaatgggccataataggagtatttataccacagaaattggcaaaaggtacaaatcagggcttgtgaggttttgtttttgtttttctccagaaagatggtttacaagcccatcactaaatacaggcttacctaatttcatttttaggagaattggaaatatctaaacacttcatttttcacgtccccaaaaagtcctttcctacttgacaattgtcttgaaattttactgttagagcatcacattttcagctcaaactctgcctctaagatcacatggcgaagtgcataaagttctatggttagatctaattgaatctcatctctgagatgagatttacctttggtgggttaatttctctgagcatattttagagagttactttcagaactaaagagaaaagttatgtttaaagttaggcaagttataaatattagtctacttccttttctccttccataacatctgcccttaatgggcatggatttccccttggagtaagaagtctgaggagcgtgtgatggagaaagattggtgttgctttttattgtaccatttaaagtggtgcttaaatgcatttaaaaatatgcaccaatttaattttaaatcatgctttctgctgatttcagcacacacagcttcctgctcaccccagtcccctcaagggtgcctgctgtgactgtggtccttgctgactcagcccttcccagtccagcttccccaggccagttgctccctggtgaggtcatgtgatgggggaagctgcatacacacttcaaagctaaggtctgaaaaagataatgcaaactcaaaaaaaaaaaaaataagacaaagaaagactaggattgagatgctcctgtatattctgaagtgatagaaagcagtttcttttgcctgtaataaaaaaaatagccaatattaagatctattctagattggaaaaaagaaagaaatcattgttgatgtgcaaagttttaattgttttggatgcatggctcgtgactcctgaggaatgagtagctcttggtgagacgcaggaccaggctcttctcacttgcacctgttattttctcttctcctgctggtatcatgtcagtcttagactgaagtcacatgattatgtcaataccacagctagtgaggggtagtagggcaacccccacatgaatggcaggcccacaagggaccagcagcagccaatccaagtgtgcagaaaatgagaaggcctggagtttgggcatctaggtccaggggtaggaaacccaggatgtacgatattgaccttagcaaaaagtcacaaagatagcaaaggtgagtttgtgcatcaagaatcttacgcaaaacatagaagagtttctagccattggtggtttgttgccatggcaatgatctagaaaacttagttgtccttgatgtatttgcattcaatgagaacaaattcagcagctgagtgggtgacctgaacccacttatgagtaggagatgggatattgaagttaaaaggccaatctctagagccatataacttggatcaaatgccacttacaagctgtgtgatcttaggtaagataattaaccatcttatgcttcaaattcctaactactttgtaggactattgtgaattgcaaatgagaaaattcatgtgaagcacttagaatagtgtctggctcatagtaagtgctcaaagtatattaagtgttacttgctattgttgttatcaacaaagcaatggacttgcaattagaagctatgatttgagtcgaggccttggctatttacaaggtaggtgacttaaggcaagtaacatgccttgtaaatagctaaggccttaactctgagccttggttccacctctgtaaaaatgaggtgtgcacaaatacttaactcaaagggtgttgtaaagaaataaatgagacactgtgtatgaaggaaactttaaaactgtaacagccttatggaaagtttgtttttaattacttactattatgactaattggcaaatagtaaatgtaccaggttatatgtgaggaagtcaaatcctaaacttcagccccacccaaattataataatgacagtgtattttcttttccatggaaattttttttttatttacaaaggcttctcctgttgcattgtccattcaatctcaccattattccataagacaaacaaatatgacccacgctacagaggaggaaccaaagttctggaagcttaagtgacttggtcaagtttgatttacaacagaactacaattaggaccagggcttctgactccaagttcaatgtcctttctacaactccatgctgccaagttaaatgtttagaattatgtagatgttttggtcttaattcaccacttaattttgcctggagtcataggcactacctacctccagtgaaataacagtgtttatatctgtcaattttgtatgtataatgttcacaatgggacatttctaacttctagcattttaaagacttgaaaagtaattatagctttatggtattctagtctcacaaattctcaatgataacttgttatttttctctacattgttctcccttcactgtttctctgtaatttagttttgcttctctgaattttaatgaaaatgtatatatttcagtgatcctccttttttttgagacagagtttcactcttgttgcccaggctggagtgcaacggtgcgatcttggctcactgcaacctccacctcccgggttcaagcgattccctacctcagcctcctgagtagctgggattacaggcatgcacaaccatgcccagctaattttttgtatttttagtagagacagagtttctctatgttggtcaggctggtcttgaactcccaacctcaggtgatccacccacctcggcctcccaaaatgctgggattacaggcatgagccaccgcgcctggccgatcctccagtttttaaccgttaacattcataatactaagttttctagttggagggatttgctgccgacttccagtaatttttgaaaagtgaaaaaactcaataggtttggacattcaatgagggcttattgctcacctgcctgattctgtattagtccttttcagatattttaccacacttaaaaatcatggccaggcatgcagtggctcacacctgtaatcccagcacttgggaggctgaggccggtggatcacttgaggtcaggagttcatgacgagcctggccaacatggtgaaacccagtctcttactgaaaatacaaaaatcagctgggcgtggcggtgcatccctgtaattccagctactcaggaggctgaggtaagagaataatttgatgccgggaggtggaggctgcagtgagctgagattgagacattgaactccagcctgggcaacagagcaagactctgtttcaaaaaatatatatatataacaagtctgagtccccagttcttaactttttcttatcttccatttttcagcttttattatcccttgatctttaaaagataatttaaaaaatatatgtgattttcattactgattccattacacttgtagaataacttcataaatggtaactttacaagatattcatttagagtgacaagaaagtattttatctgaaataattaaaataatcccacaatattatgcaaccactataaattttggtaaatttccagtcatttacatatttttttttctgtgtagcttaaatcagatggtctctaaagctttgtaacttgctttacttacttattatcataacctaagccttctgtcagacttttaaaaattaactgtaatggatagaaatgtgcttgattttttagttgtttctaaattttcactaatataaataatgcttcagtgaatacctatctgtataaagcttttcctgtattttgaaacattaaataggctattaaacattaacagctatcagatacagatataaaatatttgttagagtaaatgtcttctgggtctttgaaaaagcactggaaaatggcagaagagccaactgaaataaatgggaaaaggattaattaccaaatacctatgaattttcctaggacaattggctatcaatatggaagaaaaagaattagatccctatctcacatcttatcacaaataaatccgagatggattagagacttaagtaagaatcaaactatataactttaggagaaaatatatttatgacatcaggataggaaaatattttttaaagatatcaccaaaagcacaaataataatataaaaatggaataaattttactacaataaaataaacttttggccgggcgcggtggctcacgcctgtaatcccagcactttgggaggccgaggcgggtggatcatgaggtcaggagatcgagaccatcctggctaacaaggtgaaaccccgtctctactaaaaatacaaaaaattagccgggcgcggtggcgggcgcctgtagtcccagctactcgggaggctgaggcaggagaatggcgtgaacccgggaagcggagcttgcagtgagccgagattgcaccactgcagtccgcagtccggcctgggcgacagagcgagactccgtctcaaaaaaaaaaaaaataaaaaaaaaaataaacttttgcatgaaaaagacaccatcaacaaagttaaaagtcaaagtctaaaagcttaaggagatcatgagaatagaagaaagtatttgaaatctaaataaccaaagcagaatagtaaccagattacattaagaactaatcaataagaaaaactaatactgagtaaaagagatcagaaaattcactaaagagataccacaaaggccaataaatgaggagtgtatgttcttttaattagtaatgaaaaactttaagataatgatcatgtgatatcatttcatgcttaccagattgccaaaaattagaaatttgtcaatactaagtattggctaaaatctggggaaatactcttacactttactatgggagtgtaaattgggtagcccctctaatttggtgatacctactaaagttgaaggtttatataccccataccccagcaggcccacttctaggtatttttcacttctggagaaactctcacatgtatacacagacttaagtacaagaatatacattgcagcatttttagtaatggtaacaagagaagggaaaaaaatcaaatcatgatatgttcatcccatagaacattacacagcagtttaagtgaatggatgagatcacttgtatattaatatacataaatctcaaaaactatgttgaatgtgaaaggcaagaggatgccttttatattcaataaacgtaaaagggtatttaggatacaattttaaaacacacaaatatacaaaagtattttaaaattaggtggttgtggtggtatgcacctggggtcctagctacttgggaggcttagatggaaagatcacttgagcccacgagttcaaggttacagtgagctatgatcacaccactgtactccagcctgggcaacaaagcaagaccctgtctcaaatataataaagtaaaaatatacaagcaatactaattatggtttatgactacacatatatgaaatacataaatacagtaatggaaggaaagggcactgacttcagggcattgattatttctggggctgggtgagaagaggagaaacttcaactctagcatatcatttaaaacttgtttgaggtgaagtcaagcacatacataaaataagagaaaaacatctctggtttagatttccaagcttggtgctgcctctgaacaaatttgaccttgcacatgtctctcgatctctctggaggattatattaggtcaggtttttgttttgttgtttttgtttgtttgtttgtttgtttttttgagatggaatcttgctctgtcgccaggctggagtgcagtggcgcaatcccggctcactgtaacctccacctcccaggttcaagtgattctcctgtctcagcctcctgaatagctgggactacagatgcacaccaccatgcccagctaatttttttgtatttttagtagagacaggatttcaccatgttggccaggatggtctccatctcttgacgtcgtgatccgtccacctcagcctcccaaagagctgggattacaggtgtgagccactgcgcccggcagatattaggtcagggttttaaaccttttttttaaaaaaaaatagcaaaaagcccttcattcaaagaaaatctaacaaaaaaggggcttcacagtgtgtcaaacaggtgaagtcaaaactgctaagacaggaaggagggggcaatagtccccactttccattactgccacgcttctccccaactagtggcctctaaggcagcttctccctttgatggcctaactgtcaatggcactaagctgttagtctgacccatttctttgacaagtgcctgccatgtacaagggctctttggtaaacacctggagaaatggaagagtgcttttttaatttttttactatgaaaaccatcccctaatttggccagtccacagatttgaatgtctttgagtaaaatttctccccattttaaaagcattaatttattaattttgctgctcttatcacttctttaatttttttaacttagcacatcttcattattttggcccttaccactctgtttcctgatgtcctctcctgcctccttccttcccttttgtggcctttgtccttttattctccctctcctttgttcctcctgttcatccaagagccatttatcagattcctgaaaaagccactgctcagcctgccctgtgaaaggcccagagcccactgttcctaccttgccatcactcattttttccttaacctcctgtacccacttcttggtgtaaggcagtcagaaatgatcaaaaaccacttcctaattatgaaacccaaaggatttccccttggtccttaaactccttttttcagcagctgacatcagagtagggaaggtagagtcggctcctccccagccattctctcagccaggtccacttttggggtttgccttcttacatctctttctgtttattgaatttcagatacatagtcaatgactggggaaaattatgtctcaaatgcaatattacgaaattattctgaaaaagtgatgtttatccgaagtttcaatttcactcagcatcctgtgtttggattgctaaacctggcagccctgcatgaaggagtggcagctccttctcatcctccacctctctctggctttctgcagccctgggtttcattctcctcctctctctgattgttgtctctctccctggtagggccactgcatccccttccagcattctgtccttgatccttggctcttttttgtggcactcatttcccagataccccatctatgctcatcaactcattttttccatactgatgattctggatcatttctccttggccctgactttgccaccaggcacatatttctgagtgacgtacaggcacctccaacttagtgagcagaagcctccatgagccctcagcctttctgacccctcttactcctgctgagtcagctcctcctcagccatattctctcagtcactcacccaggtgcagaaacataggttccttatggagttttctatttttacctctattttacccacaaaccctgctagtcctccctgccatatgcctggcttattttaaggaaacacatgttgagtgaatggatgtctcctggtcttgtttctttctttccattctatcgcaaccaccttcattcccactatcattaccttgagctcattctggtaactgcagcctggcaatggtttcccttcatccaggacaatcttgaggtctctgcaaactaatctgcacagacatcttctttaaaaatgtatatatttttgactaggtaatacattcacatggcctgatgttcaaaaggtacaaaagagtatatgagaatcttgaagggttaattcattgtctcttttgcctacctcatgttgtagccagcggataaatagatacaggaatcagaaagatggagagcaaaaactatgcaaaataatggggcttggtctgcgggctgccttgctcacctttacaccagaattagaaagacttacacacccagagagacccaactggacagaattggcctccatgctgggctctgctcttacaaagtttgggagcgggaggaagagagaggggattcactcatcaagcaggctaattccaatgtgaacagaggaggaggctgagaggtacacacttaattcctcttctccaattcaccaatcagactagtcactctctattccctaaaagggggtgaattaaagttgggatcaggatcagggggttaaagcctttccagtactccccggctggtgtgttaatggatcacaggtgtgtcacgagatatggatcttttcatccttggaccgaggataagcagagccccagacttgtcttcagccatgagcaccttcatcagaaccctaatttccttccaatttagcctcattgacccaatattatcattttctgtttgtatcatattggggaaaattctggcatgtactgctctaagcagtggtcacctctgtatttacagatatgaaaccagcaccgagaaggtcacccctagtcccttactcggtacacagaaaattcttatgccaaatgcccttcttcctgccaccaagttctcccctgtcttccccaaagcaaccaatagttactctttctatacacaggtaaatatttcatgtccttctttaaaaaaatacaacacaaatcacaacatatgccaaatgctttaataaaataccatcacatctcagcggcttaatgtagtaaatgtttatttcttgtgcatgtctcaatccagtgtggctttttaggtcaatgatggggcactgggttcctctcctggagccattaatggctctgacttcctttaatctagtctctctgttagtctctagggattcataaccgctgccgaatgctctacataagctgaaaaaggaaggaaggagagaaagcatggaaaatctgggggatttttagggactaggaagtgataaatattatttccgtccatattcagttggcctgaactcagtcatatggtcccacctgactacaaggaaatgtagtctacatgtctgaccaggacaaaaaggaaatgggtgttgtgaggccatagagatttctgttacacatgccagacatgccattctgcaccttgctcttttgacttgacaatacatttttgagcacagccacattatttcataggcgagcagtttcctcagcttttttaacaggcgcgttttatgaattatatcataatttatttaactagtccatggtccaatcatcctcaatgatttgttttttccattatttcatctgcaataaatactcttgtaattatattattccacacatgtgcaagcatatctgcaggataaattctccggtgaggtgttgctgaatcaaatggtatcaacagttaacattttgatagctattaccaaattacccttcttaggagtaatacaaagtatattcccagtagccattttattatttaattctgcttgtgtaaaatagctcaacaggtttgagtaaacatagtttaaatccagtggatctgagagaggcccacaatcttggttgtatcctcctgttggactttaccttcccctctattccttaggaacccaacgttgtctatttctgttccccaggtgttccttgtgcctcatattctcaaaccattgcttcaatattttatttcatttagattcagatctagtgaacacttcttgtttttcttttctttttcttttttttttttctttttagacaagatctctctctgtcacccagcctggagtgtggtgatgcaatcctggctcactgcaacctctgcctcccgggttcatgcgattctcgtgccttagactccagagtagctgggattacaggcgtgtgccactgtgcgtggctaatttttttgtttttttgtttttgttttttaactggagaccattttttgccatgttggctgggctggtctcaaactcctggcctcaaatgatccacccacgtcggcctcccaaagtactgggattataggtgtgagccactgtgccgggccagtgaacacttcttgaaaaatagggctgggtaccaagcagaaccctttaaattcattattacatataatcctcagaagcaactctaggaagcaggcattttcatgcccatagtacgaataaggaaactgaggctcagagaggttaagtaaatagaccaaggtcatctaactactaggtggtatattttcattaggtattctgagagtattcttttttctctcactctggtgcttctcaaaccaaagcataacttaaggcagaggaaaagaaatgcacacacttgagctgtccctaggtgtgacccaaagctgcctgagccatgatgtttcctttgaagtctcctatttgtattaaaaacagatacagatttttagtttcactttttcatatatctgcatttattttaatattttaaattccttgctaccaactgtaactgaaaccccaggaagctaccggtgttctctgtggtttggggaactctggtccactgcccccgggggaggcaggagagcatggttctgcatgtcaatgccccacaaatagactcttacccattcttcaaaatccaactcatatgctgcttcaacatcaaaatttcctgggggatcagcaagcccagaatggtgtccctgtcatagaaaactctgaattacagcttatcccagcaccttagatgcaattatacagcgtcttccctttcttggactataaccttcatggagtcagtctctctataatatatcttcaagtgcttcgcagcaaaaagagggttgttaaatttctaatgaataaagcattgaagatgattaacacattattgttaaccacttaaaaaaaaatcagcaattgcaaaacagcaagagcctacttcttagttccaacttctcttaaacactcctaaatcttgcttaaaatggttatgttagcctcatgtttccttggaaagcacacatttcatttgcccatgcatatatatccaattcccagtgatagtcctgtcttattgattgaccctgggtaagccattaatttattctcctgtctctggaaaatggggataattgcatttgccagctaccacttgagaatgttgtcagaattgatgaaacaatgtttttaaaagacctctttggaaggaatgtactacataaatcacaatccctcactaggatggttgttttagtgattatttatttagtagttcagtggaacactgatatttcttcccagataagtcatattgagtcaatggattccttaatactcagacccaaacagaattttatatctgtaaccttctgatgaacttggaaattaacttggtacatatcctttccactctgggaagtgttcaagttgattatctctgtaaatatatgtctgggccattgctagccaaatactggtgcacatatgagataatatttaaaatttgctgcatcctcgtgaacatattgatatttttctctctcccattttatctttaagaattgaattttaatatttaaaaatctcactgttttcataagacatacgtaatgtttccatctcagagttggaggtctgttgctccaaattagtcacaccttttgtagtatgacagaacatctaaaaaggaaatagtataaattttaaattctagtaaccatctataaatgtactctccaattgccactagctaccagtgttaaaattaaaaattcagtccctcagttgcactagctactgttcaagtgttcaatggctcatgtggctagtggccaccatattgtatagtacaaggaaagaacatttccaccatcacaaaaagttctattaggcagtgcttgtccataagatttgtatcttaaaagactaatgaaaggcttaagcgggaacatttttagctttctgctcttctcacccatccctcgcttggattttttctcctcatgttacaataatttctttttaactgtttgggccttaaaaacagccccacctccaaggccacgatttgaacacaaagtctggggagaatgacatgtggaattcccatctggaggttagtacagcagcagatccagccatttctgagaaattgtctgggtttggagttactcccagaactctgatttagcagttcgtaagcttacagcaagtctgaaaagaacacaaatctgttttgtatacacaaataaatccttgcatgctgcatgccattctcagcctgccagtttcatctggctgctccagaaaatataattcaataggatattagttaacctgcatgcagggaatggggcattttcattattgaaatgttctggttgagtgattaacccgatttttgcagaaaaactgctgaggcaagggattttctgtccaggaggttgtaccactgtgtttctctcttccagatgatcacagctgcactgcttcatccctcaagcattcagaaatacatctctatgctaaaaactttcaaatatgcattgatatattctcaaagaagcctcataaaaatagatcaataatggtgttcctgatactcttagaaagggaacaaacttaaatgaaaaattaagatctttcctcaaattttgcacagttgtgtaacctttaggagtttctgacaataggcagtttcttcaaatgctatgatttgaaaatattcgttcaaatattttattttcttttgtaataaataaaatgtgcttactagatgtcaggcaatgctttgagggctttacaaatattaattcatttaattcttataaccatcttagaattaggtaccacactattatgtccattgtaaagatgagaaaactgaaggacagagaggttaaatagctgtccaagtcaaggagcttaggatgtgaacccaggaaatttggctctgagtgtccatgcccttaaacactactccaaatagtttatataacagaaggaacctagatcatgaaataaaatgatttgtttttctcctcagtgcctcagttttcatatattaaaagccagaggtcagtgaggtaaaaacagaatcaaaacattggtgcttctcttcaaaagataattacaagccaagctttgtacaccaaaagtcaaatgtactaagagcccagaatcaattataaaatacaaaacctagtagaattagattgattttctgaaaataaattaatgtaatacattggttttaaatataggatgagcagatcatcgttttcagcttctgagttgattgtggcagtccaaaaagcttttttactcaggtttctgaatgagcaagtataacaaaagaaatggctggagtttaatcatgtctgattcataaatgtaagtaaaacaattttttctagacatgtggaatatgtgctagtgagaggaaaccaacgtttgatgagcagctatgatttagcaggccatttgaccttaggctttcttactacctaagcaaaaaacctagaagtgatttctccctttcctgttaccctcaacacctaacttgttgactgctcattctgcctccccagtatacttgggtactgccttctctccccaactcccggccaccatcctctctcaccgggattctgcagaagccacccaagtgactttcttaaagcatcgagatggtctctcatccccgcccagccctctaccggcaccttctccatttgggatcacctcccagcactgcccaattccacctgggtcttcttcaaccccatctgcccatgctatggcctttgcccactccacccagcccctctggcctttgggtttctgaacacacacagctgttgccttttcttttcttttttcttttttaaagacagagtctcattctattgcccaggctgcagtgcaatggcgccatctcggcttactgcaacctccgcctcccaggatcaagcgattctcctgcctcagcctcccaagtagctgggattacaggcatgagccaccatgcccagctaatttttgtatttttagtagaaacggatttgaacccaggaagcttggctctgagtgtccatgcccttaaacactactccaagtaatttatataatagaaggaacatagatcatgaaataaaatggtttgtttttctccttagtgcctcagttttcatatattaaaagccagaggtcagtgaggccccacactatggcctttgcccactccaccatttcttttgttatactggctcattcagaaatctgagtaaaaaaactttttggactgcaacaatcaactcagaagctgaaaatgatgatctgctcatcctatatttaaaaccaatgtttcaccaatttggccaggctggtcttgaacttctgacctcaagtgatccacactccttagcctcccaaagtgctgggattacaggcatgagccactgtgcccagcctacacacaactgttttctacctcagatctctgtgcgtgttatgctctggctgggatcctgtttcctccactcatctcctgtttcggtcacatttctgcctttggatctcagctctaatttcacttcctcggagagccagtatgaggaagggtgaagggaggttctgacaatgcccaaacaggcccagagtaaaacatgaagccaagagaggcttttaaaaattttagtggtgaaggtatccatctcctcaagcatttattatttctttgtgctatacacattccaatcatacttttagttaattttaaatgtacagtaagttattgttgactatacataccttgttgtgctctcaaatactagatcttattcattctatgtaactatgttttgtgcccattcacaatccccacttgccccccccaccaccacataatacccttcccagcctctggtaaccatcattctacttactctttctctccatgagttcaattgtttcaatttttagctatagaatgagtaaaaatatgcaaaatttgtcttttggctttttaaaatttttaattaaaaaatccttacctgtgatgtgggtataattcattccattttaatacatttgactctcaaaagtaagtttttttttccagttgagcaaatatatattgagcaatttgctaggcactggcagaggagaaggcaatgcagactaaggcatcactgtgatccttgatacgatcccaatttaataggagaaacagtcaaatataaaccaataatcatcaaagtatgcaatgaaacacagatgccacaaaagaggggccaaaatgctaaaaatcacagaacagagagtggccggtttggaatggcaaatcgggcagatatcacagggaagtaacttttgagaggcagcttgaaagatgagtaagaattcaggcataaaaggggaagaaaattgtaaattagagttgtgaaacccatacatttgattttgatgaggagtctaatggtgagaagctcttagtggtaaaataatgaatgcctgtgtgtgtgggtgggggacggggggtaggggatgtgggaagaggtgggggggaaaagaataaaggataaagagaagtagagaaataagataataagtccaggaaagttttagagatcagtgagtttttattttcagattacccagcaaagagcagatagatattggattcaagaatttctacatcatttctttcactcgagtctctgtgaagagaccaccaaacaggctttgtgtgagcaataaagctttttaatcacctgagtgcaggcgggctgagtccgaaaagagagttagcgaagggagataggggtggggccgttttataggatttgggtaggtaatggaaaattacagtcaaagggggttgttctctggcaggcaggagcggggtacacaaggtgctcagtgggggagcttttgagccaggatgagccaggagaaggaatttcacaaggtaatgtcatcagttaaggcaggaatgggccattttcacctcttttgtggtggtatgtcatcagttaaggcaggaaccagccattttcacttcttttgtgattcttcacttgcttcgggccatctggacgtataagtgaaggtcacaggggataagatggcttagcttgggctcagaggcctgacattcctgccttcttatattaataagaaaaataacataaaatagtattgaagtgttggggcagcaaaaatttttttggggggtggcatggagagataatgggcgatgtttctcagggctgcttccagcaggattaggggcagtgtgggaacctagagtgaaagaggtcaagttgaaggaggattttgtggtaaggggtgatattgtggggttgttagaaggaggatttgtcacatagaatgattggtgatggcctggatacggttttggatgaattgagaaactaaatggaagatacaaggtccaaataaaggagaaaaataggtattaaaggactaagaattgggaggacccaggacatccaattagagagtgcccaaaggggttcagcgtaattacttgcttggttggcaagtttttgggctctgtccttgagtttttttatgttgtcatacaccaggccagattgatttaggtaaaaacaatactcttcatttaaaaatatacagagtcctcctttttcagcagtaagtcaaggcctcagcggttctgggggacaactgcagctaaacagtcaacttgggcctggaggactgataaagtttgtgatatgtctgtgatgctagcagagaagtcattagacaggctacggaaggtcgtgacagaggttgaaatgcctgctattccagtacctagagcaatagtggaggtggaaagtcctaaaccgaccagcaagggaattagtggaataactcttttttgtcgtgttggtgtcatgaggggaacagggagctctttggtcccatttgcaaattgaattttgggagtaaggaaaactagtgagcatgtgcctgtccagttagcaggtagacacacgtaggtagaggatccacagagcaagaagagaccttgtgcaaggcaaaactggagatgcaaagtaaaaagatgagaaggagtgctgaaaggggtgtcttgtacccagaatcctagggatccagctagggcggcagccatcagaggttgtaatggggactgatggggtaactgcttagagggggaggtttgattttcatggtgtaggagaaaacgttgagtgtctacgagtaacctttcactgttatttacggggctaggggtaagtaaacaagaagagggcctgggaggagagtctgatgagcaaggggaaggtagccaaggatggagtgaaatacagggtaagtgtcttcctaagcaataattactgctaatgtttttaagtttgtcagtattgatagagggcttatctgtaatatggagctggaaggctccaattgtttcagtgatgtgtgtagttgggctttggagatgaagagtgaaggaacatcgagaaggtgaaaggttacccaggggaattccagtgggtctttgctgagagatacgtaaaggagcggccacaggaatagtagtttgtgttgtgaggggtccacataaggggggagtagagttaatataaggagaaaggttttttaagtaagtgtggaggaggacggcagcttgctgatgtgaaatgtctggggaggtcttgctggacctgtctagaaagtaaagaagttcttcaggagggtaaaggtgagggctgttaaaggaagttcaggtttagggagacaggagatgtcgcccagtctgtatgtaaggcggggacagctgtgtaggcgctggaagaaagggaaatgcaaagccagcaattgtttgctaaggagggattagaaatggctaggagagagtgagtaaggttgatagcgtggtggagatagctggggagagatagagggtggcataaggatgggaatgagaataacagtgagtataaaagtaaagaatagaacttcatcagggtgaaagtattgaagggtgccctgccagcaaagatcctctatccactctaagagggagttaagagtggcagtttggggatagcaccaggagacaacagctgtgatggcttggagaaacagtgtaaaccggcagtgtaaacaagagtagggcatttataagtagtagagaatgatgaataaaactagacagaagatagtagggatgactagttttgggggctctgcccaagtagtgggggtgactgcataaagccctgttgcaaaaagtaggataaggatgaacaggcctaatagaatgaagggatgtattaggctcataagggttgttactgttcttcagaaatgcaagtgagtttaagggaagtaggggagagtacttgtgacttccaggaggaagaggggggattaggctggctgactgatggacacagctttactctggaacggtgaacccagtggggaggatcctgcaggtggacggcagttggggtactatagatgactaagtagggtccagtccatcgaggttgtagagtttgaggggtcagattcttaacaagaactgattgtccagctagggtgtgttcatatggttgagaatctggagtaggcaagagaagattagcagcctggcgaatttcctgtctagcctgctggaggactggaggatagtcacctagagggctggtgtctgggacaaggttggggctgagtaagaaagtgcgtccgtataaaagttcaaatggactgtaccctgtagcatctcgaggacaggctctaattctgagaagggcaagaggtaaaagtactgtccagtcctttttaaattggaggctgagcttggtgaggtgtgtctttaaaagaccattagtctattctacctttcttgaagattgaggatggtaagggatttgaaggttccactgaataccaagagcctgagaaactgcttgggtaatttaactagtaaaggctcatccgttatcggactgtatagaggtgggaaggccaaactgaggagttatgtctgacagaagggaagaaatgaccacggtggccttctcagaccctgtgggaaaggcctctacccatccagtgaaagtgtctacccagaccaagaggtattttagtttcctgactcggggcatgtgagtaaagtcaatttgccaatcctgggcaggggcaagtccctgagcttgatgtgtagggaagggagggggcctgaacaatccctgaggggtagtagaatagcagatgaaacactgagaagtgattcccttgaggacagatttccatgatggaaaggaaattagagattctaagaggcgggctagcggcttgtaacttacatggaagaggttatgaaatgatgacacaatagaatgggcctgtgaggctggaaggagatactttccttggtctaagaaccatttgccttatgtggaaagagattgacaggtgggagtttcagtgggggagtaggtggaagtgaccgatgagaaggagaaaaactggccgtgagggacagaagttggaacactagctgcttctttagctaccttatcagcataagcgttgccgagggcaatgggatctgatgccttttgatggcctttgcagtgaatgactccagcttcttttggaagtaaagcggccttgagaagagtttttattaaaaagacattaatgatggaggactcttgtgtagtgaggaaacctctttcagcctatataacagcatggtggtgcaggatgtggaaggcatatttagagtcagcataaatattgacatgtaatccctttgcaagagtgagggcccgagttaaggcaatgagttcggcttgttgagaggtagtggagtagggcagagcggtagcctcaatgatagatgtggaagatatatagcatagcctgcctttgctggtgagtggcgattaggcctgatggagctgccatcagtaaaccaaatgtgatcagggtgaggaacaggaaagaaggaaacatggggaaatggggtgtatgtcaggtggatcagagagatacagtcatgggggtcaggtgtggtatccggaataatgtgggaggctggattgaagtctgggccaggaacaatggtaatggtgggagtctcaacaaagagtgagtataactgaaggagctggggagcagaaagtatatgcatcaagtgtgaggaagaaaatagattttggaagttacgagagctgtagacagtgagttgagcatagtgtgtgattttaagggcctctaaaagtattagggcagtggcagccgctgcatggagacatcatggccagtctaaaacagtaaggtcaagttgtttggacaaaaggtctacagggcgcggtcccggtacttgtgtaagaattccaactgcacagccctgcacttcagctgtgtgtaaccaaaagggttgggatgagtcagggagagctagtgtgggagcagtctctaaatctgtcttcaaggaatggaaagaggagtggggaaaggatttaggatctatggggtcagctaggtttccttttgtgaatttacataatgggtttgttaggatggcaaaaccaggtatccaaaggtgaaagtatccaaccatgcctaggaaggaaaggagttgttgttttgtagaaggtgttggggtttgagagatcagtttggacacaatcggcagggagagcatgtgtgtttttatgaagaattatgccaagacaggtaacggatggagaagaaatttgagctttggaggggaatacccgatatcctttggagaataaatgttgaaggagcaggagggtgtcttgttaggaagactcaaaggagggactacaaagtagaaggtcatcaatatattgaataaggtgagaagtggaggggtggaaagaaagtaaatcatgagaaagagcttggctgaagtaatgagggctgtccctgaagccttgcggcagcacagcccaggtaaactgctgggactgatgggtgtcagggtcagtccaggtaaaagcaaagagagactgggataagtggtgcaggggaatagtgaaaaaagcatctttaagatcaaaaacggaacagtgagttgtggaggaaggtattgaggacaaaagagtatatgggtttggcaccacggggtggataagtaaaataatttggttcataaggcgcagatcctgaactaacttgtaagacttgtctggtttttggacaggtaaaatgggggaattggtaaggaggaatttgtaggctttaaaaggccatgctgtaacaggcaagtgataacaggctttactccttttaaagcgtgctgtaggatggggatattggcattgagcagggtaagggtgattaggttttaatgggatgataaggggtgcatgattggtcaccaaggagggagcagaggtgtcccatacctgtggattaaggtaggaagatacaaggggaagatgcgaaggagactttgaactggggaaaaggcagcaatgaggtatggctgtagcccaggaatagtcagggaagcagataatttagttaaaatgtctcgacttaataagggagctgggcaggtggggataactaaaaaggagtgcttaaaagagtattgtctaagttggcaccagagttgggagttttaagaggtttagaagcctggccatcaatacccacaacagttatggaggcaaaggaaacaggcccttgaaaagaagataatgtggagtgggtagcctctgtattgattaaaaatggtacagacttaccctccactgtgagagttacctgaagctcggtgttcgtgatggtctagggggcttccgaggtgatcaggcagcatcggtcttcagccgctaagctgagaagatctgggaaggagtcagtcagagagccttgggccagagttccagcggctctgggagtggctgccaggtgagttgaacagtccgattttcagtggggtcccacacagatgggacatggcttaggaggaatcctggtctgcgggcattccttggcccagtggccagatttccggcacttgtagcaagctcctggatgaggaggttctggaagaacccctggcagctggggttcaggaatttggagttcttgtgtgctggaaatgtggctggggtttgtctcacagtgggggcaaggaattgcaactcagaaatacattgctacttggctgcctctactctattattgtacaccttgaaggcgtggttaattaagtcctgttgtggggtgtgagagctggaatttaattttcgaagctttacttaatgttgggagaggattgggtaataaaatgcatattgagaataagatggccttctggcccctatgggtctagggcagtaaagcatctaagggttgttgccaaatgggccatggactgggctgggtttttatacttgatgaaaaagagcccaaatgctaactgatttgggagaggtcggataaagaaaaaggagcattaaccttgactatgcctttagctccagccacctttttaagaggaaattgctgggcaggtgggggaggactagtcgtggaacagaaccgtaagccagaccaggtgtgaggaggggaggtgataaaaggattatagggtggaggagcagaggctgaggaagaattgagacctggctcagcctggcaaggagcagcctggggaggaggggagaggtcagttgggtctgtagaaaaggaaaattggaaagactgagcaacacttggggttggaactgaggggacaggcgggagggaaagaagcaagatttgggacaagttgcatgggaacagagactagggagggaccgatgtgtaaaagagtgcctggatgtcatgcacctcagaccatttgcccattttacgacaagaattatctagatcttgtaggatggaaaaattgaaagtgccgttttctggctgtttggaaccactgtcgagtttctactggggtcaagtggtgttgcagaagaaaataaaatgcttagattttaggtcaggtgagagttgaagaggttttaagttcttgagaacacaggctaagggagaagaaggaggaatggagggtggaagcttgcctatagtgaaggaggcaaatttaaagagaagggtagagacatggagaagggtgtggggagcagctctgggcagccaaagcaggcgtccccgcaattgacttgccaccaagggaatgtgggtgaatgaccaaggcaggtgtccctgtggtgatcacacaccaatggaatgtgggtgaataatcaggcaggcatccccacagtgattaaacaccaagggaagactgtcttcccgagtctgtgactggcgccggagttttggggtccacggataaaatgtgtctcctttgtctctaccagaaaaggaaaggaactgaaattaagagaagggagagattgaagtgtggcgccaagattgaaaggagaaagaggttgagggatagggagagaggctggagaagagagtaaagagagtccgcttaccggatttaaaattggtgagatgttccttgggctggttagtctgaggaccagaggtcgtaggtggatctttctcacggagcaaagagcaggaggacaggggttgatctcccaagggtggtcccctgatccgagtcatggcaccaaatttcacatgcatctgtgtgaagagaccaccaaacaggctttgtgtgagcaataaagctttttaatcacctgggtgcaggtgggctgagtcccaaaagagagtcagtgaagggagatatgggtggggacattttataggatttgggtaggtagtggaaaattacagtcaaagggggttgttctctggtgggcaggggcgggggacacaaggtgctcagtgggggagcttttgagccaggatgagccaggagaaggaatttcacaaggtaatgtcatcagttaaggcaggaacaggccattttcacttcttttgtggtggaatgtcatcagttaaggcaggaacaggccattttcacttcttttgtggtggaatgtcatcagttaaggcaggaaccggccattttcacttctttcgtgattcttcacttgctttgggccatctggtccatgcaggtcacaggggatatgatggcttagcttgggctcagaggcctgacaatttcactgcacttcataccaagtcatacttgctttatggccaagtttattttgacatttaagtaaaacccaataaacaaatactagaaaaatcaattttcaagttcaagtgtgttcttccatggagtctggaaaatgttttaaattttggaatgggacaaaatagggaaagcgaagaaccaatttccaaaaatattttatttggggaaaactttaaataaatccttgtaagaagcctatatacatatatatttttatatatattttatatacatatatattttatatatatataaaaagacatttttctcagagagatttcactgagtttttgttgttgttgttagctatagtgtggaagtatgtagattttacctttagaagctacagttatactgtatttatgaatttccaaattttcattttttcctaccttcatctctgccaagttaatagttaatatgcctcacaaaggcttagcaaaagcaattacaactgttttttgaaacatgtttttttaatgacccaaaggagcatcattctaactatcctttttttcctttctggcagatgacatttgatccagaaatcttcttcaatgttttactgccaccaattatatttcatgcaggatatagtctaaagaaggtaaatatatagtgatcattttcttcttttatcattaagtagagaattttaccagcactaatgagaaactgttatttttatgggcttctctatttggtaagagtatcattatcttaaatttgtgatgcagattcaaacctgacatgcttagaattctagacttcttctaaacctgttctgttgaatacaggccattaaccacatgtaactattgagctcttgaaatgcgtcttgtctgaatcgagatgttctttaagtgtaaaatacacactggattttaaagattttgtatttattcaaataatgtaaatatttccataatgttttatattgatttcgtgtagaaatgttagtattttggatagattggattaaacaaaacattatcaaaacctatttcatcttttaaaaacattttaatgtagctgctagaaaatttaaaattttttaaatatgtggcttgcattatatttctattggacagcattattctggatgattgtaaccaaagactttggttattaattaacattgagtttatcctttaaagtgaaaactcaagactactgttgatgctcatagacaggaaagtccagttttacagtttctatgcacttgtctaacagtacttgagcacggcctgactatgcacattttgtacattagtaattcacataatggtttaagtactggcatcccctgagccacagagtgaggctccagcccacgtggtttttgagatgcagaggtgatgtggctgctcttctgctgctcagctcccactctaggagattcctggggctttcttcctcttgagcagtcatcttcagcagccaggcagcttgttcatcacagacctgattttcttgtgtgtactccaggctccctcttgctgtcaggtctggctcctcagatcccactcaaaaaactggaatggggttttccctaagcaagcagttgaaaaaatttagaaggctggatttgttcaggtaacccttcctcattgccagtcccaatactaagcatcattttgtggctgactcattaaaataaagtgaattgctgtaggtttgggggatttgttttgttttgttttggagacacagtctccctcttttgcccaggctgcagtacaatggtacgattatggctcacagcagcttcgacctcctgtactcaaacaatcttccttcagcctcccaaattgctggaattacaggcgtgagccacccaccaggctgttgtagatttttaaagtttattttcatcacattcagaagatataaaagagaagtcagacatccagtaaaatcaacaggcaacgtaaatctcttagaatagttttgttgttgttgttgttttaatgctaaaggaattgcatttacaacaaaacttcatgaaaactgtgtcttccattattgccccgattctggcatagacattgcccagttccttgcttccctctcaggtccagccagttcttggagttgtctctctcatccctacctactcatcttccagtgggtttttttttttttttttttctgcttcttgacttttccctccagtcctttgcaatgataatcagttaagtccctattagcacaataaggccaggaacgaggctccaaaaccaaaatttgcctaaacagtgaggggtctgtgaactgcatacatttatttttattttcttttgcactaagaaaaaattctgatgtactctattaaatatctttttttctccccagagacacttttttcaaaacttaggatctattttaacgtatgccttcttgggaactgccatctcctgcatcgtcatagggtaagtgacattcggagctcaagttgcaggtggctgtggggtctgtgatctgtgtgagggatctaacacttccaggattcttgctggctgggaaaattgtcttttttttagtatatcacatatttgtatgttttttctgacttaattccacggcttctgacaaatacaaggcttcaaatcaaagcaaactagaggattgctggactttctctgtgagttctggacttctgacttagggaatgtggatcacttgccttgagttatgtgaagcgcattgcattcttcttttagtttgagtaatgccgatatgctcactgcattcttttttgtcttgtattgagagaccttacctgtatttggcaggagtgcaaaagtaactatatgccaagagttttctttctaaaggaaagtttacaagacagcagtctgaaacagatatgtccaaatatcaacagagttgcttaatacagggatagcttttcagttaataccctgtagaatgcagactctttttttcattgtattttcttgattatgctactgagccctaagtcacacgttatatactctggcttgcagctcatcataaagtaaaatgtggtaccaaatggtgaaggcaatccagcctctgataatcccgtccaatacattaaagctccactgcaggaaaaaaaaaaaatgtccaggtactatgactgtgatgatgcagatgtcttcaattatctgatacagtcaactctatccttgatttttactgtctacagctgttataacccagcacaagaaactgatgctaaaaatacacacggttcatgcctccacccattctcttacagagtttctagtgtgtgtcaattgaggccaaggaagtgtcaggcggtgtctttacttgtgcctgtaagcagagggattttgtgttgaatgcactgctaaatttcttttgagttgagcctagaacaagtcaggccatgttatataaaaatattcagaatggtttaaggcagtgagaaaattaaagattttagcacctgaaaagggaggtttgcaagcctatagattagggagccccattaagtttggacacttaaatggtctttaaactgtgggtgacctgagagacacagggtacttgatccttcttaaagcatgttctaggagggcttttctgttctgtgagtatgcaatagctaaatattcacatttctaaactttgcaggggcctgagagatctgtgtaactacagcctctcattcgaagatgagacatcttgaataaatagttggctcaatcttaccatctctgagaatcagggccgttgtcaaaacagaactcagaacttctgcttctgatccagcaggccttcaccctctcttcctttagcaatttctcttgaattcataaacatccctatacattgtttctacacattgagagagggttctgagacatgtggactcacaacaaatgttccttggttagtagtaaagatttattttagtggttctataatatggggtcttgaaatttataatggatccaaattctaaactcttggacaatgctgccaaattatagaatagtaaatttttattgttacctcatttctttggtacaactggttttaagtatatttaagtgcatttatttatattatatgctttcactatcatgaaaaatctaaattctttcttagatctttcaatatcatttttttagaaagcaccaatatatactgtgtgtgtgtgtgtgttgtatataattgcctttatctaaaacatttcaatttaagagatccagtggttttcatttactggggttgagaacctattttgatttattttaaaacagattttaaattgttggttgtccaacaacttataatggaaagtcatttgactaaaagagtagtcctaagaaaaattttagaacggtgttcttagtttgaactgggtatctgagcaacaaaaatttgtagttactttcttaatttgggtcattaaaatacagaagggaaagatagcctaaacattttagaatcgtatctagtgaggtaagggaaatcattgaaatgttttagcttgaagatgaaaagtcagattcatactttagggaggtcattttggtagctgcgtgaaggagaaattttaaaatgggtaccatttaagaggtaatttacgtaggccagattggaaatgataaaggcctggactcaggcagtggcagaaaaggtaaatgtagagtcattagcttggtgaaatcttgggagaatatggcatcacccagggcaagtaagtgaagtgagaaggaaagagatctagggaacatcactattttgaagaaagagaagagacactcacaaggcaccaaggagtattggacccccaaaacaggaagaaaaccaacagggcatgtgttctggaagtcaaaggaagaggaaaagggagggtccacagaacctaacacaggagaggtcaaatgggataggaattgtggtaccactggatttgacccctaggaggtaatgggtgactttacacttgtcttatgggcaaaaatgagggaagagtattggcaagtccaattgttttgggagccatataataagaaacaagaatttacttttatgctgccagtcttgatatataatttcagaacttctgaagaagagggcacatacttaaattcagatcaaactgacactttcataacttggtaacttccattatatgagatacaatcaaactatagaaagtgactggctgtatttttcttataaataaatggtgacaaggacaacaatttatggagtgcttgatacgtatcatgccctttttaaaagcactttgcatggattatccatctaatcttcaaaataatcctattaagtagatactatttattaccctcatttaacagatgaaacaactgaggtttaaaaagagtaacacagtggtaagtaatagagctggggattagtaactaaattgtttggctccggagtcaaataattaatgccaaaaacgtgctttacttctgtttgttgaatattagcaccaaaaaaatgaaattgtataaatcaatcaatattcatcaacataaccacgtttcttcattatcccagtaggagttctcatagacatgggagatttttatttgggaagtccatccaaaaggaattcacatttttaagggatggcctgagtttatgcagatatacgcagatttgcatgaaatgggcagggggagagattcagaatagaagttagatcaaactctttgagaataatttcatagaggaagtggatcctgggcagacatttagtggagaaggataaagaagtcagattttccatgccattaagtgcattagttatgatgggtgccaggaacgttgtgcaaagttccaggatggagagtaggtttcatgtagcagtgccagagaatgtgggaatgaaaatgctagagagtcagctgacaaaaggccatgaagtccagcatccaaagtgtatgagaacatgaaggccatggagagagattgtggaacatgaatgaaactctactggtgggctgtgaccttctgtagctaagcaatattggttttagctggactcagatgctttacaggaatggagatcattgggtttatttgcatgaacaaggtctttaagttttattagtttcatatgatttcagaaattagatgtaaaccgtttttcatattgcatgggaaagtttaacaatattccttctggcaagaaagttgaagaaacctttttttatttcaatgatagattgctcggaaagaattcacctaccttctctagtaccctctcccattttatcacttgagaagtagtattttaaatccatctccttctaagaagaaaagtccatgtgtttgaaatatttctgtattcatgtcctccatcttggggaactattctttgatctttgactctatgtctccaccctatacaccatgccaatatatcacaatgacaacctagctgaagctcactgtcagcacatacattttgttctaagaactcattagtacctatgaaatgcttctttttaagagcaacaaaaattatatgctcttagtttctctgttaatgaggaattaaaacaaatttcacagtttcaaaaatatttaaagaaagggacattgaatgatcaggaatggagaattaattttaagaatacctcatttaaaaattttctttccatgtgccagacactgacttatgctttttacatgtattatctcattttatcttatactacccctatgaggtaaatactgttattatcattattttacatatgaagatgctgtagtttagacttgtccaagattatacagtaagtggtagtaaactcagagccagtctgactctagaacacatgctcttagaatctccttgtccttctcctcctcctaaaatgacactttatgtgtcctgcagtattgcatgaaatgggcagtatgtatcagtaattatatctgtctgacagactaagacctcaataatttcagattcttacatttatcattatggctagaaatcatgaaaaatctaaatatttcagaattggctgtgaatataattgcaaacaggaattcaaacctgtcttttcttactgaaggtggttggaggaatggtacgaatccattttacttgcttaatgtattagtccattctcatgttgcagtgaagaaatacctgagactgggtaatttataaagaaaagaggtttaattgactcacagttccgcatggctggggaggcctcaggaaacttacaatcatggcagaaggcacctcttcacaaggcggcaagagagagaatgagagcgaagcagggaagagccccttataaaactatcagatctaatgagaactcactcactatcataagaacagcatggggtaccacccccatgatctaatcacctcccacaaggtccctcccctaacatatggggattataattcagattactattcaacatgagatttggggtagggacacagccaaaccatatcagctagaatgctggactcggtaactcactcaggaaaacatggatttataaatattatgaggttgtttacattattcatataaacattcttgagaagtattgatttctcattgggcttcttgaatatacacagcataggactgtgcctgacacctctacccatctgtccatgaggcataggagtgagggggctgtgtggacactctccctctgccctcttgtgtgccactgtgcctgctcaactggggaccttgagacctaagtgcccttggaacaggttctggaacctgttcttaattaggatagatatggtgagtctcagtagccccaaaatgctgacttctaaacctggatgacaggacacatttacttgtctagaacccaaacctgaggatgtgtccttcatagatggaggccaatctgtacctcagtgccttccttaagctctaaccctggaaagagaatgatttagaacagggtttctaacccagggaagagtgaccctgagatggtacatagaaggatttcagggaagcagagaatttttcatgggagacagtctgcattgatcccatttcatcagattctctaggaagctgcaatccacaaaagcacagaattagtatgtttttcaagagcctgggcaaagagaaagtcaggacggtgagaattttacatatctccttgtttagctagaactaaaggtttctctaggatgcactcagggtggccgtaaagtatggagatatgcatgctatgattttaccatgtactgtgaggtaataacaataaactacttattatgtacctatctgtgttcccagacttggtggccgtcttgtatctatacctaacagtggatgtgctgagttttagagtcgagaaatgaatttattttttcaaaatatgccaaattgttttccaaagtactggtatcaattttccctcttaatttttgccaatctagtaagtatgaaataacattttattttcttctttggtatttccttggttgttaataaagttgtttacatttttgtatgataccttttcaagctttttgtccatttttctattgagttgtcttgtcatattttcattaatttggcagagttctttatatgttcttcataacaatctatactcatttattttgcaaatattttttcttagtttgcctcttatacttttacttcatacatgcttatgcatgtatgaagtatacatcatcagagatgatgtcttttttttttttttttttttgatggagtctcactctgtcgcccaggctggagtgcaatggcgtgatctcacctcactgcaacctccacctcccaggttcaagcaattctcttgcctcagcttcccaagtagctgggatttacaggcatgtaccactacacccagctaatttcatagttttagtagagatggggtttaaccatgttggccaggctggtctctaactcctgacctcaggtgatccacccaccttggcctcccaaagtgctgggattacaggcgtgagccaccatgcccagttcatacatgatgtcttttagtgaatagaagttcttgattttaatgctgtcaaatttataaatattttcctgtgtggttggaatttttgtattttgttaataagtcctcccctacctcaaagtcagaaagacattctcttctaaagtgttttaaagttgtgccctttacagtgaattcatttcctggaactcattttttatatgatacaaagttaacatccaattaattatttttcctccaatggataactaattacactaataccacttattgtatggccctgccttttctccggatctacaccacctcttctataatatattgtggtgtctgtttctagacttttaattttattttattggtttataatctatccctgcaccaataccatactttcaattattttaacttcataataagtctgtatatcttgtaggataagacagagaggatcttcttcttcaggagtaccttgtctgttattactgtagttctttactgtttcatataaatttactccaatatatatatttatgagtatatatatttacatttataaatatattcttatataattcatttgtatttgtataccttataactatttctaagtatttttcttacggacccacttacatatgagcactaaggagacatgtataaggatatttgtagcaacacttcacaatagcaaaaacttggaaacactcagattctattaacagaataggcaaataaattcacataacataatattacacagcagtgaaaaacagtgaaataaagtcatctatgatgacatggataaatttcaaaaacaatgtaaaataaacaaatcaagtcctgtaatatcacatgtaatatggtatcttttcaaaatgttcacagatgaccaagaaaaaacaattttgtttaagcatgcaagcatgtatggaggtgtaaaggtatatatgcatgtatgtagtaagcaggggaattaaaacaaaattcaatggtatgattatttctgggggagaggcaaaagaatggaatgaaaagaaacaaataaagacaaatgattgataatgttctggctcatgggttggggtatgtttctaggtattcaaaatattatgatgatttataattgtgtatatcgtctatatattctcttgcatgtatcaattatattaaaaagaaaataagagagacaacaaatgatgggagctatttagtagatttataaaactctgattatgttgcttacttccatttctgggaaactctgattcttctgttgtttttgtctgtgtgttttaataagaacaactcgggttggcaggcagcagcagagaggaaaaagtgccaagagtgatgtcgccagtattcctggtcagttcttatcagctgcagagccactatattttcattctcttttcccagctgtcttcaccttctctcttgtttctcccctctcccttcccttctttccaaaccatgtcttcttcactgcccctggagcctacgtctgggctgctgctctctgtgattccgttttcagccagctgcaaaacagcagagcttagggaggctgtgttgagttaggctggaagaccccatgcttcctctgtgcattcatttactctctggattctgagtgggcacagttatagctgtcactggtgtcaaagagaaaaataaatacactgctgccctgacacagccaaataagaaaaaataatctctaatctgtcaagtacaacccaagctgcatagcagtgtggtttctcatatgcatatcacagcatgcacgggctgtatttctggcagcagagaggagagtgaagttttgggaaaaagaaacaaaaggtagaatggagaggactgtggagatcatcagagatgtagtttagaggtgaaagaggtgaagccgtcagagctgtgtgagcccgtgtatcattcaccaatctagctgcctatcacaacctcgaagatgttgcagtaagaataacagcacaggggagagaaaatgaagcaagtcccgagggaataaaaaaggggaacaaatactaactccaaattaggaaatgttgaaaaatgatatgtaagattgttgtggtaaaaaagaaaaatgcctaataacataagaaaaatgtgtaagaataattgaagaggactctattctgaaggagaatttatctgagaagtcttcttattaaacaacctatcctaaggattccaaatatgggattccttttaaatgaaaaattcaagttggccgggcgcggtggctcacgcctgtaatcccagcactttgggaggccgagacgggcggatcacgaggtcaggagatcgagaccatcctggctaacacggtgaaaccccgtctctactaaaaatacaaaaattagccgggcatggtggcgcgtgcctgtagtcccagctacatgggaggctgaggcaggagaatggcgtgaacccgggaggcggagcttgcagtgagtcgagatcgcgccactgcactccagcctgggcgacagagcgaaactccgtctcaaaaaaaaaaaaaaaaaaaaaaagaaaaattcaagtcttagaattactcagctcacctttattcttcagtaccctcagacatagtcatttttttcttgatttgaccaaaatctgatggattttgctccaaccaagttacagtaaatgtgactctgcttctacacacacacgctcacacacatcaactccattcagataagaggtaaaaaaaaatcaggggagtatatcagttacctatttctatgtcacaaactacccccaaaacataatgggcttaagacaacggttgttttaatagctcacaattctgtggctcaacaatttaggctgggctcagctgggcagttctgtggttctcatctgaggtcacccatgtgaccacattcatccagttccttgactgggatggatggtctaagatgggcccactcacctgtctggtgattggttctgactgttggctgattgttctggggggcacaggtggggttttaatccatgtagcttctcattccctagtggcttcttcatatggtgctcacaggtcagcattccaagagagtggggacagaaatgcaaggcctcttgaggtccagtctcagaagccagacaacattgctctcactgccttgtattggtcaaattatcacaagggcagctgagattcaatacatagggaaataggcttcacctcttgctgggaagtataataatgtcacattgcaaaagggtaggcatacagggaggggaaggattattgtagctgtcttaattcaggctgctataacaaagtatcatagactggcgtcttataaacaatagatatttatttctcacagctctggagtctagaagtcctagatcagggtgctggtatggtaaggttctggtgagggccctcttcacgattgcagatgaacaatttctagtgtatcttcacatggtggaaagaagatgagagagctctctggcatcctttttataagggcactcatctcactcatgagggcttataacctaattacttcccaaaggtcctacctcc

SEQ ID NO: 119 - DNA, 459 bp, Homo sapiens
ttgtgaagtagcaactaaagtggcagtgtttcttctgaaattctcaggcagtcagactgtcttaggcaaatcttgataaaatagcccttatccaggtttttatctaaggaatcccaagaagactggggaatggagagacagtcaagggttatgtcagaaaaggatgagtatcagtttcaacatcagggagcggtggagctgcttgtcttcaattttttgctcatccttaccattttgacaatctggttatttaaaaatcatcgattccgcttcttgcatgaaactggaggagcaatggtgtatgatgacatttgatccagaaatcttcttcaatgttttactgccaccaattatatttcatgcaggatatagtctaaagaagagacacttttttcaaaacttaggatctattttaacgtatgccttcttgggaactgccatctcctgcatcgtcatagg

SEQ ID NO: 120 - protein, 61 aa, Homo sapiens
MERQSRVMSEKDEYQFQHQGAVELLVFNFLLILTILTIWLFKNHRFRFLHETGGAMVYDDI

SEQ ID NO: 121 - DNA, 857 bp, Homo sapiens
aatactaagccagggcagaatgcttgtgaagtagcaactaaagtggcagtgtttcttctgaaattctcaggcagtcagactgtcttaggcaaatcttgataaaatagcccttatccaggtttttatctaaggaatcccaagaagactggggaatggagagacagtcaagggttatgtcagaaaaggatgagtatcagtttcaacatcagggagcggtggagctgcttgtcttcaattttttgctcatccttaccattttgacaatctggttatttaaaaatcatcgattccgcttcttgcatgaaactggaggagcaatggtgtatggccttataatgggactaattttacgatatgctacagcaccaactgatattgaaagtggaactgtctatgactgtgtaaaactaactttcagtccatcaactctgctggttaatatcactgaccaagtttatgaatataaatacaaaagagaaataagtcagcacaacatcaatcctcatcaaggaaatgctatacttgaaaagatgacatttgatccagaaatcttcttcaatgttttactgccaccaattatatttcatgcaggatatagtctaaagaagagacacttttttcaaaacttaggatctattttaacgtatgccttcttgggaactgccatctcctgcatcgtcatagggtaagtgacattcggagctcaagttgcaggtggctgtggggtctgtgatctgtgtgagggatctaacacttccaggattcttgctggctgggaaaattgtcttttttttagtatatcacatatttgtatgttttttctgacttaattccacggcttctgacaaatacaaggc

SEQ ID NO: 122 - protein, 176 aa, Homo sapiens
MERQSRVMSEKDEYQFQHQGAVELLVFNFLLILTILTIWLFKNHRFRFLHETGGAMVYGLIMGLILRYATAPTDIESGTVYDCVKLTFSPSTLLVNITDQVYEYKYKREISQHNINPHQGNAIKMTFDPEIFFNVLLPPIIFHAGYSLKKRHFFQNLGSILTYAFLGTAISCIVIG

SEQ ID NO: 123 - DNA, 104399 bp, Mus musculus
  misc_feature (1)...(104399): n = A,T,C or G
aaactaggctcggtgatggtgcctgtaattgcaccacccagcaggcgaagatagaagggtcagaagttcaaggttactctctgattacatggaactggaggacagcctgggctagataagaccttgtttccaaaaccaaagccaagaccccaaaaaactcttatcaagtgacatttaatagacatctgacttatacttaatagacacctaacttatagatttaaacttaactgaaactagtaagtgaccctcccccactagagctttgggttatcttatcaaagcaagaaatgacttgattaatcactgtccattctttgcccattacttatttctggcaaaaagtttggttgctgttagattgagaaaatgtccagctttccgatcactgcaaacttcttgagtatgagagaggctctgaactgcttgctggctgtagggagaaggagctatagtaggagaaattactcagtacggtttggctggctgtagggagaaggacctatagtaggagaaattactcagtacggtttggggagtcaagtggaggacttaggttcaaagatgatttacactcacaacagttaagttcttccagtactgagaggaattaaattctttacctagtgtgctgagtttaaggtcttgtttgagagatcttggtctggattctctctgcaactcctcggccctcatggtctccactgaaacaattcaaatgaggcccacagagcctgagactaaagggaggagagtggaaggtggccatagagaccattaattagcacaaacctactatgtgtaagagcgggcaatgaatgccactgttagagaacacactttcatgagttgagaatggacaaaggctaacaggatcatttgatgaagatgcagggcatactctcgaggggtaagaatgaaaaatggctgaagagatcttcgtgttgatctgaggcaggctttatattacttttaaggctctagaacaaacagctttcccaagggatgttgaccggtttcagtgactgacatgcctatttggatcagttcttacaagaggagacaatggcatgtccttgctccttatcagaaagccttatgtggacggaacacttgtaagattcagcactccaggatcaggtgcagagagcacttctgacattctgggcagttcatgatgtcatgactctaaggctagagacgtgactctggtctttcattcacttgatcaatatgtagagccgtactgttcctgtccttggctatgtaggatgctcattatgagagagagctgtgtctttcaggcctgtgactatccaataagctacttagcagccctaagtatcagaatgaggctggagatgcagacttgaaacttgagagagaaatcagaactcataaaatgcagcagctgtgagccaatcctgaaaatggatgtataagaaaaagactacactggagacctgagttctctggtcaaggattcaaaactggaaaaacactagtcagagagaaaacgatgaattagtaggagacataagtgagtatggtttcagtttagtccaaagtggggataggattcaaaacaaaaacagcaaaagtgaacaagagggtcaggtgctacatagaggctaaaaatactgggaaaggacaggccgtcacagtcaaaaaggggtcagtctgatgtcttactgcttaagctcttgacagtgaacaccatcttgtgagtctgagcctgctttccactggaaaatgcaagtccctggggctgtgcccttggccagctcttccccaaagacctagagcgtggatagcacgtgatgggatgtttaccacatctagtgttctacttcgaacactctaaggagaaaagtatttccttgaccaaaggtatggttatgaccacttatgtttcttactgaaggaaggaccatccagaggctgccccacctgggcatccagcccataaacaaccaccaaacccagacacgattgcaggtgccaacaagagcttgctgacaggagcctgatacagctgtctcctgagaggctctgccagtgcttgacaaatacagaagtggatgctcacagtcatccattagatggaacacaggatccccaatgaaggaactggagaaagtacccaaggagctgaaggggtttgcagccccatagaaggaacaacaatatgaactaaccagcacccccagtgctcccttggactaaaccaccaatcaaagaaaacacatggtgggactcatggctctagctgcatatgtaacagagaatggcctaattggtcatcagtgggaggagaggcccttggtcctgtgaaggctctatgcccaagtataggggaatgccagggcagggaagcaggagtgggtgggttggggagcaggaggagggaggggataggggattttcagaggagaaactaggaaaggggatatcatttgaaatgtaaagaaagaaaatatctaataaatctaaagtatgggaaaaaaaagattcaatccacagaagtccatggtacttgcattcaaagctcacaacggcagctataggccatctaacatgttctgggcaccaaatgctagccatgcactgcctaggtttccaaactgatcttctttaatattgagaacaacatagtaaattatgagttttccccattaaaaaatagtatctcaaaagctgcttggtccctagtggtggaaagcagcattgctgtgcttgtaaaactgaaatgatgtcatactctaaaacaaagagaccaatgggccaacattccaaaattagctttaaagaataaggtctattaggacaagtgctatcttctggtttgttagtgagtatgtgaaatgatagattctgagacgtctgatctggtagacgctgaacagaactcctctgctcatgtgagtaccatcactatcaggtgtaagcgatttctctcaaagtcaatttactgggcccaagcataattacaacttttaatttgaagcttgacatgctggcatagccattatcacttgcatctgttttatcagaacttgacaggttttctttgttggtttaaacctatttagcttatgtaggctataggcaatcatttataccgaaacccaaccttcaaagtaaaaataatatgaaaatccaaggcatatttcaccctgaaagtaagcagaatatataatctttcagggctaataatttctataattggaatacttctgggataattaaggaagagttgcgttattcatcttctctgaaaatccagcctgtgatgccctcttaatggtaagctgaggaggctgtcattagcaatatttcacagatgggttgtgtctgagttttatttatttatttttctgcctagccctttgccccctttctgatttcagagtaacaaacattttaaagcagaaatatagaccatggtgtcatgcgttttgtcttctgcaagtcagatgatgaacggaaaaaggatgggatataacctgaagccaggagggaagtgtttgctggtgagcttcgaggaaaagggaagtctcagtcgggggcccagagcaccatccccacagcggaataagccacagttctagaaggcatagctagtctcaaaatcagaaaccagtgagccaaattaggttagacaaagttcttgtcctgtcctgataggatgtagaagccagggagacgaatgaatggaaggccatgaaccgtaagatggagatatcataaggtcagagagcctgaaagggtgccaggcagagcttgggcagtagggttctgttactctgataaacaccatgaccaaaggcaaatgaaggaagacaggttttctttgattttgagattgtgagaaatctgatcgagtagacagatttgaggtttcagctcatcatggaggaaagtcaatgcaggaactaaaggcaagaactggaagcagaaactacagaaaaatgctgcttactggcttgctcccaggctcataccgtcttatactgcacgggcctacctgcctagggtaggtagcccacagtgggctgggccctcctacattagctataaatcaagaaaatacccccaagacatacccacaggctaatatgatggaggaaattctttagttgaagttccttcttccaaagtgtgtaaaaatgacaacaaagatttgttatcacacacagaacggtggtcacagaagtccactacatggatgtgggttataaagactaacgaataagacgccatccgttaggctttcttgtcggatctacaaaaaccaaaaagaactctgtatgattttaggctttcttacagagctacctatacaatggttgttcgtctttgctgatctttgcttcactgagagaggcatagccaaaaaattttcttggcatttctgttggtccctcttgttgactcgagtcaaggctgaggcttggccatctctgctaggtagtgtcatcgctgttgatcatgttgctatcccaactctatggaactggactactgatacatccatgaagtgttggccagtagattgagctactgttgctactaacccataaactgaactgttggtttccagacaacatagatggcagttgttctaaagaacatttttttaaaacaggtccacttcctccacaacctttcttttctattacctctggtgggtggtgatctacaaaggaggtgaaagcatttaaaagccatcattaaaaataggtttttaaaacattaaagttacagtttgcaaaacaggcttccactttttttcctgttcaatgcctaattgttctttaagatctactttaaacataaacatccatccaagcccacctagagttaaattgatttctcccctttttatgctcacatgccatcttctatcacatgttcttatttatttgcatgtttgtctttatgagtatttgagaacaacagagacccttcgggcatcatcttattcatcgctactttcccaggactcagtgtggtgcttggcatggggggtagaagccctctgatatgggggagatgccgatcaatgttgaactcgggtcatttgtcccttttcacagtaacagtgaaaggatattcggtacagctcaccaggttcatcttctctacacgaaccaaacccccctgggatgttttcagtacagctggcctctgaaacagcatgtcactgcactgatacctcagagtcagatgaaaacaaaaggcattgctattctttgtcaggcttcttagctcctgtgaggaggagaaaggcccttcgcctgtgtgaggagcactccaggaaggctggtgttatagcataatagaccggcatcatttttattatttcttgggaatcatgaacccagagcctggtgaatactgttgaagttctctgcctctgcctcgcatccctagccacattattattatttgtaaagatgcatttttccattttagattatatgtatgtgtgtgagggtgtgtgcgcaggtcagcagctgccagggtaggctacaaaggggcatcagcttccctgatgctacagttacaggcagttgtgagctgccagacgtgggtggtgggagtgaatttgggtcctttgccaaaacagcatatgctcttagctgctgagctagatcgacacgacacccatcaccccttcttttgaggtagggtctcactctgtagccctggttaaattggagcttgctctgtagctctttctggtctagtgctcacaaagatctgcctgcctctgcctcctgggttctgggattaaaggcgtgcaccaccacaccaggctcctcctcctcctcttaaaagaatgaactgaaatctttgacccaagagaaaactgtggtctgttccaaagaaggcaacccagaaagcaaagcacaagacaaacaaagcatagactaggaagctttctgccaaaaaaagtgactttgtcaccccaccccctccccggacccttggcacccctcctgcagcctcacttgaactgagagggcacactgctagatctcctccgttcacttgatgcatgttacatggagtactgagttaagcatgttagtgcctagattttagtcccgaggcaggctactgctgagtaattaacttcagaagggttagtacacacagtgtaacggtagctaagaagaacagttttccaaatgggaaaataaaaggcataaaaaatacatttcatggtgacaactgctctaaattatgagtgggatgatgagacccagacagaactgtcaggatttctaaggggccatctataaggctccatgatccacgcaggcttgcattttgagtttgcaggttaggaaactgagcacaaatcactgccaaatgccacactggaagtcagagaaatagagatgaatctcacagctctgacgctgggcaaaagaagccaatgccaaaggccttcctgtatgattgtacttggatccagggcagccaagcccaattactactcagagaactctgttagtagtaacatggtcgcttctatgtgggattttactaggaagttaaatcatggaatcgtctagaccattaatatacagcagtagtatgtcctcgcataacaactcatttacctggacaaagatttgtttttattacgtgtgtgtatgtgtatgtacatatatgagtgatacataaataaaaaaatgctgagaaggaatgagttgagctctgtccaggtagccctgtgtagctgcaagttgtctcttactagctacatgccctttctgtggtaagtttcagttttttaggctaaacagagacccttacctattttaccagatgaatgaacaggtaaattattacatgtaagttaaaagtgacagaacttgctggttaatgtggaaatctattttataagctttgtaatacatattttgagatagtttaactggaattattattctatacaagatgctgctgctcctcctagacaccacagtcaaacgaaaagctcagacccaggtatgggaaacatcccttcaagttgttgctaggtgggtggttcacaagaaacccccccaaacaaaacaaaacaaaacaaaacaaaacaaaacaaaacaaaacaggctgtcaacattatacttagttacccaccagaacttgatggtaaagcctattgttgaagataccatagactgtgcccacgaaacttggagaaggcaagccgttactgacctgaaaacctttgaaggctcacagtgctcacagtgctacaggtgctaagctggctgctggaggggataaagtccccagttctgagcctgtgaactacattagtaactcaacctagcaagatatgctcattagctagggtgtgtgtgcatatgcctgcacacacacacacacacacacacacacacacacacacacacacacacagaaggatatgaaataatcttcagaaaatttttactccaatgctgttttgctatttttagccttcaaatagtgcctaagttctagactgcttatgacaacacgttcatacaccattgggcctaatgtttaagttatagcctctgggttcttctggtatgatctcataactactcaagctttgcaagttcttcagtgggtttagaggccctcctgctccattctgccagtcagcccttgcattcccacacctgtgaagttgctcacagacctccatctttggcctctgtcttagctagggtttcgattgctacgataaaacaccatatccagaagcaactcacaaggaaaggggttttaccacacaactcttagttcatactccattactgcgacaggtcggggcaggatcttgaggcaggaacccactcggaggcagaaactgatccagaagctgtagaagaacactgcttgggctggagagatggctcagcggttaagagcactgactgctcttcctgaggtcctgagttcaaatcccagcaaccacatggtggctcacctcgctgggagggttaaacaagttcataggcagctttgttcccttatcactctcatcccaggactaaagtctaggagaatgaattaaggagcttgaacaggtgccctggatatggtcccgtctccaatgggtagccccttatttaagccacaatgccaaaatacaactggatcacactgtggctcccctcccctcactttgtgtttccatcctacaaaagtgtcgtacaacctccctatagctaaacagttcagatcccgaaccggccgcctccctgagagctcagaacatcaagctttcgttttaaagcttctgtctgtgaagggagttttctcagcttctacccaaaccggacaatttcctcagacttaactcctgaaaatgatgtgtattgtatttaagagtgacttgtaaagattatacatgttttccccaacgcattccgtttaccatgaggatgatgtatgagaaagggaatttagtttaagtaccaggcatcgaggtgtatagctctgcttttcgtggtacggaaagtctagttagtcaattttagggaacactgaaaaataaaaaaaatccaaaatattactatgcaaaagcaagcagcaactgtttagatattctgaaaggtgaattgttttaagtaaaaaataccaaacaataatgtttcaagtgatagtcaaggcagaagccatataagaggtccctctgggtctctgggatgtgttctgttttgagtgtgttcctaagatgaccatggaaatgaaactcaagtccagaaaaaccactggaacttattattttcatgtcgcaggccactaggtgtggctacaggattagagagattgtacccagttctaactggagcagacccaacttattccctttatcaagatatgttttgcatgtgtggtttaattacttgaatgttgggtgcctgacttctgtttctgtaactcacctcaccgtctctaaaatgttcaggtgtccctgttacacatccagtggtcagctggagctacaccggcatttgcctaatctaacaaatcgttcacttccagcaaaataaaaagggcctccacagcactctccgcgtgtgttcctcagcacatttataaaacatacaagcaaaggaaccgccttcctgcccggctgagtgaagctttaattctccaccttggcacctcagcggacagctgtaatgagagcgttatctccaaataggcccttaaacgggagccctgctgagcagagacacactttcccaggcctgtgatttctcttctgccaactgaccaggcgggctcagcagcagggaaggtctgcaggtaggtgtcgagaggatcatttggaaagccttggatcccttgcagggaagaggcagctgctccatgttttcccaaacatctgtccccggtcttactcaccctttggaggctcgagctcattaaatggagatctgatcacgactcagaaccgaaggtcgctcagagaccggaaacaggcctaagtgccacccagaaagttacccttcccttatgtcagcaacaaagtacagctttcaagcagtgtcaagatccataacaccacccagactggactgtccgcccaggggatgtcacaaaacagaggtctccagtgcaggactcctgcaggtggcttttctcccaggaataagggctttatttttatttctttgcctctggcactcaagactggggctgaaacccgacagagacagaaggtctaaggactgaatgaccgggtcattcagtacttttgagatatgaggcctaagtctcaaagcccacgtgttacttcgaaaagccaggcagtgcacacacgaggcggcctcttgggagagcatgcgtggccacgccctcattccctgcggaaacccgtcccctttccatcaggattccgggagagggcagtcgggcgcaggcgtagaacaaaccggaagtaggaacaagggacgtgggcgtggccagttctcactgcagaggtcgcgctccggctctcccgcccgaggctgcgggcgagcaggcggctgcgcgcgcagcccagcgcaggctcctcccctcccggccccttagcgcgtgagtggcttgctgcttctccgccctccgagatggcgctggaccccgcaggtactggggtcggcgtggttgtgagggcctgggcgcgggtctccacccggcgccggcggtcaggtgccccgaggatgcgcggctagcgcctcacctagcctggcggctgggtttccactctccgcgacaggccgttcatctgccgctcgctggggctctggtgctcagtgaggggcgttgggttccttgtgtcaacttccattatctcttcaatctctgtaccatctagtttttgttatttgtttttcgtccgttggggcgcaggctccttttaaacagtatagggtatagacacagttgtcccagaaaactgtgcacagtttgacattttgttccgggaattttatgccgtctactcccaagttcatccttgtagcccagtgtgacaaaggctccaggacggagtggctagagtcattttcttggaaacggcatttccgggtcgttttaacttgcatggtttcacttaggtttgcagtcaagttcagttgctcaggaagttttacagacgcgcactcaacagtacttttaactaacggcgaagagacagagatggaaaggtagtgataatgagtctatagtctttttttgtttgtttgtttgctttggtttttgtttttttttgagacagggtttctctgtgtagccctgctgtcctggaactcactttgtagaccaggctggctttgaattcagaaatccgcctgcctctgcctcccaagtgctgggattaaaggcgtgcacctccactgtccggcgagtctagtctttatggctaggaaaactcaaggtattggtaggttagagactttcagacctttgaaggttctgaattgaaagatcacacgtggcccttaaataggatggaaactaggtatagcattcaaataactggtcactttattatcaagctaagtgtattcaattgttccagaatagcatttgcatggttggttcttttaactccattttcacggagtaggaagcaggctcagaaaggttaagccactgcttgtagtcaccacccctagctcgttcctagatgcacgtccatcagatgtgaattcaaatgtcccttcctcatagaacttagcactgtctaaagcaaacgtctgttcatctgctgcagcaccctgcatactctccacctaatgtaataggccagagtctacaagtgcctgtctatatcatgtctgagcacagataatggtagactcggggacttctataatttcaagcatgaagcagttgtagaacaccgctccatcctaccagtttgaggcaaaatatttggactggactctgaagcagcagtagacccaggtttgaagcagcaacatgagcagcgattatgtggtaaagcatactgagtcttccttggtttgagggctttgattggaaggaggaggcagtaatgaggaatggggtaagggaagttcaggtaaagtgcatatgattttggtattgtatgaccttgaagataatctcatgcagatagggatggggcactcaggttaaagcagtggttttcatccttcctaatgccgagaccctgtaacagttcctcatgttgtggtgaccccccaaccacagaatcatttcattgctacttcataactgcaatttcactactgttaggaaacataatatacatttcttggagatagaagcttgccaaaagggatggtgaccccacaggttgggagccactgggttaaaggcctgcatggatcttaattagacagatgagaaaatgtaagaaacaaacacttcatatttgctctcagcggtttcttgttactcttaaccccctcggaatgggtagtgtgctcaaggctacgttgctattggccgattggctttttttttttttttttttttggtttttcgagacagggtttctctgtgtagccctggctgtcttggaactcactcagtagaccaggctggtctcgaactcataaatccgtctgcctctgcctcccgagtgctgggattaaaggcatgtgccaccactgcctggctttgctgttgtctgttaggtccaagttttgttagaaaccttgtggtttccttctcaaccgaggctgtcagccatccttttaaagtactttttggtaaaactaagcttgttggggtcccagaactcatggtatattgttctagaatctaggaaacagtaacatataggacaaacaaggaccccacctgaaatagcttctccctgctggctcacagacacttaaagacacagtatgaagaaagactgtgagggggcggtgcttttgctaagttgagagcgtatggagaagtgccatctgctttgccctgtcaaggatgagaagacgcttccgtgaaaagagcaggggctgggaccagggtgggcattcaaagtggcaaatgcttgggaaataccgaactgactacagaggggagccatacggagaaagttagaaagtaggctcgagatgaacacctagctggtttagggccttgaattcgatgagaaagcattttaattctttttttttttttcctcaaagtctggacccaacagtgagatgtaggctgcatccggattcttgtgtgactcttcctttaaacttttccatttataaagttggtaacaccactccctgaaggtttatcagccacagttgtgcttactcttttctactgtcataagtggaagagactagagaaaggaaaagatgccaagtgaagtggcagggagagggattgacttcatgctgatgcctgcctgagctgcactcttagatcctctgacactccagtacttgttaggcagttccaacatgccgctctgcacgcacgatcccagttctgctgacttatcactcactaactgcgtgtgtgtgtgtgtgtgtgtgtgtgtgtttgtgtgtgtgatacacacagacagacatatgtatgtatatatgtatgtatgtgtgtgtatgtatatatgtatgcatgtatatatgcatgtatgtattatgtatgtatatatgtattatgtatgtatgtatatatgtatgtatatatgtattatgtatatatgaatgtatatatgtattatgtatgtatgtatatatgtatgtatgtatatatgtatgtatgtatatatgtacgtatgtatgtatgtatatatgtacgtatgtatatatgtatgtatgtatgtatgtgtgtgtatgtatatatgtatgcatgtatatatgcatgtatgtattatgtatgtatatatgtattatgtatgtatgtatatatgtatgtatatatgtattatgtatatatgaatgtatatatgtattatgtatgtatgtatatatgtatgtatgtatatatgtatgtatgtatgtatatatgtacgtatgtatgtatgtatatatgtacgtatgtatatatgtatgtatgtatgtatatatgtacgtatgtatatatgtacgtatgtatgtatgtatatatgtacgtatgtatatatgtatgtatgtatgtatatatgtacgtatgtatatatgtacgtatgtatgtatgtatatatgtacgtatgtatatatgtatgtatgtatgtatatatgtacgtatgtatatatgtatgtatgtatgtatgtatatatgtatgtatgtatgtatatatgtacgtatgtatatatgtatgtatgtacgtatgtatatatgtatgtatgtatgtatgtatggtctctgttctgaaaggagattcttacaaccttcagtcataactgggacctttgatcccaataatattgctagagtttgtagtgcagctcattctcctatactaggacttaagtttatcttatttcaagttacagttctttgcaaaatcataatactttctgtaaacattgtatattttagaaaaatctagtcaaatttagtggttaaaactttcaaagatgtttttaaaaacatataacccactatcacctataaatacaaatgttaaaattcatgcttgttaaatataattttcagaaaggtaaaatatgactcatgcaaaaaaaatggatatgtgttaaagattttcttcaactcattaattagtgaaggaaccagtaagatataaaaattagaccgaaaatatttcagaaactaggtatgtagacagtttatcggttatggccatagatgagaacctttcatttacatcaggtcctctttggtgctgttgctttaaaagtttattttgattctgctttataacagtcttagaagttagcccctgcccctaacaaagtataaaaaaaaacaataactggaagtatcaggaaactatctgcttacacctttgcctattctggtgtttcatgaaacgtttctgaatttattatgtttccagatgacagccacagggatcattctttaggtgtacgacccaggagagctcctgccacctctttctcttgtctccttttaggacggccaaggcttctcttcccttgtcagttagcacacgttcctcctttccctttacttttgcaagatgtctctgtctgtctgtctgtctgtctgtgtccttctgggggtgtccttccattgctgttctcttcaaggaatctgggaagtggagaaagctggtcctggctaagcttgaactgggaagtgagatgaggaacccgctgccatcccgtgggtggggcttaggtgtaggtgtatagtgcatggggcttaggtgtacggtatcatgcgagggagaaggctgcagtgacacgccccgaaggccaggttcactctgcttctctttctaacttaagtgttaccttgtggaatatgcatttagaactcgtacttatatttactagagacttactttctggtaagttagatgtctaagcatatttgaagaatctccccccacccctcccaccttgagcattgtgagcttagttctgtgcggtgtatgcgtcgactggaaacttaacattcgccattgctttttattcaggcagagtcttatgtagtttagtccagccttaagcttatgcttgtgctcctcctgatgcccccctcccagccccccaggctgggatgccagacatgcaccaccacacctgcttacgtagagccgggattgcagaaccaggcctttgtgctacatcccagactcatcctggctagccttgaacttactatgtaacccacactcgtttcagatttgtgtgatcccctttcttagcctcctcttacacgcgttctcgcgaccggccaggaagaacgcaacaaaccggaatcttctgcggcaaagctttattgcttacatcttcaggagccagagagcaagagagcaagagctctattgcttacatctttaggagccagagcgcaagagcgctagagtgtaagagccagagcaagagctttattgcttacatctttaggagccagagagcaagagagcaagagccagagcaagagagagaatggcgaaaccccgtccctttttaaggagaattattctccgcctaggacgtattactccctgattggctgcagcccatcagccgagttgtcgtcacggggaaggcagagcacatggggtggaaaactacccttggcacatgcgcagattatttgtttaccacttagaacacaggatgtcagcgccatcttgcaacggcgaatgtgagggcggctccccacagatcccccttttcttttaataagagcaataggccacccatattaatgagagtggagatagaggtcaaatccccaatgtgcaggtaaaggagccgtacacataacctcctcccaggctcatcacccagaggggtcctggtctggtcccgtgtcgttttacctggggagaaggacacttggacactcaaccttcttgaaagatgacatgtctccctagaataggctcatatatgccgcagagcccttctactgcagtgcttagccgtgcaactctctcgggctgctgaagcacactcactctatcccgtgcaatgagactagcctcgtggggtgcaagagctgaatggccagcgacctattgcttaagcatagataaccatatatcagaggaagcaccatgttctagagctgcaagtgcctgggcaataaccaccttgtctctcctagtttgggccttaagcttacagaccaaccagagaagcaacactaatccacagcaaagtgtatctccaaataatcccacccatacccattctttaaagaaggaaaatgctgaggagatccaattgggtaatcctttggtcagggacaggtccaagcgcgtggagttgacctgaataatggcaattctcaattcccgaagggtctgttcaaattcagccatccaattctgtaacatatactgagaaagactttttaacaaattagctaccctagtaaatttctcatactgaatggaagtaacggacaatcccggaaacttttgttcacatcccagctgagctatttgccataatacatctagttgttcctggacaagatctatgcgttgattaatttctgcccatggagcatttttgggattggaggatggcggccgctaagcctgcattggtgagaggtcccccgagctcccgacaaaccctgagccagtcttgtaaacctttgttctttcttggggctatggccgctcggcactcctgtgtggcttgctcataaatgagctgttctaccagaggtgtggcttgctctgaatctccaaaaatacgctctgctgcctctgtcattctggccacaaaatctgagaaggactcctgaggtccctggacgatctttgttagttgtccagtggcctcacctgcttgggagagcgccttccaggccctaatagccttttcatctgattcagaactactaagaactggctccttgagctcatctagtgatgagtataggctccttctcctagagacctccgctgattgatcttttttcttttctttttccttctccttccttctaatctctccccaggtattcttacctgacctaaacttttcctcgggttcaagacccttggaaaggcctgtatacttattttgtgtaccatatttcccctttgctcctactctctctccccgctttacttctgatagattgccctgaatttcatccagaattttcagccctgccttaaccgcttgataacatgtgaaaaggaacaaaagggcttctaacactagaaaaagttcaaggccaaacataccttgtaaagctatttcccactttacttctgatagactgtcttgaatttcgttaggcttgctctctgactagctcataactcagttatcccccttattctaaccggagttcagcagcgtggctggtttcctttcttcatcttctcatgtccatctccttagtgttctggggagaatctctctctctctatccctctggatgtcccacctattttctgcctcagctcattggccataagcttttttattgacaggtgatgcttgtaagagattctctctatagctttattgatgtggttctctcagaaagggaagaataagggagacagggtggaggaaatggaagtatgtggtttctgggaagcttagcctcagtctgatcatttcctgtgcaccaaaactgcataggttatccgggtgtggaggcaagggagctggacttaggaaccatatttcagtgactttgttaccacaggagtgggaggaaggcagcagtaaggagaacttagagcggttcctgctcatgggcagctctggggattgtaaaggtgaatgcaccaacatttctgctatgggagacataccagctgatatgttgtttgtttgtttatttatttattttttttggtttttcgagacagggtttctctgtgtagcctagctgtcctggaattcactctgtagaccaggctggcctccaactcataaatccacctgcctctgcctcccaagtgctgggaataaaggcgtgtgccaccactgcccagctgatgtgtttataaaaggataaagagaggggggatatgttctatggaggtgtggtgagttatgggggaagagtcacaagatggtatggtatagagtttaattaagggcatgggtggggagttaagagggtatagaggcagagaaagagagagaggaagggaggggagtggaggggaagggagaggagtagagtagaggctggccatgagctcgtggagagagagaggagaggggaatggggagagaataggagaaggaagacaggagcaagagagcatgagaggagcaagagcaagaaagggaggaggggcgagcagctgcttttacagtgggtctggcctacctggctgttgccaggtaactgtggggcagagcttagacagattgctaacaccgcctccatcctaaaactaaactatctgaagctatcaggaatcttaatttggatagcaatgggtatttacataactacactgtattttgtaatgtttttcaggattgtagtaaaagctcttgagtgacgttggcctaggatgagcctggaactggccaggtagatagatgcatctttttctttcgtttccttctttttcattcttcattgttcatttctttaaaagttttctaagaagcttccctgattgctgtccctctcttcagtctttaaaaaagtaattgaaattcacatgccaagaaccatatagaaatgctgtagactctgtgtatggtgcctctcccttctaagtccagcttgtttttcttgagatctcatgtgaaatctgtagatgtgatgtgtctaaaaccattggagataaaggaaaacttgaagtagaaagcaagaaagtaaaacagcagtgtaggagacagtatggttttcccatgcatggctggaaaggcccagacagttggagatggtctaccaagaaggtacctgtgttgtgctgggtcacagactctttaccaagatgggaagatgtaggactgacttccggtttcgggtgccatcagctgcaggtagcattgtaggaagtttcggggtgagagggaggagacagagtgtttgcgattctgaatattcctcctggtttgcaaggggtttctgactcaacacagaaagttcagagcaaaacccttgttattttttatcagtaccattatttaatggcttatttgtggaaatacatgtttatagatgtcaggagatgagaaatactaggcagtataagtgaacctaataaaactgtactcagataagaacattaatacacaaattaaacttagaacattacattacaagaataagattgctggggaaatttgtaaagaactgatattgtgggttttttttcttataataatgaattgttactgggagttttttacagctcaaattaagcacaattaatgattaattgagagcatagactttcaaatgtttgtggtgcagaataaggaagtttttctgtcttactccttctgtgtgtagcctgtaatgtgataagaggtgtagtactcagaacagaacaagtactcataactgtcgaattctgaagcccttttgttccttttcacatgttatcaagcggttaaggcagggctgaaaattctggatgaaattcagggcaatctatcagaagtaaagcggggagagagagtaggagcaaaggggaaatatggtacacaaaataagtatacaggcctttccaagggtcttgaacccgaggaaaagtttaggtcaggtaagaatacctggggagagattagaaggaaggagaaggaaaaagaaaagaaaaaagatcaatcagcggaggtctctaggagaaggtatgtaatctatgtattttgtagaggctcttgagctttaaacaaatttgttgctaacctaacttttaatgttttttctctttgaatgtttgctgtttcctctgacaaattgcttctcttcctatgttttttttttttaacttaaaaaaatgctcttctgtaggagtcagaattctatttgacttttttgtttttgtttttgttttttttttaaatcaatagaagaagcaaacctagaacttggatgtttccaattttcccgctcccaagatgcctctgagaccctgctgtccaaaggttgtttccaggcttcttagtcactacagacacttacataaataacctcacttgccagatccttaagtaggcccctgctccctgtgagtgatgctgtcatggaaggaagagtggggagtggattacatgaccttgatattgccactttgtgggtttcacccatggagcctgcaactcaccatctgcaaaagggaatacaatacagagagggctgctatgaagactccatccccatgtgatcacgcagctcaaggcaaacacacattttattgaggagacaaattctctcctgataagctccctgctgtcagctcaagtgtggcttggacggaagatggcgtaaagactggccactgctgcttgctgtcttcgtcttctcagtttaagcctttcccaaggccttttctcactaagcacctttttaaaaacacatttttattttgtttttagtataagaatgtaatttgagcagcctggcaagatggtgaatctgtgtggaggggactggtctgcccttggtgaggaggaggttctaattgagaactgtgctctcaggtactgagcccacctgctgctggggccctttgagatccttagaagctgctagtacacagagggacccaaagatggaaagtattgtcctgtgaaacacccagcagaactgggtggtagaagcatttgcctttaatctcaggcaaaggcagactgatctgagttcaaggccaacctagtagcctggtctatggagggagttccaggacagccaggggtacacagagaaaaccaacaacaaaaccaaaaccaaaactaaatcaaaacaaacaaaaacatcactcagcagattattgcaggcacttttctcgatttcctctgtaatagcaatgacatgaaaacgtctccaggtgcaaataagagtaccttgtaacatttatttgttaatatcattttttaaaggtccaaagctagctaggttgggaagctggagaggagactcagcagttaagagcacttgccactcttgcagaggacccaggctcagttcccagcactgagtagtggttcacagtcgtcttttgataactgcagttttagggaatctaatgccctcttctggtctttgtgtacatcagccatacatgctgtgtacacgcacgtgtgtgtgcacatgcacacacacacactcacacataggcaaaacactcaagcacatgaaatgaaagtaaataaaatcttttaaaaagctaaattggttaaattagaatatgttcactactgaaaaggtagacctggccctttatgtgccatagtctttcctaggaaagtttctacagcattaagatttatttcactgctatgttgtggattcatagcaagtgctgctatcagtagccttataatctagtactaccatattgcaggaacacatgagcccccaaacaaaacctgagctaacaaatgcagccagtggaaaaggtgaaaattgactttcaggtgatgatagaacgctgagaagttggagctttggaaatttcccccagtgctgttaaccctgatttttgccttagtataaatttatatggctatattatagcacactgtaaatttgatagtttttttcaggctcttatacaaatgcataacataggcatacaatattaactctaggagataaatttctaattcgtatttgtagtactgaagatagttttgtactatatacaaaattatagttaataattggtatgatagtttatatactatcaaatgagaaaatcttagaacttatacatttaaaactatcttaaattttttgcttaaaattaatttttgagaatttcattcatgaatatactgcatttacatccctacgcccctttgtttcctttctccaactctagtcccccacatcactctggaattacaacccctcctatagttattgttcacacacacacacacacacacacacacacacacgctataacctataaaaaccctactgtgcccagttatgtgctgcctctgtggaagtgttcagggctcatcactgaccgttgtgcaatcagttaggaggcccatccttgggaaagtggactctttctctctcagcagccactgactttatctaggagcagggctttgggatgtctccctccatctgtgtttatacaccagcctgtgtggtcttcacaggtcctgtgcagtcagccatattgttgagagttcatggtagcaacattcctgccctgtcctgaagaaagtgtctgtagcaggtgtcctggtcctctgtctcttacagccctcctactgtgctccctgaggcttctgtataggggttttgatttcaatgtatgcattggggtagtgcagcccatggtcacgtgttgtctgtgtttgccctgtgtttctgtagcactctctgtctgatgtagaaaccagcttcttgatgagggtgagagctatgtttgcagaagcaatgtgggtaacagtgttgttttctgatttagcagtcagagtttgaaaccttgaaatgatatccatgcagttctagaactgtttctttgttctggatgaggagaaggaattttggtaatccaggcaaaaccaatgtgttggataggaataggagaaccaggattcatgacaaaggtggacttctgctgtagtttattcatggaaaagaggttcagtatatacagttatgtctcttgtcaaagaaccgatccagaaaagtagttccttagttgcctaaaaccattgcaggatttagaaaggaaaggataggtttactagggtatgtaatgaataaggtattcagtaagactatgaaggtaagagaaaaaggtgagactttgaaattgatttcataaagtagacgagtattccatagttattggactctgttcagcagttacagtgttaactattgatgccgagttatggtttacactgtacatgcagagacaagggctatgcagaggtaatcctagtttcaaacacacattgacaccggctttccgtttgacaggtgtgctacaagcacttcacacccagtctgcccaacaagagacttctcctttctgttttctttttcttattttttttcttttttttttttttaatttccacatgtggtcacattgtttcacttggagttagaggagttagaggacaggggcatctttgaatcttcacttttctttagttccttcaggttctactgctctgatagggtcctttaaatctgtcctttactgtccatctgcgtttctgttatcttctcaaagaccacggtttgctttcaccctccatcttatgacagtttctagcaaaataaaatagacctaaataaatcatatagtatatacagagagtttaagaagcgggtccgtgagccttacctggtaagtgctgcaaggcaggagtggttagtggcattttaaaatactgttcaaaaatataaacacacaaaaagaacagagatcatgagtagcctacaaaggtaaaaactgttcacagtctgatacatgaaatatgtttgttgttattgacagaggcagtggaaatttggatgcagttgcaggtgtgggcaagagaaaaggagtcaggagaaacactttgcatatttactgtggatcttggttgagatggctggtgtccttgaattaaatcttaaacttcagctgacctcagtaactaagaagaccttagaaaaatgaatctatacttaaaattctttatatttgtgtaaaacacacacacacactaactcaactcatatcaaagatttgctaaggggtatatgcaggctttatcagagaagcccttggtaggaggtatatatttatatatctgcatgtattcatatatgaaggcatttagtgtaaggagttggtgtaagcagctgatgagtttggggtgtggggctgagcaggctgtcaggaagggcaggcttagagcagttggtcaagtgttgaccctacagttaatgcagttgctgaagacaacctcatatttgcttttcagatcgttggattgactctggtcgattggtgagcctcacggtttcttctggattgaactgcttttactgatttgtgtgtggtgtctgccaaatggactggaccactgctgctggttcatgtttggtgtttgatagtggattggactgagaacaacaaagattggaatctccctgaagaactatttctaaacaaactatatcctaataacctttcttttctactctgatgggtggtgggctaaaggggaggttgacccccttactaaaaaagcaggctgtgaaaaaatatatgcttacatcttacattttacaaatctatcccagactttccacccgaaatggccctctcagtccctgtggacaccatggttctacttcttactagtgtaggttaactttgcctgctcttgaatcagtagcccgtactcttgtgtctgtctattgctcaaccagttttttttgttgttgttgttggttttttttgtttttgtttttgttttttgagtgtttatccatgttgagtgttatcagcattatccttggtgatgttagtggcaggttatcagtttctattggtaagtcagttttggctaatatgatgaggtacacattactttctcaacatgttgcttcagttcttcaccaaatgagttcatagaaatggaccacggttgagtgtgtggttacacatcactcagcatgtgttccccagggtttcacacaggagagttcttacattctctccatcacttagtgttgtcagcgttggaaaagtgagtcgtttggtagttgtgagttaccacaggctccatttggctttgagttttgaatgtttttgttagcgtgtattagctgtgcttactcctgttccatacacatctgtacgtgcattttaatcacatcacagccgtgcccctcattacactttgtgttccactcccactcctcttcccaatcaggttctcttctatattgtttttgttgtctgacccagtgaatttcgtcatggttgctgaaggagaatgggtaaagagctgttttcatggtcactcactttttcttggttgtactaggttctctactctcaaaaatgcttaacttttaaaagcataactttactttgtggtaatttaataatactcataagaaactataaactagtacaatttccatgtaccttttacccagtgttccctaatggtaaatatgtaatcacagtccatgcctttcagcaggtgatattccctcaaaggaccaagctcgatattggaggggagactaaaatctcattctttcttatataaagtcttgtcatacatgacacatataaacatattcaatgtctgtgtgtaatcagtgtctgatagggtcacagtaaaagaaaaagctcctttcacgggaaaaacataacagaaaagaagcgtgctactgtgccccactatgagaaagctggggattgacactgtcaccaggctgttgcctcttagtcaaacaactctacttcttttcctgtctatagttgcttattttcacgtgtaaaggttaaaattcttgtgcgcgctcgactggccaggaagaacgacgctgcaacaggatccttctgcacacgtttattgggagagcttgattgtagaggcgaaaagacttcgagcccagaactggtgctgcttttataggcctaggaggggcgtgtctcacacccggattggttatgcactaagcctcatttgcatgttcctcatctgattggctactctctctcagtaccttacagaacctcattatcatacctcatttgcatgtctcacatctgattggttatactctcagtaccttacagaacctcattatcatgcctgggccaggcagtgtctttgcaaaaaactttactgcatatgtacacattggttgtttgtccaatcttatgcgtggtggccagcagtagtcagtgccactctgcaacggcacatgtggcttcccacatctccccctgttttttttaataaaatgaggctggactaggcctgtgcaattatgcccatccgccgtggctcctgttttaggtcattcctctaatgtcacagccttacccgtcatagggtaaccctatcgccaccgggccccatgtcttaggttggactgtgcacgaggaaagttgcccgtctctggataccgcagtgctgtgtgacaataactgctaaatgacctagggcgaactctgcaaaagaggccagccaaaaaatgaattagtggggaaatcatgatcaccctattgatgagcaagggctgatcaatgatcgttgagtctctctcatctaatctcatgctgactaattcttgagtatagataaccaaatttcaggggaggagccgttttcaatagctaaaagtgcctgagttataatcaccttgtcacgtttttgttgagttctgaatttgcataccaatcagagcatgaacaccagtccacagcatatggcagcaccaaacaaaatcactcccacccattccttaaagtaagaaaaagcagaggtaagccaagaggtaaagtctccaagggtcactggttccactctggtcccattaaggttcaggatctgcatctgcagcctcgtctgcaaccttcccagctcctgcgaccagttccccttcaggtaattcgataggtctgtacttttaataaaagaattattaatgtacctattgggagtaatgcacacatgcaaagtggatgccacacaactcatttgtatgacatccatcatctgttccatgtcatgttgtaaaatatccactctctgattcactaacattaaccctgaggtgatatgagaatccaccctttgcagggtaagcaatgcctcagacgttttttctgctatctgacttatagtgtcagcagtattaatttgatctgcccaattagagataatctttttcttaaaaaatatacagggtgtaaaaggtttatccacattatgcacaaagcataatgtataatttaaatgaaaactagtactcttatacacccgtggctcttgaggagtttgtcgtgcataaggcacatccaaaaaacattcctttgcaaaaaacaaaggctaggtaaaagaattggaatgtaccggtaaaggtactggccatgatcttactatggcccataaaggtatacttatcctggtttcaatcatcaggagcaggagaatcatcttggggttcatcttgctctttcagggtccttgtcagtcgcgtcgggacccaaagtggattttcttcaccctgtggaaaaacacaaatagctccccgggacctgattaagataggatccgggccataccatttattatcaaggacatttttccatttgaccatttcattgggcgattgaggccattgtccatgcctttcagctggtgatcttccagcatcannnnnnnnnnnnnnnnnnnnnnnnnnnnnnnnnnnnnnnnnnnnnnnnnnnnnnnnnnnnnnnnnnnnnnnnnnnnnnnnnnnnnnnnnnnnnnnnnnnnnnnnnnnnnnnnnnnnnnnnnnnnnnnnnnnnnnnnnnnnnnnnnnnnnnnnnnnnnnnnnnnnnnnnnnnnnnnnnnnnnnnnnnnnnnnnnnnnnnnnnnnnnnnnnnnnnnnnnnnnnnnnnnnnnnnnnnnnnnnnnnnnnnnnnnnnnnnnnnnnnnnnnnnnnnnnnnnnnnnnnnnnnnnnnnnnnnnnnnnnnnnnnnnnnnnnnnnnnnnnnnnnnnnnnnnnnnnnnnnnnnnnnnnnnnnnnnnnnnnnnnnnnnnnnnnnnnnnnnnnnnnnnnnnnnnnnnnnnnnnnnnnnnnnnnnnnnnnnnnnnnnnnnnnnnnnnnnnnnnnnnnnnnnnnnnnnnnnnnnnnnnnnnnnnnnnnnnnnnnnnnnnnnnnnnnnnnnnnnnnnnnnnnnnnnnnnnnnnnnnnnnnnnnnnnnnnnnnnnnnnnnnnnnnnnnnnnnnnnnnnnnnnnnnnnnnnnnnnnnnnnnnnnnnnnnnnnnnnnnnnnnnnnnnnnnnnnnnnnnnnnnnnnnnnnnnnnnnnnnnnnnnnnnnnnnnnnnnnnnnnnnnnnnnnnnnnnnnnnnnnnnnnnnnnnnnnnnnnnnnnnnnnnnnnnnnnnnnnnnnnnnnnnnnnnnnnnnnnnnnnnnnnnnnnnnnnnnnnnnnnnnnnnnnnnnnnnnnnnnnnnnnnnnnnnnnnnnnnnnnnnnnnnnnnnnnnnnnnnnnnnnnnnnnnnnnnnnnnnnnnnnnnnnnnnnnnnnnnnnnnnnnnnnnnnnnnnnnnnnnnnnnnnnnnnnnnnnnnnnnnnnnnnnnnnnnnnnnnnnnnnnnnnnnnnnnnnnnnnnnnnnnnnnnnnnnnnnnnnnnnnnnnnnnnnnnnnnnnnnnnnnnnnnnnnnnnnnnnnnnnnnnnnnnnnnnnnnnnnnnnnnnnnnnnnnnnnnnnnnnnnnnnnnnnnnnnnnnnnnnnnnnnnnnnnnnnnnnnnnnnnnnnnnnnnnnnnnnnnnnnnnnnnnnnnnnnnnnnnnnnnnnnnnnnnnnnnnnnnnnnnnnnnnnnnnnnnnnnnnnnnnnnnnnnnnnnnnnnnnnnnnnnnnnnnnnnnnnnnnnnnnnnnnnnnnnnnnnnnnnnnnnnnnnnnnnnnnnnnnnnnnnnnnnnnnnnnnnnnnnnnnnnnnnnnnnnnnnnnnnnnnnnnnnnnnnnnnnnnnnnnnnnnnnnnnnnnnnnnnnnnnnnnnnnnnnnnnnnnnnnnnnnnnnnnnnnnnnnnnnnnnnnnnnnnnnnnnnnnnnnnnnnnnnnnnnnnnnnnnnnnnnnnnnnnnnnnnnnnnnnnnnnnnnnnnnnnnnnnnnnnnnnnnnnnnnnnnnnnnnnnnnnnnnnnnnnnnnnnnnnnnnnnnnnnnnnnnnnnnnnnnnnnnnnnnnnnnnnnnnnnnnnnnnnnnnnnnnnnnnnnnnnnnnnnnnnnnnnnnnnnnnnnnnnnnnnnnnnnnnnnnnnnnnnnnnnnnnnnnnnnnnnnnnnnnnnnnnnnnnnnnnnnnnnnnnnnnnnnnnnnnnnnnnnnnnnnnnnnnnnnnnnnnnnnnnnnnnnnnnnnnnnnnnnnnnnnnnnnnnnnnnnnnnnnnnnnnnnnnnnnnnnnnnnnnnnnnnnnnnnnnnnnnnnnnnnnnnnnnnnnnnnnnnnnnnnnnnnnnnnnnnnnnnnnnnnnnnnnnnnnnnnnnnnnnnnnnnnnnnnnnnnnnnnnnnnnnnnnnnnnnnnnnnnnnnnnnnnnnnnnnnnnnnnnnnnnnnnnnnnnnnnnnnnnnnnnnnnnnnnnnnnnnnnnnnnnnnnnnnnnnnnnnnnnnnnnnnnnnnnnnnnnnnnnnnnnnnnnnnnnnnnnnnnnnnnnnnnnnnnnnnnnnnnnnnnnnnnnnnnnnnnnnnnnnnnnnnnnnnnnnnnnnnnnnnnnnnnnnnnnnnnnnnnnnnnnnnnnnnnnnnnnnnnnnnnnnnnnnnnnnnnnnnnnnnnnnnnnnnnnnnnnnnnnnnnnnnnnnnnnnnnnnnnnnnnnnnnnnnnnnnnnnnnnnnnnnnnnnnnnnnnnnnnnnnnnnnnnnnnnnnnnnnnnnnnnnnnnnnnnnnnnnnnnnnnnnnnnnnnnnnnnnnnnnnnnnnnnnnnnnnnnnnnnnnnnnnnnnnnnnnnnnnnnnnnnnnnnnnnnnnnnnnnnnnnnnnnnnnnnnnnnnnnnnnnnnnnnnnnnnnnnnnnnnnnnnnnnnnnnnnnnnnnnnnnnnnnnnnnnnnnnnnnnnnnnnnnnnnnnnnnnnnnnnnnnnnnnnnnnnnnnnnnnnnnnnnnnnnnnnnnnnnnnnnnnnnnnnnnnnnnnnnnnnnnnnnnnnnnnnnnnnnnnnnnnnnnnnnnnnnnnnnnnnnnnnnnnnnnnnnnnnnnnnnnnnnnnnnnnnnnnnnnnnnnnnnnnnnnnnnnnnnnnnnnnnnnnnnnnnnnnnnnnnnnnnnnnnnnnnnnnnnnnnnnnnnnnnnnnnnnnnnnnnnnnnnnnnnnnnnnnnnnnnnnnnnnnnnnnnnnnnnnnnnnnnnnnnnnnnnnnnnnnnnnnnnnnnnnnnnnnnnnnnnnnnnnnnnnnnnnnnnnnnnnnnnnnnnnnnnnnnnnngggagcactgaaactcctccctattggaccagatctttctgcctcatactccgcagcagcctccttcaaatcttcctcctctcctgttgataattcggaatcctctgagctagacaattctaacgactcagagtcctcgagaggagggtaaattgacttaattttctgctttttactattttttatactattttttgtatctttacattttgggagttgacaattaaagccatgatctaagatcaaggcaagaaagatagcaaccccagcaacaattatcagatctatttcgtaggagagcatgcctctcacattaatttctttctacttaccggtaccgccgttcctcagctgaagagttctgaatccactccggatccttctcagcagtctgttttgcaggaacacttcattaccaccgttccccagctgaagagttctgaatccacgctggatccttctcagcagtctgttttgcgggaacctttattaactgctccttccctgtgatgcagttctgaatcctccctgtagcagggggtcttcgctcgtgcctgaagatgtttcttgtcccgggttttcggcaccacttcttgcgcgtgctcgactggccaggaagaacgacgctgcaacaggatccttctgcacacatttattgggagagcttgattgtagaggcgaaaagactttgagcccagaactggtgctgcttttataggcctaggaggggcgtgtctcacacccggattggttatgcactaagcctcatttgcatgttcctcatctgattggctactctctctcagtaccttacagaacctcattatcatacttcatttgcatgtctcacatctgattggttatactctcagtaccttacagaacctcattatcatgcctgggccaggcagtgtctttgcaaaaaactttactgcatatgtacacattggttgtttgtccaatcttatgcgtggtggccagcagtagtcagtgccactctgcaacggcacatgtggcttcccacataaaataagtaagtatgcccacagtcagcagcagagccactctgctaactacagagggcattcccgtgttgcctctcagtggtttgctctccatcagtgtagctttctcatgtgcaaactttaaggtctctgttcattcagtgtgatgctcttggactctatccaagttatgccaagttatgttgtatgtcagaggtcactttgtttcattgctaatactctgtagtctgaagtgttattgcgtgtccacttacctgttgaaggagcttcgtgttatatgttataagtataaataaacctacaatgaggtttatgtgcaggcattcacaagaacatgaatttgcagttttctagagtagatccacagaactctgcttagtcgtgataagtatatggtgggctgtatggggaggtgcttcatgcctcagagtgtcacggtaagaagtttctcagcagcacatcaggggatgggtctgctctatgtctgtcagctcctcggcatttacatcatgtccattctaacagactttcattactctctccttgtcccttagttttgctttttctaaagtgatagcattgagcatctcttcacatgctttttcccccagctgtgtatctcctttatataatgtctgttcaagtctttccccatttataactggctttgtttttcagtagttaaaattatcaccatattgtgtgtctggtacatgatgcatatgtgtgtgaatgggtgtgtgaatgggtgtgtgactgtgagtgatgtggagggcagaggcaactttgtgtaatcagtgttccacaccccctgtcttttcactttttgttggactctaggggtagagctcagggtgcctgtacccactgaggtctcttgctagccttgcgtgtttgttttcttattgctgagttaaaggcttttcatatattttcaattaagtcctttgtcagatgagatttgtagaacttgtttctatccatagcttgccttttatcttttgacaacgctggggtggaacccgtgtcttgtactggacaagtgctctgtgggccacactgcagtgcacagctccatttgactttcttcactggtcactgtgactgaccgaccactctggactggttcccagtcagaagagctgctgccacactgccccaggtagtagggatcctagaccccaggtgtgcctgttgccccaagtgttgagccatggatgtcttaccttaatgggttctttcacagagcagaagtttgaaaatgtactgaagtctaagccattgattttgtttgtttgtttgttttaaccccctttcttggcttataggtttgatgctatagataagtcagctcctcttgatgctgggccctgatggcctttctctgtgatggcttctagatggttttatatctggttctttactttgaaattgtaggttcacatgaagttaccaagaataccatgtagactcccatatatccttgtgacagacttctgtagggatgatacataattgtaagatgatagtaaacccacaaacttgaattggtacagtcttattaactacatagtagccctcttggcttttctccagtttgaagtgctggggacctaacccggggtctcgagcatgttagaccctctccctgtgagctgtgagtttgtggttcgcctttcacttttataagggatgtgctcatgtgtcctgtggtcctcttgctcatgtgtcctgtggccctcttgctcatgtgccccgtggtcctctttgaagcattatattagctattggattcactttgttttgctgttttgtttgtcttgttgaatatttagttttaaaaattgaattaagtaaatttacttttataaatgctttttctttatgaatgtatatttaattttgtcttgtgctgtagcagaaccaattgatgtatacttttattttttaggctattcataggatgaattatacatataatatttaaaaatagtgtaccaaccttgagttgctgagataaacccaacttatttatgttgttttctttttatatattgggtttaattcactggtgttttctagaggatacgtacttacatctgtgttgatgaggtatactgtgtgtgtgtgtgtgtgtgtgtgtgcctgtgtgtctatgttcttgctgtaaatactccctttgctttgggtgttagcataatattgctgttctgaaatgtgttaggaaaagactaaagttgataatattcattctttaagtatttggcagaatttgttaaaaggagccttccccccccccnnnnnnnnnnnnnnnnnnnnccccccccccccccccggtagttctgttgatttagagagaagcagcttgcattttacaatctgatttgtctttctctggctcttctcactgtgctctgtcactgccttagactccttacgcggagctcacttcccccgtttctgattttgtaagtggaaggttagagcattggtttcagagctcattttctactgtgagctttgctgcagtaggctttctcccgtgcatattgacccatcttacagaattagctacactgtgttaccgccattcataaagtgagtgtgtttaacgttattgaatgctgcttgctttctactctgagtgttttatttatgtgtaatgctttgtaagttaatggtttttttttttttagtggtttcactatagattacaatatgtgtgtataatttatcaaggtctattaccatccacatttaagtgaaatataggtatctgtggatctttttctaagtgcatgtgtgtgtgtgtgcatgtgtgttcaggtatgagcaggtgcacggaagctgaaggacaacctgggctggcatcctcagggacactgtctacctcctttgagcctgggtctctctcactggcctggaggtcaccagctaggcttcgctggccggccagtgagtcctcaccttctcagtactgggcttgcaagtccatgtctccacggctggcacctcgactatgtgggttctaggggtagcttcttgtgcttgcacagtaagcactttactaaataaagcacccccatatccctctgccccctcccctcccctccccatgctggcttagagccttccacatggtgggattgcaagtatttgccaccatgcctagctggaatgtaaatatattttttaaaaatggaatcattattaatttttatatgtatggatattttgcctctatgtatgtctatgtaccatgtgtatacttgaggccagaagatggcatcagctcccctggaattggagttatacatagttgtgagtagccatttgggtgctaggaatataacacagtcctctggaagaacagccagtgctcaaacactgagccatctctacagccaaaatgtagatagatatcttaaccatcagcagaattgctttttatgatctatttgtttttaagagttcctcttcatgaatggagagtgctgttctgcttctgtttaaaactgaggacatttactgcacgtagtctttctactgccttctccactgttactgttctaaattccctttcagagtttctttccattctaagtaactttccaattgtaacacttcttgactcatcccctggctctctccctgtgccatcttcatttgaatgttgcatatcagtttgtgtctgccaatcatgctaattcttttaataaatctggtagctttcttataaagagtgtttctatttttttttctgtagaattattttctctttgatagctgtaattatatttcttcctttccaatctgactccccccgcaccccctggattgtactgtcatgaaagtctagggtggagcctggtgggaatggtgagagctgcctcctctgtcttgattgctttcccaggggaagcttgaaccctgggtgtgctggttggagttagatgttatttaccacagcgagcgacagccttttctagtcttactttgctgagatcctttattctataaggatattggatcttggcaggaacttttcaacgtttgttgtgattaccgtgtttccccgatttattttttgtgtgaatttcacttactgatgatgtctgtctgttcagtgacccttggaatcctgcagtagatgctgcttgatcacaaagcactgctgtgtttgtttgttctttttgttttttaaacatatcattatattcagtttgcttattgttgagaattttgcatctgtattgatcaaggggcagtagagtgctgtgtgtgtcgtgtttcttataactgtggttctgatattaggatgctgttgactaagaatgatttccaggacaaaggatttatttagaacttattgatttttttaaaatgttcaatcagtagggaagctatttgggctgagaatcttctcttaactataaattcagtaaataaaaaattgtgctggctggctcttttgagtgagatttgattttgggtttcaagacattttttaatttaattttaatcatcaaatttactattctaaatttgtgagtgatctcttattgtttaaaattttgtattttgcatatttgaaattactgactccccaatcagtcttagtacagtttaccacttttaattttcttagtttttgttttactgatttttatttctgttatttttttttgttttttgctttttgtattataccattccctttgcttgctttggttttatttaccaattttctggtttttcaaggtagctgcttacattaatttaaaatctatttctatgtaggctcttacctcacatttccttataagtactgttttagctataatattgaactttggatatgttttcattttcatcaattttgaaatatttaataatttctctcttgatatcacttcagaaccagtggatcacctaaaaatgtcttgctgtttttaaacatatttggagccacccagagccctgcttgccatcggtttttacttaccttgctgtccagaggtcgagcttcctgggctttgagtccttttagatgtccagtgagtttgcctcatgatccaattgcagtgtattttgataaacaccctattattaaggagcatattctataaatgttgtaataaagtacttgaaaatgttaaactattttagttaacaatctttatttggggctggagagaaggctgggtggctgggagcacttgtttctcttccagacgacccaggtttggttcccattatctaaagggcactcacaagcatttgtaagtccagttccagttccaggcattctgacaccctccctggcttgcatgtggtgtacatccatatgcccaggcaaacacacacatacataaaataacaataaatgcatctttaaaaagattaactgtgtttatctttttatagtatgccatatatgtgtatgcatttaaacatgtttggagacatccaaagctctttctcccaatatgtatgtatacacacaaacacacatgtgtatatataaaacatatatatttagcattttttatgagtatatattttggttttctgtgtgtgtgattttactttaccagggttttgttctctcctcatcctcctgctcatttgtaatgtgatcttgatgcaaagcatggagtctgactcctatcgagggctgtcccgaataacttggaaacatatagcagtgctacatgaatttggggacagggtcacacagggccactgggactcacctggctgtcctcagttgtttcatttctaggcattctttctcagattgctgtgtcctaacccacctgccagacttttttttttcccattttttattaggtatttagctcatttacatttccaatgctatcccaaaagtcccccataccccctccccccccactcccctacccacccactccccctttttggccctggcattcccctgtactggggcatataaagtttgcaagnnnnnnnnnnnnnnnnnnnnnnnnnnnnnnnnnnnnnnnnnnnnnnnnnnnnnnnnnnnnnnnnnnnnnnnnnnnnnnnnnnnnnnnnnnnnnnnnnnnnnnnnnnnnnnnnnnnnnnnnnnnnnnnnnnnnnnnnnnnnnnnnnnnnnnnnnnnnnnnnnnnnnnnnnnnnnnnnnnnnnnnnnnnnnnnnnnnnnnnnnnnnnnnnnnnnnnnnnnnnnnnnnnnnnnnnnnnnnnnnnnnnnnnnnnnnnnnnnnnnnnnnnnnnnnnnnnnnnnnnnnnnnnnnnnnnnnnnnnnnnnnnnnnnnnnnnnnnnnnnnnnnnnnnnnnnnnnnnnnnnnnnnnnnnnnnnnnnnnnnnnnnnnnnnnnnnnnnnnnnnnnnnnnnnnnnnnnnnnnnnnnnnnnnnnnnnnnnnnnnnnnnnnnnnnnnnnnnnnnnnnnnnnnnnnnnnnnnnnnnnnnnnnnnnnnnnnnnnnnnnnnnnnnnnnnnnnnnnnnnnnnnnnnnnnnnnnnnnnnnnnnnnnnnnnnnnnnnnnnnnnnnnnnnnnnnnnnnnnnnnnnnnnnnnnnnnnnnnnnnnnnnnnnnnnnnnnnnnnnnnnnnnnnnnnnnnnnnnnnnnnnnnnnnnnnnnnnnnnnnnnnnnnnnnnnnnnnnnnnnnnnnnnnnnnnnnnnnnnnnnnnnnnnnnnnnnnnnnnnnnnnnnnnnnnnnnnnnnnnnnnnnnnnnnnnnnnnnnnnnnnnnnnnnnnnnnnnnnnnnnnnnnnnnnnnnnnnnnnnnnnnnnnnnnnnnnnnnnnnnnnnnnnnnnnnnnnnnnnnnnnnnnnnnnnnnnnnnnnnnnnnnnnnnnnnnnnnnnnnnnnnnnnnnnnnnnnnnnnnnnnnnnnnnnnnnnnnnnnnnnnnnnnnnnnnnnnnnnnnnnnnnnnnnnnnnnnnnnnnnnnnnnnnnnnnnnnnnnnnnnnnnnnnnnnnnnnnnnnnnnnnnnnnnnnnnnnnnnnnnnnnnnnnnnnnnnnnnnnnnnnnnnnnnnnnnnnnnnnnnnnnnnnnnnnnnnnnnnnnnnnnnnnnnnnnnnnnnnnnnnnnnnnnnnnnnnnnnnnnnnnnnnnnnnnnnnnnnnnnnnnnnnnnnnnnnnnnnnnnnnnnnnnnnnnnnnnnnnnnnnnnnnnnnnnnnnnnnnnnnnnnnnnnnnnnnnnnnnnnnnnnnnnnnnnnnnnnnnnnnnnnnnnnnnnnnnnnnnnnnnnnnnnnnnnnnnnnnnnnnnnnnnnnnnnnnnnnnnnnnnnnnnnnnnnnnnnnnnnnnnnnnnnnnnnnnnnnnnnnnnnnnnnnnnnnnnnnnnnnnnnnnnnnnnnnnnnnnnnnnnnnnnnnnnnnnnnnnnnnnnnnnnnnnnnnnnnnnnnnnnnnnnnnnnnnnnnnnnnnnnnnnnnnnnnnnnnnnnnnnnnnnnnnnnnnnnnnnnnnnnnnnnnnnnnnnnnnnnnnnnnnnnnnnnnnnnnnnnnnnnnnnnnnnnnnnnnnnnnnnnnnnnnnnnnnnnnnnnnnnnnnnnnnnnnnnnnnnnnnnnnnnnnnnnnnnnnnnnnnnnnnnnnnnnnnnnnnnnnnnnnnnnnnnnnnnnnnnnnnnnnnnnnnnnnnnnnnnnnnnnnnnnnnnnnnnnnnnnnnnnnnnnnnnnnnnnnnnnnnnnnnnnnnnnnnnnnnnnnnnnnnnnnnnnnnnnnnnnnnnnnnnnnnnnnnnnnnnnnnnnnnnnnnnnnnnnnnnnnnnnnnnnnnnnnnnnnnnnnnnnnnnnnnnnnnnnnnnnnnnnnnnnnnnnnnnnnnnnnnnnnnnnnnnnnnnnnnnnnnnnnnnnnnnnnnnnnnnnnnnnnnnnnnnnnnnnnnnnnnnnnnnnnnnnnnnnnnnnnnnnnnnnnnnnnnnnnnnnnnnnnnnnnnnnnnnnnnnnnnnnnnnnnnnnnnnnnnnnnnnnnnnnnnnnnnnnnnnnnnnnnnnnnnnnnnnnnnnnnnnnnnnnnnnnnnnnnnnnnnnnnnnnnnnnnnnnnnnnnnnnnnnnnnnnnnnnnnnnnnnnnnnnnnnnnnnnnnnnnnnnnnnnnnnnnnnnnnnnnnnnnnnnnnnnnnnnnnnnnnnnnnnnnnnnnnnnnnnnnnnnnnnnnnnnnnnnnnnnnnnnnnnnnnnnnnnnnnnnnnnnnnnnnnnnnnnnnnnnnnnnnnnnnnnnnnnnnnnnnnnnnnnnnnnnnnnnnnnnnnnnnnnnnnnnnnnnnnnnnnnnnnnnnnnnnnnnnnnnnnnnnnnnnnnnnnnnnnnnnnnnnnnnnnnnnnnnnnnnnnnnnnnnnnnnnnnnnnnnnnnnnnnnnnnnnnnnnnnnnnnnnnnnnnnnnnnnnnnnnnnnnnnnnnnnnnnnnnnnnnnnnnnnnnnnnnnnnnnnnnnnnnnnnnnnnnnnnnnnnnnnnnnnnnnnnnnnnnnnnnnnnnnnnnnnnnnnnnnnnnnnnnnnnnnnnnnnnnnnnnnnnnnnnnnnnnnnnnnnnnnnnnnnnnnnnnnnnnnnnnnnnnnnnnnnnnnnnnnnnnnnnnnnnnnnnnnnnnnnnnnnnnnnnnnnnnnnnnnnnnnnnnnnnnnnnnnnnnnnnnnnnnnnnnnnnnnnnnnnnnnnnnnnnnnnnnnnnnnnnnnnnnnnnnnnnnnnnnnnnnnnnnnnnnnnnnnnnnnnnnnnnnnnnnnnnnnnnnnnnnnnnnnnnnnnnnnnnnnnnnnnnnnnnnnnnnnnnnnnnnnnnnnnnnnnnnnnnnnnnnnnnnnnnnnnnnnnnnnnnnnnnnnnnnnnnnnnnnnnnnnnnnnnnnnnnnnnnnnnnnnnnnnnnnnnnnnnnnnnnnnnnnnnnnnnnnnnnnnnnnnnnnnnnnnnnnnnnnnnnnnnnnnnnnnnnnnnnnnnnnnnnnnnnnnnnnnnnnnnnnnnnnnnnnnnnnnnnnnnnnnnnnnnnnnnnnnnnnnnnnnnnnnnnnnnnnnnnnnnnnnnnnnnnnnnnnnnnnnnnnnnnnnnnnnnnnnnnnnnnnnnnnnnnnnnnnnnnnnnnnnnnnnnnnnnnnnnnnnnnnnnnnnnnnnnnnnnnnnnnnnnnnnnnnnnnnnnnnnnnnnnnnnnnnnnnnnnnnnnnnnnnnnnnnnnnnnnnnnnnnnnnnnnnnnnnnnnnnnnnnnnnnnnnnnnnnnnnnnnnnnnnnnnnnnnnnnnnnnnnnnnnnnnnnnnnnnnnnnnnnnnnnnnnnnnnnnnnnnnnnnnnnnnnnnnnnnnnnnnnnnnnnnnnnnnnnnnnnnnnnnnnnnnnnnnnnnnnnnnnnnnnnnnnnnnnnnnnnnnnnnnnnnnnnnnnnnnnnnnnnnnnnnnnnnnnnnnnnnnnnnnnnnnnnnnnnnnnnnnnnnnnnnnnnnnnnnnnnnnnnnnnnnnnnnnnnnnnnnnnnnnnnnnnnnnnnnnnnnnnnnnnnnnnnnnnnnnnnnnnnnnnnnnnnnnnnnnnnnnnnnnnnnnnnnnnnnnnnnnnnnnnnnnnnnnnnnnnnnnnnnnnnnnnnnnnnnnnnnnnnnnnnnnnnnnnnnnnnnnnnnnnnnnnnnnnnnnnnnnnnnnnnnnnnnnnnnnnnnnnnnnnnnnnnnnnnnnnnnnnnnnnnnnnnnnnnnnnnnnnnnnnnnnnnnnnnnnnnnnnnnnnnnnnnnnnnnnnnnnnnnnnnnnnnnnnnnnnnnnnnnnnnnnnnnnnnnnnnnnnnnnnnnnnnnnnnnnnnnnnnnnnnnnnnnnnnnnnnnnnnnnnnnnnnnnnnnnnnnnnnnnnnnnnnnnnnnnnnnnnnnnnnnnnnnnnnnnnnnnnnnnnnnnnnnnnnnnnnnnnnnnnnnnnnnnnnnnnnnnnnnnnnnnnnnnnnnnnnnnnnnnnnnnnnnnnnnnnnnnnnnnnnnnnnnnnnnnnnnnnnnnnnnnnnnnnnnnnnnnnnnnnnnnnnnnnnnnnnnnnnnnnnnnnnnnnnnnnnnnnnnnnnnnnnnnnnnnnnnnnnnnnnnnnnnnnnnnnnnnnnnnnnnnnnnnnnnnnnnnnnnnnnnnnnnnnnnnnnnnnnnnnnnnnnnnnnnnnnnnnnnnnnnnnnnnnnnnnnnnnnnnnnnnnnnnnnnnnnnnnnnnnnnnnnnnnnnnnnnnnnnnnnnnnnnnnnnnnnnnnnnnnnnnnnnnnnnnnnnnnnnnnnnnnnnnnnnnnnnnnnnnnnnnnnnnnnnnnnnnnnnnnnnnnnnnnnnnnnnnnnnnnnnnnnnnnnnnnnnnnnnnnnnnnnnnnnnnnnnnnnnnnnnnnnnnnnnnnnnnnnnnnngatttcttcaggatctgttgttatgtctctcttttcatttctgattttgttaattaggatgctgtccctgtgccctctagtgagtctggctaagggtttatctatcttgttgattttctcaaagaaccagctcctcctttggttgattctttgaatagttcttcttgtttccacttggttgatttcacccctgagtttgattatttcctgccctctactcctcttgggtgaatttgctttctttttttctagagcttttaggtgtgttgtcaagctgctagtgtgtgctctctctagtttctttttggaggcactcagagtcatgagttttcctcttagaaatgctttcaatgtgtcccataagtttgggtatgctgtggcttcattttcgttaaactgttaaaaagtctttaatttctttctttattccttccttgaccaaggtatcattgagaagagtgttgttcagtttccacgtgaatgttggctttctattacttatgttgttattgaagataacatggtgatctgataggatgcatgggacaatttcaatatttttgtatctgttgatgcctgttttatgaccaagtatatggtcaattttgaagaaggtaccatgaggtgccgagaagaaggtatagccttttgttttaggataaaatgttctgtagatatctgttaaatccatttgtttcataacttctgttagttttactgtgtccctgtttagtttctgtttccacgatatgtccattgatgaaggtggtgtgttgaagtctcccactattattgtgtgaggtgcaatgtgtgctttgagctttactaaagtgtctttaatgaatgtggctgcccttgcatttggagcatcgatattcagaattgagagttcctcatggaggattttacctttgatgagtatgaagtgtccctccttgtcttttttgataactttgggttggaagtcaattttattagatattagaatggctactccagcttgtttttttcagaccatttgcttggaaaattgttttccagcctttcattctgacgtagtgtctgtctttttccctgaggtgggtttcctgtaagcagcaaaatgttgagtcctgtttgtgtagccagtctgttagtctatgtctttttagtggggaattgagtccattgatattaagaggtattaaggaaaagtaattgttgcttcctattatttttgttgttagagttggcattctgttcttgtggctgtcttcttttaggtttgctgaaggattactctcttgcttgtggtttctgtccttgtattgtttttttttttttcctgttattatcctttgaagggctggattcgtggaaagataatgtgtgaatttggttttgtcatggaatactttggtttctccatctatggtaattggaagtttgctgggtatagtagcctatgctggcatttgtgttctcttagtgtctgtataacatctgtccaggatcttcagactttcatagtctctggtgaaaagtctggtgtaattctgataggcttgcctttatttgttacttgaccttttttcccttactgcttttaatattctatctttatttagtgtacttgttgttctgattattatgtgtcaggaggaatttctttcctggtccagtctatttggagttctgtaggcttcttgtatgttcatgggcatctctttctttcggtttgggaagttttcttctataattttgttgaagatatttgctggccctttaagttgaaaatcttcattctcatccactcctattatccataggtttggtcttctcattgtgttctggatttcctggatgttttgagttaggatctttttgcattttgcattttctttgattgttgtgtccatgttccctacagaatcttctgcacctgacattctctcttccatctcttgtattctgttgctgatgctcacatctatggttcctgatttctttcctagggtttctatctccagtgttgcctcactttgggttttctttattgtgtctacttcccttttgaggtctagtatagttttgttcatttccatcacctgtttggatttgctttcctgtttttctttaaggacttctacctgtttgattgtgttttcctgtttttctttaaggacttgtaagtcaagcagtgttctcctgtatttttttaattgagttattaaagtccttcttaatttcctctaccatcatcatgagatatgcttttaaatccgggccaaggttttccggtgtgttggggtaggactgggtgaggtgggagtgctgggttctgatgatggtgagtggtcttggtttctgttagtaagattcttacttttgcctttagccatctggtaatctctggagttagttgttatagttgtctctgtttagagcttgttcctcccttgattctgttagcctgtatcagcagacctgggaaactaactctctcctgagtttcagcggtctgagcactctctgcaggcaagctctcctcttgcaggaaaggttcacagatatctggcgttcggacctgcctcctggcagaatatgaaggcctgaaacagggcctatccagaagctgttagcttctgtagtccacactctcacctgtgcagactagtctcagagggatacaggaaccaagatggcttctccaggtgctccagcaacgccctcctgggtggggagaacacctgtcctctggcatggaaggtgcccggatgtctggaacccgaaatggggtctgcctcagaagctgtcctctagacatcttgggggtgtcctccgactcctcgcccaagtgacccagtgctggcgccgaccagaaggggcttgtgaccctggtcaggccgggttttctgcttccctaatgctgtctcaggtcccatgtgattggaatggaacagaagttgtgttccactcaccgttggtcctaagatcccatggatagtcctctagggaccttggggggtgtctgcggactccatgcccaaggtgaccaggtgctggcgccgactggaagggacttgtgaccctggtcaggctgggttttctgcttctctaatgctgtctctggtccagcgcgattggaatggaacagaagtagtgttccactcactggtggtcctaagatagcatggagagtcctctagggaccttggaggggggggttccacttttgtttttcctcagctagttatgtctttcttaggccacttgtcctcaaggtagggcatgcttcttcatatgtatcttttaatttgtgtctattcatttatctcagcatctcagtatcagtaaagatcaaaacatttgcaaattacattaataaaaaaatgagaggctttaaatttgttccagtctgagtagattacattgttggtgaattgttgcagtacaatttgcagagttttagaaggatgttgcttgtgaccctcctttctccttttatttaaaaaaaaaattagaaagatttatagtaattaaagtaaccacaatgtcatccagtggtaaaagagccatttaaagcatatttgctaagacttttatttttaaataaactagaatgttaacgttttcctatctggttattaacttgaaactcccatgaaatctctttttccagagcagcatctgagacacgtcgagaaagatgttctgatcccaaagataatgagagaaaaggccagagaaaggtgctccgaacaagttgaaggtaagattcatacattcatacagagatcaaactcatttatgataatatgatgtgaatttaatccctagcctcaaagtcaagtcgagtgaattaatatgtatgagttgcttctcacacttacactgagattctagcatcgcagcctcagacttccagtcagtcttctgttcatttacaatttaaaagcatccccccaacccaggaacaaaaccccttcttcctggaagtgtagttttatagggaaaaacttgatgtgagtgttcaggagaaactagttattctgttaattttgagagaggaagaagaagcatcaaacttaacatggacctgggaggaagctgccagcctgctgtaatgtgtgcacacacagactcactgtcagcatgttgtaatgtgtgcacacacagactcactgtcagcctgttgtaatgtgtgcacacacagactcactgtcagcctgttgtaatgtgtgcacacacaggctctctgccagcctgctgtaatgtgtgcacacacaggctcactgccagcctgttgtaatgtgtgcatacacagactcactgccagcctgttgtaatgtgtgcacacatgctcatagccagcctgttgtaatgtatgcacacacagactcactgtcagcatgttgtaatgtgtgcacacacagattcactgtcagcatgttgtaatgtgtgcacccacaggctaacagccagcctgttgtaatgtgtgcacacatgctcatagccagcctgttgtaatgtatgcacacatgctcacagccagcctgttgtaatgtgtgcacccacaggctcacagccagcctgttgtaatgtgtgctcacatgctcacagccagcctgttgtagtgtgtgcacacacaggctcactgtcagtctgctgtaatgtgtgcacacacaggctcgctgccggcctgttcacacaggctcagtgctggcctgttgtaatgtatgcacacacaggctcactgtcagcctgttgtaatgtgtgcacacacaggctcactgccagcctgctgtaatgtgtgtacacaggctcactgtcagcctgctgtaatgtgtgcacacacaggctctctgccagcctgttgtaatgtgtgcacacacaggctcactgccagtctgctgtaatgtgtgcacacacaggctcactgtcagcctgttgtagtgtgtgcacaaataggctcactgtcagcctgttgtaatgtgtgcacacacaggctctctgccagcctgctgtaatgtgtgcacacacaggctctctgccagcctgttgtaatgtgtgcacacacaggcttattgccagcctgttgtaatgtgtgcacacacagactcactgccagcctgttgtagtgtgttcacacacaggctcactgccagcctgctctaatgtgtgcacacacaggctcactgtcagcctgttgtaatgtgtgcacacacaggctcactgccagcctgctgtaatgtgtgtacacaggctcactgtcagcctgctgtaatgtgtgcacacacaggctctctgccagcctgttgtaatgtgtgcacacacaggctcattgtcagcctgctgtaatgtgtgcacacacaggctcactgccagtctgctgtaatgtgtgcacacacaggctcactgtcagcctgttgtagtgtgtgcacaaataggctcactgtcagcctgctgtaatgtgtgcacacacaggctcactgccagcttgctgtaatgtgtgcacacacaggctctctgccagcctgctgtaatgtgtgcacacacaggctctctgccagcctgctgtaatctgcgcacacacaggctcactgccagcctgttgtaatgtgtgcacacacaggcttattgccagcctgttgtaatgtgtgcacacacagactcactgtcagcctgttgtagtgtgtgcacacacagactcactgtcagcctgttgtaatgtgtgcacacacaggctcactgtcagcctgttgtaatgtgtgcacacacaggctctctgccagcctgctgtaatgtgtgcacacacaggctcactgccagcctgttgtaatgtgtgcatacacagactcatgccagcctgttgtaatgtgtgcacacatgctcatagccagcctgttgtaatgtatgcacacacagactcactgtcagcatgttgtaatgtgtgcacacacagattcactgtcagcatgttgtaatgtgtgcacccacaggctcacagccagcctgttgtaatgtgtgcacacatgctcatagccagcctgttgtaatgtatgcacacatgctcacagccagcctgttgtaatgtgtgcacccacaggctcacagccagcctgttgtaatgtgtgctcacatgctcacagccagcctgttgtagtgtgtgcacacacaggctcactgtcagtctgctgtaatgtgtgcacacacaggctcgctgccggcctgttcacacaggctcagtgctggcctgttgtaatgtatgcacacacaggctcactgtcagcctgttgtaannnnnnnnnnnnnnnnnnnnatgtgtgcacacacaggctcactgccagtctgctgtaatgtgtgcacacacaggctcactgtcagcctgttgtagtgtgtgcacaaataggctcactgtcagcctgctgtaatgtgtgcacacacaggctcactgccagcttgctgtaatgtgtgcacacacaggctctctgccagcctgctgtaatgtgtgcacacacaggctctctgccagcctgctgtaatctgcgcacacacaggctcactgccagcctgttgtaatgtgtgcacacacaggcttattgccagcctgttgtaatgtgtgcacacacagactcactgccagcctgttgtagtgtgttcacacacaggctcactgccagcctgctctaatgtgtgcacacacaggctcactgtcagcctgttgtaatgtgtgcacacacaggctctctgccagcctgttgtaatgtgtgcacacacaggctcactgccagcctgttgtaatgtgtgcacacacaggcttattgccagcctgttgtaatgtgtgcacacacaggctcactgtcagcatgttgtaatgtgtgcgcacagactcacacagtgacggtttccttcagtgccacattactgcattatgaggagtatcttgcttgaactcgaagtgcatcagaatttgctttgtgtgtgctctgaagtagaagttacttatgtaaatccatgtaggagcacccacacatgcatgtctttgaaaatgattttcacaatactgttcctgtgtgtagtaattttaggaacattgttgattgatatgtaactaaaaggtacatacagtgatagtggtaactaaaatggggccgtcataggtctgtagtcagtgggctgtcagaaaagtaccttagaaacgtctttaagcataatttacctctggaatggtcattttaaaaaagcagtaaagtgcttttttaaaggtggtggcgcacacctttaatcccagcacttgggaggcagaggcaggcggatttctgagtttgaggccagcctggtctacagagtgagttccaggacagccagggctacacaaagaaaccctgtctcgaaaaacaaaaaaaacaaaaaaacaacaacaaaaaaaagcagtaaaattttgctaatggagctggggagattgctcagtggttaaagagcactggttgctcttgcagagacccagggtgtcccagcactcacatggatgctcacagtagtctgggactccagtctcagggcatctgatactcttttgaattgttgggcaagagaaatatatgccacacacagatgttcttacagacaaaaccctcctaacatacaaataaaaataaaccgaagctgcttgctccctccgtccctccctccttccctccctccctctctccctttctctctttctctctctctctctctctctccctttctctctccctctctctccctttctctctctctctctctctctctctctctctctctctctctctnnnnnnnnnnnnnnnnnnnnnnnnnnnnnnnnnnnnnnnnnnnnnnnnnnnnnnnnnnnnnnnnnnnnnnnnnnnnnnnnnnnnnnnnnnnnnnnnnnnnnnnnnnnnnnnnnnnnnnnnnnnnnnnnnnnnnnnnnnnnnnnnnnnnnnnnnnnnnnnnnnnnnnnnnnnnnnnnatccccttccccctttccctttgtccaagcacggtagtaatttttagtgagagaatttgagtcacagatcattgcaggtttctttctggggactcagactgtgtcaactagagttttatgactgtcaaaaagtgaatgtgctagggaccttttctcctcctccttcagccttggaattgacttgtgcaatccagtggaggtcgtaagacaggaatagtccctgtggtagccttgtgctgcttgtattgagtgatttgtatgactcctatatttgaaatcctctatcaattagtaatttaaaagtcatcctgtgatattgctcttgctttcactggagattagctgtttaatcagggcaccttccttcagctctcccaccccaggtgtcaggagaaattagcccattggcacctgcagggttcagggcacatctggcattggcaggtgtcacactaacaatcccaagaggcagctttccacttgcctcatgggacttttcaaaccacatcctcattcaggcgatgcaggggaaatctcgaaagtgtaataaagtattggagtaaaactcgccactgctggggaaatacaattgttacgagaacccccaacccagactgtgcacttttctttctttcttttctgttttttagcccactgtcctgtgacaccttgagtgcaggaaatctagctaagtgctctctgttaattttcctggtatgattctgatgaaaatgcaaaataactgcatgactttgtgtttctgtgttgaactttgttttagaaggtgaaactgtttcggtttctgaggaaaagagaagactataaagtacctgtgccttacaaagattacatcatagtggtggaaaataatgccggttcaagttttgtcaaaaattgagctaagatttggttatagattttgttaagattggttgtaaaacatttcagtgttttgactagtagatagctcgatggcagtgctgtttgccactaagcttgagggcctgaattcatctccaggtcccacaagttgtcctctgacctctggaaatcactccttgacacataagcctgcacacacccctacacacacaaaacatgcacatgtacaacaaataggcaaataactataaaaacacttttaaaaaagcatctaaagccgggcgtggtggcgcacgcctttgtcccagaacttgggaggcagaggcaggcggatttctgagttcgaggccagcctggtctacaaagtgagttccaggacagccagggctatacagagtctcgaaaaaaacaaaacaaaactaaacaaaaaaagcatcttagaatttgagattcatttagattattttaataattttctattactagaaagtatgctgtgattgatttttgagtatttaaatattgactttgtaaaggctgttcccaagaaagtgtttagaaggtaaaattattttatggacacataattttccttagtcttcatctgctcccaggacagtgcctgctagtgttagtcccgccctcagggctcacaggttggagccagagcattgtcatttatgtatgcttatggtctgcttattaaatgattataggagttcacttaggaccattccatatgctaattgtgtggctcctggataaagatagaggaattttaataagccatctgactttctgctaaatgcctgaaacattgctgcggaggagagcttttctgttttttttttttttttttttttttcacgtcttttcagcccagctggttgtaagaatcaggtcagactgccagcagcttgggtttatgaaggagctagaagcttttctagggacagagagatgaatcactctcagtgagagccgtgtgccttgctagagtcaccagcagcagccattgacagctacacttcctattaacagggagcgtttaactaagagtttgcctgttggatctttggacttgatctaatttgctagcattaattagtttcctttgagcacagacacttggtactcacagctatagatttggagggctaattagggtacaaaattgaacagaatggggtaaggcattaaccttcaaccattaccagctgggacactgataaagaccacagagtccaaatggctctattgatgtgaagagtaccctaatgaatatcagtttcagcaggttgctgtgttcttaccagcgctcgcttcactatgctttctaaccagcttctgcagaacctttgttatctatgcactgttgggcttcgctgtctcctgatttagtccaggtcgcacaattcatctgaggcttagagcaataaaactgcctttaagcaatagctaacaatgaaaatgtttcactattgcattttcaagtaataaaatttaatatacagttatgtgattctgattctgtgtacccctctaaatgctgagattaaaggtgtgtgtcaccatgcctggctgtatatttgtacgctggacatgatggtgcatgtctggaaatcccagtgcttaggagatggaggctagtgtatccagagttttacactaacatatggtatagagtgaaaccctgtctaaaatgtgtgtgcatgcatgtgcattttacacatgtataaagtaagaagcacaaaagcgtgtgtgcgtgtctgtgtgcgtgtgtgtgtgtgtgtgtgtgtgtgtgtgttttctagaaatgtactacctaccatctttaccttggaactttgatttgattatgtaagaggagttgatatagaggctaaatagaaacagagaattctgatcttatttgtgtaagcgttgacaagtttgtaacacttttatatcaaaagaaacctcaactttatagcagccctcctctgccagcaagctggccccacctcacagcacccaggatgggactgatgggaaaccccaggggatgactgtctggacacacccctcccccaagcccaatcagaactccttcttgacacctgatgaggaggcctcatggctccttcagtaatggttctagaatggctagctgttttcaggagaccatgattaagttccttgtaatgtttccagtgtatagttgacatttgataaaaatttaccatgttgcgtcgtgatgtttgttttaaaaataataacactttttcttttactatcaagataaaaaaaaatcttgtttcaggaatggcctataattctctttaactgagctttgggtcttcttttaccatgttttaacctgtgtttgtgtggacgtcatcttgatcttttttggccagaaagtggagatgcagtctaaaggaacaaacataattcaccaagcagtatggcttgctgtgtgcttggaacacggttagagcagtacagtacaggatgctacagtacagtacaggatagacaacagtatgtatgtagcagagaagctgatagacggcctgccttctcctgtcacccacggctgaaacacaagcttatttccgactatagcggtgtgtgagcagacataggagcatgtgagaacctcgttaggaagtttgcagggagaatagtctgaggagcattgagtcacatgcggtgaacactgcacgtatgtgattacccatctctcttaactgcattgcttgaaggtacccgtacctttgctttcctttgtggtttaacctatatgtttaccatactgcatttgtcatactgtctgtgttcttaccacttcgatctgtttgccagtcttaactggcatggaaggggagctgaaacacaccttcagactgtcagcatgtgctaggagagtcatagatcactggtacaatgagcgtcttttctgtatctgacgatgctggttaagagttacagatagatgtagagttgtgttgatgctcgtggctctgtctaccagggaagtttactaaagactccatccgctgaatttttcctgcgtgttaggtttgtgggcggctgctgtgtagcaggtaccatgattgtttgcacaggccccttgagcttactaagccactccatcagttgcagagtggtggggacatgcgccacatccaggttctcagatgggagatgagagcagcctcgactctgagccctcctgggacggctgcagcgccaggtacgctgttacctctgttctgccaatggacgcaaggaaagttaattagcagcattcttgccttgcttacgaggcctaatgttatacaactgattaatttatacaataactgaaaagagacaagggtggtcattgctcattgacctagttgttgcaattgtaagctcaggcctccactgtcagccttatggcttattgtgattggtgtatgtaattagacatggatacccttaaatattgtggtttcagaagtaaatgacagcgtttaatacttttaatatttagatgagtctattaacaagggactcttgtgtaagcagctgtttaatattttgtttacttgtttatgtctgtgttatatggttggtacatgtgtgtgtttatgggaaggagtaagtaagcatgcgtgtgtgtagatttgtacatatggaagaaaagggggtggcttctactaaatgggtaagactagctggtcccaagtaccagtgacccagtgctagcatgtggcagcatagctggctttttactatggatgctgggatcctaacgcagctcttgacacttgttcagcaagctcttcactgctgtgctgcctcccagccgtgaatacaatattctaaacaaatgatgtgtgcggctaatccttgaggataaatgtctgtgtggaaagcctacatttgaactcagcagcagagaaatgcatgtcgtaaacttgcctgcgttgctacagtgaatgagcatcattataaaatatgatgccgctttatgccactacttcattaacaagtttttattatcctggtactcctaaacaccaacttttaattattttcttgtaatagacttaaatcctttcatcttctgagaaattaatccaaaattagttatagtctttaaacagtgctgcagccttgtatttaaaatctgttaaagatcacgctttccttgtgctacctgatggcccccgccgggattgcgttcttcccagggagacacagcccaccacttggaaattggtattatgactaaaatatagtgtaataagaaatcttgtctatctgttcaaaatgataaagagacttttgatttctccagaactctaaaatatatcaaccagaataaatagagccacttaagagtcatgtttctgtgcacacagtaaatgcacagtaaatacgccttattgcttggtggggagacagtggccgtggggagttgtcactgagggctgacccaggacagcaccgatggtgacgtctgctctgctcggtcactgcatgaagtgctggttcacagcacacacctgcagtgctgatcatgtgactcatgaggccaaaggctgtaggtgcttcatgaaaagactttcttaaccacagtttaattaaattttttaaaatttaagaatgtaagaaggatttactaaaataactaataatgaacatttattatataccaagctatgtgtataatgtaaatgtccatttaaatgtggctgaaaggggtttattccttattgttctggagtgcataagagacacatagtatggcaagagatgatcatcaagtaaataattacaattatgataaatgctacaagtagtgatgtcatgagaaaacataagtagctatttctaaatgccgataatgctgacgattgaaatttttcttttctaaattttctagaaatgtttttacacttatcaactgttttattgtaaaaaggtagtaagggccaaatatataatttaatatttttttagaacttaaaaagtataatgttgcttttaattcatagaattaaatttggaaatcgtgtgtgtgtgtgtgtgtgtgtgtgtgtgtgtgtacacatgcttaggcatgcacatgttgtcttgagacaggatctctcattgaacctgaagttcattgatttagatgagctgtctggccagtgagcccaggactcatgctgtctcctcctccccagagcgcacttctttgtcaggctttctcacgggtgctgaggattaaactctgctcctcataggtatgtagcacacacttcactgactgaggcatctctcagtgcccaagactaagtttaatagaattaaaaaaaaaaattcttgaatgtctaccagttgtagacattttctttaatgcctaccatatatgggaaatgccataaaagtaaaatacctaactaaaaaagcctgatacctaactagatctataccacatgaaatgtattcgtagtattcttagatattagtttaagggaaataaaagccagagcagttctggcgtaagcagggtctgaataaaatatttctagtgatttaggtaagtgtagggaagcaggataaacaccatttcagactggcagattctaggctgcaaggcattgcgggcgggcgggcatgctgtctctggggccgccaggcctgagctgcagtgaggcgtgggaaaggttatgtgtgagagctgactcagagtactgtttaaaaaaagcagaaggtggagtcttaacagaaatcaaaagcatatggattctcccttcttttatccaatcttcttctctctatttaattaaaaaaacaaaaaaacaaatagaattggttttaaaaacagtcttgctgtgtagcccagggaggacttgaaccacactccttgtgactcagcttcccaagtgctcagattgcaggcatgcacctccaagcttggctttactcgttatggaaagatcaaccttcagcagaatgctggacattgataacatgtttttaaattttggccctgtgcattcttttaaagctagattttgttgattagtagtggcaggcagtggtgtttgttcttttctcagatggaaagttttgggcttatgctcatgcattagctacaagatagcactgcctgcgatgtggtctttgattttcatagctatcctaggcgtgcattgttctttatcttctctaaagacttgatttgccaagatttgtcagatttctaaatgaagcattttaagtttctaaattctaagaattcttgtaggtttaagaattgctaaatgtggtggtttgaatatgctcggcccaggaagtggcactattactgggtgtggccttgttggaggaagtgtgctactgtgggcatgggctttaagacccttgccctagctgtctggaagtgagtcttctgtctgcctttggaaagagttgtagaactcaattccaaccacatcatgcctgcctggatgctgccatgcatcctctgaacctgtgagccagccccaattaaatgttgtccttatgagacttgccttggtcatggtgtctgttcacagcagtaaaaccctaactaagtcactaaataacattagcatatagtcaatagttcattattcatgatatcactttgtgaggtttaagttactaacatagctacaattcagtaatgttaaacagataggaactacccactcattagtgactcagtaatcttttcaagtactgactagcagtgcagtgcagtgctgtactcaagtgtcccttttagtaatgtccgcaaaatgtaggagtggtgttacaagaaggcagcaggctttgcatttggaaggcacattaacattggcacttatacagcactcagggcacgatagagggaaacttactgtctcataggtttccattctagctagagttgtgggcatccacaggtgtcttggaacttgtcccccatggggaaaggggagggtgggattacactgttatctgaagttattgacagctgatttctatgtatataaaattccatattgtcatgctgcccttccaattaatgtttaagtctgcattttaacaaccatgtattgtcgattttgatttattgcttgtattatgttaattggattcctaaaaacaagagaatcccacggggtccctgccccaagttggttctaattggtaaataaagttgccagctgcctatggctgggcagggagacagaggtgggattttagatttccccagcaggggaactgagggaagaagaaggatttagtactgccatgcctgggaagcagaaggaccaggcttgagagctgcagaagggaaagcatacaaccaagcaagcgctcaggaagacggccccagggaaccccactgattgggtctagggtagcagagatggaatatagagtttagtaaataataattcaggagtagtggcggggaggcattagcagtgtggaagtttgtgagtggcccagccattgagccacattgtgtgtgtgtgtctgtgtgtggtagcttcgaggagagaagcccggacccaccgggtctctccgggactgagccggatgagccggatggtgagtgttggtgacctgagacgagccaccctggccaggagtcttgtcgaagcaggaactttataatgtggcagcaatttgcttttatagacagggcaaggaggtggggatagaagtatggggtgagatgacttgtggagtagtgtgagatgagcctgtggggtgatctcaaggggcctataagaaattgatacatcagcagtagctaggcagaggcagtcattcaggtcaggtccattggccctgctgagtcattctcaaacaaatgacaggtctcaaaaatcaaaccaggcttgggtttgtcctcaaggcccaaaataaggccatatagggcccaacatgtgtgtgtgtgtgtgtgtgtgtgtgtgtgcctttcattggagaatccagagcattgggaacatgggtgtgccctgggtcaccatggggagattagagtagccaactacagcaacaatgtatcaaatgaatggtcatgtttgattgaactttttcatccctttgaggcttcaccataaccaagttcagttttaatgacagttgtgccaaacaacaacaacaacaaccaccaccaccaaactctgaacctctgttatttgatgcctttccacaattcaactatctgtactagcaaaggcttaggaaatctgatgtgacttggttaaagtattccacatcttcctacaggatttccaggtcatcccacacactgggttaagttccttttgacattgtgaacctcaccctgtgtttattaagaagagtttctctggttaggctgtttcatgtgatgttgtctaagctccaaggtcttcagccattcctccctccctggcttctgtcagcttgttctatggttctatgatttaccaggctttatctttggtggttgatttccttttcttctctccgtctctctcnnnnnnnnnnnnnnnnnnnnnnnnnnnnnnnnnnnnnnnnnnnnnnnnnnnnnnnnnnnnnnnnnnnnnnnnnnnnnnnnnnnnnnnnnnnnnnnnnnnnnnnnnnnnnnnnnnnnnnnnnnnnnnnnnnnnnnnnnnnnnnnnnnnnnnnnnnnnnnnnnnnnnnnnnnnnnnnnnnnnnnnnnnnnnnnnnnnnnnnnnnnnnnnnnnnnnnnnnnnnnnnnnnnnnnnnnnnnnnnnnnnnnnnnnnnnnnnnnnnnnnnnnnnnnnnnnnnnnnnnnnnnnnnnnnnnnnnnnnnnnnnnnnnnnnnnnnnnnnnnnnnnnnnnnnnnnnnnnnnnnnnnnnnnnnnnnnnnnnnnnnnnnnnnnnnnnnnnnnnnnnnnnnnnnnnnnnnnnnnnnnnnnnnnnnnnnnnnnnnnnnnnnnnnnnnnnnnnnnnnnnnnnnnnnnccctcccctccctctggaaactgctcatggtttgagtgctaaatttgttctattacatatatacaagttggtgatttaagattttcttttgggccttaatacatatagcttacaaggcattgtggtgcagatctgtaataccagcacctgagagactgaggcaggagaatcctgagttcaaggccagcctatacttggaggccctgtctttgaaaactgggtgaggaatagagttacctaaatgtgtaaggacctgactccaatccccagcactgcagaagacagcaatgcatggagactcgcttaccgtgttctcacagcctgttcctggctcattctgttgtcttgctctattgatacacacattttaaccttgtatatgcccagtttttgagtatatctaagagtatatcttgtatatgcccagtttttaagagtatatcttgtatatgcccagtttttaagagtatatctaagccggatgcacgcctttaatcccagcactcgggaggcagaggcaggcagatttctgagtttgaggccagcctggtctacagagtgagttccaggacagccagggctacagagaaaccctgtctggaaaaaccaaaaaaaaaaaaaaaaaagagtatatctaaattaggtagattctaaaataacctttgctaacttcatgttgaaacactaccacccagaaagaccaccaacctacacgacaaagcgctctgtactacacttccatgatgataaaacagcttcctccgcccatcagtattcagagtgccagcattgctccctcactggcgcatagtcagcagacttctcgattctttgaaggagactttgaaggaagaactctagtctgcattatgtttgggtagctcaggtagggttaattgcgattggaattggattcctcacccttttccctataaattttaacatgttatttaatggatgtaaagttatgcaaagcatttatattaaatagacttgttaagtctatctttcttatctggcacccgattcacactgagtgttaatactcaaatatccctttgtgatgcgttctcaggaataggcttctgtgccaagttcctcattcgtcagttctccgttaaagaatgtgttccttgtatatatcttcactaatgtatagggcatacccattttttctttccatttcctttttgttctaaaggacacggtccaggatgtaaggaagtaggtcatggtatctataaactggtgagaaaccaagtatgttatgaagtaaaaagtggagcttcattgccctctaggggttcagctttaacatagcccgtgttaaaaaagaggaggagagagatgtgctgcacagaggagcactgtcatctgtggactgtgactggttaacactgaaacctagtttacagtaattattacaagtgaaatcacacctaatgcttagtaatattttaattaaatgtcagcattcctaagcaaaccagaattttcaagaattatttgatgaccaacctatcatctagtgtatttaatgtactgtccatatcctgtaagagtccgaggagtaagggttgtaagactggggccggggtgtcatcaggaatgtgccggttggtttcagctattctcacgggcgtttcttctctcccctgtgggctctgtctacagctgcagagtttggaaagggaagcaatttgtttttccattattgaaagtattagctaaactttggctgtgtgagcagcacatactgagtttgtatgcagatatgttaatgtttcgaatatttaagcacatgtctatattggatgtgaaaattcatgtgcttattaacatttggaaaaaattttttgcgttaatttgtatgtatttagatttctaatccccgcaaggagcctagaaagctgtacagtgggtttctactgttaccaattatgagctgtgatatcaagtatcttaataagtagtatatagtattgcaatataaaaatacatttactttctctccaacccgtggtaaaaatagaggccgtcctgcaggatgggcagggctggtgccgtctgcatcccctgcccctttccttctaccaccgtgagttgaacataaggcattaagagctttcttggaaaattgtagatcttttcaaggatctaattgaaaataattttaagttttataattagtagtaaaaagaaatcttgaaccacagatgccgtgtcctgaataaatcttagaatattgaaacaaggaatctaaacatttaatcatgactaagaggaaaaattaaactttagctgactgccgggaaaagtagctttgtgttaaaagagttgcaatgaatattcttacatgctaaatctataaggctatgtctttctgattactagagtgtgtgttccaacttttaaaggaatagcctacattcaatccccaacagaggtttttgttttttatcccagctttacagtttccaagttttaagtgtgcatgctcacatccttctatggatgtgataagattctgtctagaagtcctgactgtgattataggttataagctatagcaagctatggtcacacataatatggactgcttgagtaagggctttcacagagaacattggcttaggagtctgtttcagaccatgctgtttttaatctctctattttcttttaaattgttgacaagtgccctttattcactgaaatatttaagccacttctaatttttagattctttgaggtggccttacttttttggttttcagtttaaacagatatagtctatagcatagttaactgtacatttaagtttttaaaatacaaaacttggagtgctctacgcatcattaaagaatattttaatgtttttgtgtttacttaaggaatagtactggcctcaatcatgaaaatattatgaaacccattggtaagcgtggtgaatatgtctgttttaattgtgtattttaattttgaacagtaccgattgactggctagcactgacattattttttgaaaccataaacgtattgcccgccccaccgtcaatgtagtatttttgatccatcttgcttattttccattatcactgttttaaaaacctctctgagctaaccacactcctaagattgtcaactgaattcttgtcatagttttatggcacaaaattggaaatgaaacagttttatcctacaaaacagttgtagagtgcttgctatcgctgaccttgagcagaagtgtgtccctaggctctcatggcggttgctctgcgaactccgagcctgggtgggaaggatctgtttactccacggttgctggcaacattcattcctcaggtctggccacttaggatttattccatgtagcggtatatgccaccaaaagctgttggctgagagagaacattttcaaagagacagacacagcctttcctagcatcctcatggaagtggcgacatagtcctgggttagatgccagtaaggagagttcacacatcctctctcctctctgggaggcgcttgccttggtggacacaggcacagggccctgggagctgcccagaggccgtttgccttcgcagctgccagccataccctgctttgttttcttccctgcttacagaagttgtcttgactcatttttataaaatgtctcacttgaattttacccttggctgcgcttcccttttgtgtttctgctgcattgttagcactgcaagggactgattttggcgttcaatctcttctcttatctttttcatctgttccttgaaggatagttttcccgaatttatgcatctaataaattcttatccagtgtgacagccgagatgctcctcttctcctaaggcatctttgcagagtggtcctgctgcttctgaagcagctagcctgatgctctttaacatttgccaccttttctggtctgtcctcccctgtgggctgttgtgagggctctggtgtactgagtactttctggaagcctagagggcataggggcaggagacagcacagtgtttctctttaatagcctttaggaaagacttttctttccccagaaggttacgtttggcttatcctctctaggaagtgtggagccctgaaaaatgacacccccggtggttttgctgagcctgcctaggtcttccggaggtgtgtaggaaagctcttgtatgcagtgcgttccctgtatttgtttccttctgttgagttttgagatttcctggtacctgccctgccctcagtgctttgctgagaatgaggaggatattaacgcatttcttaaaggcacatatcctaggaagtggaattggggccgaggtctattctgtcttctctgcccagagtctgcctctgatactgctctttgaggtttgtgacatgtggctctccacttagtatgtggcagcccgccaatatttattgttgaaaaaggtctttttgttttttattttttgttttttttttttttgtttttttaattaaacactgaggaaaactttatgcttttagtattttgcagtttttactcagatttatcttcacaatcttttgcctaacctgtccggttagcacacagactgtcttttctccatctggaagattttctttctcttctagcctcccctggaactctgtggctagttagatctttctgggatatgcagctcagtgacactcagcaccatgtgtaggattgagcctgaactcacattaaagccacacagcagtaggattcctctcttcctgtgcatgccccgtgaggtttgcaaggcctgctttgtccactgtggactcgaagtccgtctggggtctgtctctagaagtggatgtcgatgggctgtcccttcccaggatgtggccgatgctgaggtcgctgctccagctgccgtaggtttcatcattccctgagtcgttgtcaggcttatcgagtgacactttagttatttgcactgtccttgtgaaggtgcactttataccccccaggattattttgagtctcaagggagtcttcaccatggtcttctctgtgccagttgtgcacgtagtggtgtcctccaggacgcaaatcagtcactctgagggaagaggccacagtctgctcacgcttgcatctcttggtttcatgtaggtcattttcttctgcttgtctcagcaccgtgcgattgagatcagggcacatttgggcacacggtgggtgggatgcttggcaccgaagagaggcttttctttcaaaagagctgcgagtagacagtctgttttatgagagaggacaatgccgatgaaaagtttctcaagaaacattatcctcacatgatttaaaaggaagagctgtgaggagaggacagatgatgaatgtgggcttgctgtggttgagggcgttggttgagagggttggagctaggcggccttcaaagaaacatggctttgggtggtaggttctaggcttgcaatcaaaattcctttaatgtgtcttttgaaagtaccctttcttagtcaggagctggtggcacaacctttaaccccagtacttgtgaggcagaggcaggagaatctctgagttcaaagccagcctgctcttcagagtgagttcattacatccagggctacacagagaaaccctgccttgagaaatgctgcccaacctagtaaccaaccaaccaactgaataagtaaacgaatgcacctctaacttcagagccttatacagtcttatcatcgtggtgctgtggtcacagagagcatgctcttccccgccgtgtgcgtttctctgcagttgctttattagcttacagaatagtgagtgctatgtgccatagttcagggtggcttgtcctttctgttacacagaatgagtccctgtctgtcaacagtgtagggcaaacacgttattatctctcacttcttgtactaggcacagttgggagaatgttgtaataaggatttacaagtaagaggaagaacatgggaacagtgtcctggtgccctttgtggcagatgggctgtggggcacctatttgagattttaggagtctagctgctaggttaggtacggagactgtctgtgtacagtgttgtgaacaagggatgactccagaaaccttattgctgggtattcaggagtgccgcatggctgccagagccgtgaagtctgaaaacatgacaagctgaatttgcaagacatttgaaggttgtgcgatggttaagaannnnnnnnnnnnnnnnnnnnnnnnnnnnnnnnnnnnnnnnnnnnnnnnnnnnnnnnnnnnnnnnnnnnnnnnnnnnnnnnnnnnnnnnnnnnnnnnnnnnnnnnnnnnnnnnnnnnnnnnnnnnnnnnnnnnnnnnnnnnnnnnnnnnnnnnnnnnnnnnnnnnnnnnnnnnnnnnnnnnnnnnnnnnnnnnnnnnnnnnnnnnnnnnnnnnnnnnnnnnnnnnnnnnnnnnnnnnnnnnnnnnnnnnnnnnnnnnnnnnnnnnnnnnnnnnnnnnnnnnnnnnnnnnnnnnnnnnnnnnnnnnnnnnnnnnnnnnnnnnnnnnnnnnnnnnnnnnnnnnnnnnnnnnnnnnnnnnnnnnnnnnnnnnnnnnnnnnnnnnnnnnnnnnnnnnnnnnnnnnnnnnnnnnnnnnnnnnnnnnnnnnnnnnnnnnnnnnnnnnnnnnnnnnnnnnnnnnnnnnnnnnnnnnnnnnnnnnnnnnnnnnnnnnnnnnnnnnnnnnnnnnnnnnnnnnnnnnnnnnnnnnnnnnnnnnnnnnnnnnnnnnnnnnnnnnnnnnnnnnnnnnnnnnnnntccctccctccctccctccctccctccctctttctttctttctttctttctttctttctttctttctttctttctttctttctttctttctttcttcctagatttatttatttattttatgcatgtgagtacactgtagctgtcttcagacacaccagaagagggcatcggatcccattacagatggttgtgagccaccttgtggttgctgggaattgaactcagaactttgaaagagcagaatagaacttctgaaagagcagtcagtgctctttaactgctgagccatctctccagctctgaaagcttttcctttttataggaccgtgaaaccatggctttataagctggtgcagagtgaccctagggaactgccgagtgggctcacctcatggccacattctgtcttctgaggccccgtgctctgtcacagggttctgctcatgagtccctcatttatagctccaataactttatcttctacacagtctatctacagacactcctggcagagtatatggtacctatcggttgatgttcccatcataaacctgaatttcttgtattctttgcacatataattgtgcttatatttttctgggctaaaagttggattagatgtcttatgtgtattttgactcctaagatcatacaaaacattctttctgatatactcaatagcagaaaatatttagtgtttacaatagttttggcactccgtatttgaaccagatttttaaatttgttttgtactggaagtagacacttgtagagaaatgtagatgtttaaagcaatggtagtactcagactggcacgatttagagtcagaatctgttaaatctattgggaatatgccaggaatgtttcccaggctcagttttatcccctacactgaagacggaaagactgagagtaacatgtaagggcagcatagccacgagcaccgtcctgttcataaagtaggtgtgctgcttacctaccaaacaaatctctaggggctggaagtcacaggaagtatgctgcgtcagcagataggctggttcctgaaggagttttttaaaacagagacaggttaaaagtgtaacagaaggactgtgtagacactgagtactgtaaattaggacttaatgtgcttttaagttcataagtacaaggaaaaatttaaattgcaagaagaaatgaatggaaatgtacacaagttaaaggcaacatacaacagggttccaggagacccacgtttgttaagagcactgcagttacttttagaaacagaataaatcactttagccttacctctttgagttagaattttcatctgccctctattctatctgtcagacatctatcagctgccacctgcctctgctttgcagcgctgggaagtgtcaactgtgacctcatgttgctaggtacatgttctgtcactaagcagtttccagtcccatcttctctttagaaaatgcatttgtgttcattgacttgtgtaaagtagagcttcttgggacagactgtagcactaggtcagtcctccagcccatgggacagactgtagcactaggtcagtcctccagcccatgggacagactgtataacactaggtcagtcctccagcccatgggacagtctgttaacactaggtcagtcctccagcccatgggacagactgtataacactaggtcagtcctccagcccatgggacagactgtataacactaggtcagtcctccagcccatgggtcagactgtataacactaggtcagtcctccagcccatgggacagactgtataacactaggtcagtcctccagcccatgggacagactgtataacactaggtcagtcctccagcccatgggacagtctgtataacactaggtcagtcctccagcccatgggacagactgtataacactaggtcagtcctccagcccatgggacagactgtagcactaggtcagtcctccagcccatgggacagactgtataacactaggtcagtcctccagcccatgggacagactgtataacactaggtcagtcctccagcccatgggacagactgtataacactaggtcagtcctccagcccatgggacagactgtataacactaggtcagtcctccagcccatgggacagactgtagcactaggtcagtcctccagcccatgggacagactgtagcactaggtcagtcctccagcccatgggacagactgtagcactaggtcagtcctccagcccatgggacagactgtagcactaggtcagtcctccagcccgtcctgtgtttgccttcctcactccagggcttgttggcgataaggctgctgctgctctggaccagactctcaattcctctgttaccttggagacgttgcattgatgattaggttttgttgctttttgtttagaaaaataaagcagaagattgagtttctacatcccactcctccagaaagatcctcagtgagcaatgtaattcttagtgagtgtatatacacacacatatatgtgtacacacacacacacacacacacacacacacacacacacacacaggtttattgggaagctgctttcaggtgggtgagtttactagccccaagaaccaaggccagggaagtcaccatggggaaaggtggccggtgtaggggagggacagagaaaagagaagggggtacaggcacagagagaagagaactattataggccttttatttttattttttaataatagttttatcttttgaaattataattacatcattcctcatttcccttttctctctccaacacttcccatgtaccccatttgttttctctcacatctatagcctctttttccttgctacacatatacgtgtatataggtgtatatatgtacatatgttgctcccctccccttctaagtacataaacaaagcctgcttgttctgtgtgtggtctcagggctgaccgtgtggtatttttaatggaagtcttgtgtcttcatctttgactttcactgtagctctagaactcagatcctggctggttcccagggagtggccgaggtgttattagcagtatcagctgggccttttgaatggtcgggaaagtggcctgggctatgctcagcaaacgtctaggctcatctactgtgattctttcttgatgcccattttctctgtaattttttcttttttcttttggattgccatgcacagaattagacttttcggtattatgggctatgaaattatcttgttggtttccttccttctaagtttttcctctcacagttccctcagagggtcctaacttgacagccctactgaaaatgcatcacattgctcccacaaccccgtctcccactgtccctcttaaatcacttaacagtccacggggttgcacttcttatctgcctttgacaataagcttcaaatgacggggctctgctttgctttatgcatacgttccaaacagctagaatacagcttgatgaagacatatgctcagtatgtagttaacaaaggaatgagttaagaatgtagaatttgaaaaggataagaaggataagaagaccagggaccccacaacaaggttcaggccaacatgggtgatgtagtcagactgtctcataaaaccaaatgaagtagagaaaaatgttttcattacaaaaataagacagatgttagatgaggtgcctgtgtagccctggctatcctggactcactttgtagactaggctggccttgaactcacagagatccacttgcctctgcatcacaagtactgggattgaaggtgtgtaccatcactgccaggccagtctaccatatttttatggtcagtaaagcgtagcaggctttagtttccgtatacagcagataaacctaaatcaaaaattccataagcacaggacctcgtttctattgtgactgttggtgttttgttatgacgacatcagattgattttgggtactcgtgtaactctgtgaacttcccacgtttttatacccagtgaggctcacaggtaagaactacaggtctaggagggttatgcaaagagagtaacggtgcagggtctcttcactaggctaacttggggccacttctttgctcttttgatgaataggagacaaactgaaggtgccttggattgagaggcagtcagtctagggcttgttttggaattacaataaaatccaggaccaagtagatcagggacagattgttagaaacccgggttcgtctctcttcccagctgttataagatgtaacaggccagaaattatgcatcgattcagttcaggagcatgcaccagagtcttcccatgaaaatgatagtgctgagtgaggctccttaagtggttagctggttaggactgtaactggaatactctacccccccacccccagaaggctaggaagtgccatcctcagtgtgacctgaacaccatgatggttctgtgctgctcgagtttgacctgaacaccatgatggttctgtggtgctcgagtttgtacgtttttaggttaatgccagcaaagcagctgctgcttgaatttagttgtgaaacgctgaattattcatttccataaacaaaacttccttagtaggtatttagcattaatttatttctcttcatttcaatcgaccctgttgacattctggtttaaaattaaaaaatattctttgtggagtctaacaaaccagactttgtgatagctactttttctacctctattctgtggcaaaacagttaaatatttgaagagatgaagtatatcttatggttcatcttttagtatttaagtaaagttcttaataaaacagaatgaaagcaaaatatttctctgtagtgtctttaagtcttcaagactctccttggcattgactcttgactaggtagatcataacatcatgctgtatgcttgcacgtgtggaccacataattagtccatagtctaacactggaagtgtctcaatagaattttaactaattatttcaccatttttattcatactgtttgatagactattcagtagaatacaaatgtaaagtttatttatttatttatttatttttttggttctttaaactcctccatctacaaatataagtttgtgaagttagaaacaaaaatatatgtttttacattatatataagattttatatataacatgtataccattgttacattgtaacatgacgttatatatctgtgttgtatgtacagcagaattttgatttatattacttgaaactgtattattttccaccctagaaaatacaatttaagtacaattttcattctaaaaattttaagattttctaattttcttctaaagttttgattttgctaacaagcaaaattgtcacttctggtcaattaacacagcaaataattaggcttcgtagtttgtcttcatggtaaatttaaaggaaatgaagggccaagtcaattctaccgtctttttatagtaacagttacagatgcggaaggattttctatgggggtttagtgacttctctactcaacaaggttggggcactatgttttcttctgtctggaaaggtcccttagaaataattggcttgttttcaggtatgtgcctgacttccagagaggatagtcagagaaagaatatgaccagagaagagccactctttcttagcccattataaatatgcctgacgtgtctttttttctgagcgtaattaatctctaataaaactatattcttaactacttgagctgataaacagcaaggtttgttttaaagaagtcaagtttattttatgtcaattttctatttgtcctgtgtaagatatatttaattactttaccctgtctctgtgttcagattaatcagagcctgctgcatagtggtgctcaaattagaataatactttaatcaactgtgttacccacgccatggtagactaggaaagccacccttggcatattgaagatgcatgcattttatttcgtattgtaatttaaaagtaagatcagaaatattgatttctacttgactggagagatgatttagtttgaatatcagtctgatgttaatcaggtgagaattaattgagttggaggtattagatattcagtgctgttaactgagccgtgatcaatctagagcgaagctttctgtcgggcagtgctgggattgtcaaacagctcatgctctacagtacagaatgatcttttgttcatccttctagcttcttgtctcattaaatgcaccactaaattcattctatacacagactaatctttaaagtgtagaatgataataaatcataatttaatagaaaattaaaagcataataattttgtcaaaaatgcttttgttgtcatggtttttgtaatacattgtctagactagagctaaattttaaagccgagtgattaaatacctacgtctgcagtaacttgtaacataagatgagaaaacctacatcgtttcatttaactgtgcaacattgaaagaagtgagcagtacagaatcattttaatgtttatttcctgaaataaaaatagagtcagtagcattttgttggtctgaaatgtggcatgggcttttcatttattttaagggtgtgatagcaatatcataagtgttgtgaaaatataaatggtgagatgacacctccgtaggacctgatcttaagtagtaacatcggagcctttaaataaactgcagccggaacggagaggatcgatttgccttgttaaccagggacagtgcacttattactggctaattaattttatgccaccgtgtcttttagccccttcccctcttttttttttttttttttttcctttcaaaactgagaatttagatctgtttaccaggagggtagcacacgctgtcgtcagagttttcattctggccgttggtgtgaccgtgtgaggttagagggaagctacagtgcgacttttgagtcttttcccccccgaaatgatacttttcgcttgacgtgactatgtagacatacatttcacgacaaggacattttctaagtttgtagctgagaacaattagtatttaagggaatggagctatacattggagacagccttggaaggaaggtgatgaatgggggttcttagtgagtctcgggttcccccaattgttgctaaacagaggagagccgtggagaggaagcacatggggagatggctggcttcctcatgccagcccctcagcccagctgccacttccttctctcctagcctctagttccattcctcccttttctttttctaagttaacacgttgttccatgcttacagagtaccaacccccagaccagccgttcttccggtcctgttccctagcctgtcagcttccctctgtccctgcctgctctcccacagctgctttgtgcggtgtcctgagcagtaacaggctgcagcctgccctagtgcagtttaccgacatccttaggtcccggggctgccggtgctttgagccacccctgctcgagtctcagttccggggtggagtaaaggcaggaggtaatttgagcccagcaagctgaggatggttaacacccctcaaaaatgaaaagaagagaaccgtgaagaccaacgcctctcagtgtgctgtttgtcatggtgtgctattttgtggtgtagtatttgtgttttggcaggtgatataagagttagacctgatgttgataaaggatacatcttttgtttcaagaagataggaaatgactatcaacatgttatccctttaatggatatctataataatattccttttatggttatccacagaataacgtactttaagaaagatgcatgtggacaggcaaactttatatgccccagtacaggggaacaccagggccaaaaaaatgggaatgggtggataggggagtgggggggggagtgtgtgggagacttttgggctagcattggaaatgtaattgaggaaaatacgtaataaaaaaaaataagagaaaaaaaaaaaagaaagatgaatgtaatggttattttagtaagaggtgaatggacctgcttctgtggttagtcttgagacctctcttgttacagaccctgacctgtttaaaagcagcttgtgaccatcctgctttgtgagtagactgcttgtcaggccccaaaataggatatgtaaggaaaatggaagaaaccgattccctgactttctgcctggctactttctcagtcttccacccctcatcattcgtgctggtcatggccactccatttgagcatctcccacctgtggtcctttaaaagaggcaggtgctcaggtgtttgtttgctggccacactgggccgttctcataccttcctttcaagttctcgtagcacttggctgagatctgagtcccctgcattgcactgagtcctccaaatggtgtgggacattggcttcaggcagtgtctctggcgaccccatctcacagagcagcatttggctccatttgaagcgcaaacacagagaaaggatgactctgcatgccattgtgaatgcaggtcccggcacctgtcatctgtgaagtacagcttggtaacaactcattcctgaagacctcgtgggcacacaggcattaccgacactccagaccaagaacttcctgagcacctgagacgtggaaagctgcagcacctcgtgcattctacaaagagaactcttaacggaatggagacggaagcctgtgtgccagcttagctgggaccatgccacctgacaggccttacagtgccctgtgtgtctgtgtgttctgtgtgtgtccagggctggtctccaggctcctaatatacctcacctctgcagcttcactccatcctgaggccctgactggctttccagctgatttgtttaataatctaactaccctctgtgacccttagattgttggtatctgtgtccacctctttggactctgtctcctctttaacccttttgtaacccaccacatacacacacccaaagagatataattactatatgatgtgtgatctgagagttaatattagtaattaagatcgaaattaatctctcatcagccagctatcaagggaaattgggaccacttggcaagtgcagtcaatatactgatgatgtagcttgtgaatgtgtcatcattctttaacataatggtttggcattgtggaaggacgaatgcatccatgactctagtacaatgtgctcatactgcacttagatctaaagtgcagagttatcgttttgtgtggctcctatgagaagctcatgacaggaaaagagaggcttcattaacgcatgtgtgagtttactcactggccttttcaagtagacaatggaagtgtcctccaccggtggttcctaccgatagcccttcacccgtgctcatggcagggactctagtcaaaactcactgggtcaccgggaaagtaaatgaaatggaaataagagctcattgtagtgactttagagaagccattttaataataagaatcatcattgtcatcattgctattattattttcttattcactttgcatcctgctcactgccctctcccagttacccgctcccacaataccttctctgagcaggtgggggcccctggggacttcaagtctccgtgaggctatgtgcatcctctcccactgaggccagacaaggcagcccagctaaaagaacatatcccacagacaggcagcagcttttggacagttcctgctccagttgttcggaacccacatgaagaccaagttcacaggagcagacattttttaatgtgtaaaattcttgcttaaaatgtttagaaatatttaagagaattttccacaataggatatagactcaggagttgaggcatctgatgctattttatttttggtggctattaaactgtctcatcagtagtatggtatagtttgatactaggtaatttatttgagagaaatgaaggctgtacaaatatgtggatttcaatgttttcttttgtttttagacacaggttctatgtagccctggctgtcctggaacttgctttatataccaggctgactttagacttacagagatctgcctgcctctgctttctgagtactgagattaaaggattttcatgttcttggtattttactgaaagaaagaatgtcttgaatgcacatcccactaacctttagaacaacttagtctctcattgttcatgtgtagctgaatcaccttaacataagtttaactaaatgaaatttaagttttgtagttctttttattggatattttatttatttatgtttcaaatgttagctctttcccagtttcccctctggaaacctccaatcccatccttcctccccctgcttctatgagggtgctccctcacccacccatcaagtcccacctccccaccctgacattcccctaaactagggaatcaagccttcccaggaccaagggcctctcctcccattgatatcttacaaggccatcctctgatacatgcggctggagccataggtcccttcatgtgtagtctttggttggtggtttagtctctgggagctctgtggggtggtctggttggttgatattgttgttcttcctatgggttgcaaaccccttcagctccttcagtcctttatctcctgtataatttactttaatagttactaatttttagttcttttttgggtcctatttgtatagtttttatggttttattaatattcaaagattaatagaattgggcatgcagctctttaacatttcacagaaaactgataggtggaagctctttatttttaagactgaattccagagtatcattttacagtcggttggcagtattatcaacattaattttacatgattatatgctatgctaatgcaggaggaaagaaagactctcattaaaatcgtgttataaaacaagttgaggcttcaggtaagttacagttcctccagaagagatttgggcgacgaggaccctggacagcacctcttacgtgaggggaacacagaaacactgcttctgccagtttccagcttagtgcacttccattaattttggggaaatggatatttaaacaatgtagtgcctatgtgttctgtgctgaactaaggcagtagaatgttggatttgttaaaattatgagttaaacttttgatagtagctgctgtattttccaaaaagtccttggtatttgccagctagcctgctttctttaggcagaactcagtttggcaatgatgtttcttctagccatttggcataagtgtgatgaggtcacagtagggcacagtgaaggttgcaggtgtgatgaggtcacagtagggcacagggaagaggtgtctagcttacttttaatcaccactcttgaacatggcatttctctttaagaaccctatagtcaagtggtcagttttgtgttaattttatggacacattccctttgaggactgccatgtctttttctatttttgatcatatcttaacacagtgctccaagtacaaaaatagacacataagaaaagtaggcgtttcaaaataagaagtgaaggctgttttgatatccacattcatgccctgtgtgtctactgataatgggctagccttgtctgctttgtgttttgagatggaagtccttcgccaaagaatacaaaactcactgggtttgacttagcacagctcttctgtatagtgaacagaaacacctgacattggggtgaaggaaataatggataatggtcagattaaacaggtggagttgggatggagggcagagacctaaagaccactcactcttctgtgatggagcataagagataactctgcatgggatcgcatcctatgcactgcttgagttcatctcatctctgacccttgctcctttctagctgtcctgctctggtagattcaggtgtgtctgctgtggggctctagttttggccaaatccctcctagtaagttttgtatacatttatttcagttatttctggttgctgtgatgtaaaaatattttgtcacatattataggtatgtagctctatagagactcctgaaatggccttcgtgctttaatctaattatgtgtgacttacattctttagtgattagaatgcagcacatggctcaagggaagatggaactttggtaatttatattacacaaactctcaaagcattgaggctgtacccgacagcttcttggtgaggctggtgtcatgtttaacacctgagtgttaattgctggatacttgacagcagagcctaaaactgcttgaatggcagtagccacagagtagccctgacagttaggaggataactgctaagatatggggcagagcacattgcacattggcctgtggggaggactggggggactgggtctgatccaacgcaagtgtcagccagtgtccattggctgtgggnnnnnnnnnnnnnnnnnnnntttgtcacatattataggtatgtagctctatagagtattcctgaaatggccttcgtgctttaatctagttatgtgtgacttagattctttagtgattagaatgcagcacatggctcaagggaagatggaaccttggtaatttatattacacaaactctcaaagcattgaggctgtacccgacagcttcttggtgaggctggtgtcatgtttaacacctgagtgttaattgctggatacttgacagcagagcctaaaactgcttgaatggcagtagccacagagtagccctgacagttaggaggataactgctaagatatggggcagagcacattgcacattggcctgtggggaggactggggggactgggtctgatccaacgcaagtgtcagccagtgtccattggctgtgggtggatgatggcaccagagactgaaagtgcagtgcggctggtatggtcacagaaggagacggaacggaggactgtttgcgatttttatggcatttaggacttgagaagaatgagagccctccctggtactagactttaaagcacattgcagggatctcagaaagggaggctgtgctgccagcagggggaagtcctcagctctcccgtgtgctgggaagaaacagatggatgcagatacctgggtctggggatgttttaacttctgtcttagttaaggtttcggtagctttaaagagataccataccacaactcttataaggaaaacatttaatcggggctagcttagaggttcagagacttagtctactgtccttatggcgggaagcatgacaccatacagtcagacatgatgctggagaagaagctgagtggtctacatccgatcagcaggcagcaggaagagaatgacacttgagcatctgaaaccttcacccccccacctccccagtgacggccacatctcttaatagtatcactaaatatggccctgtggggtctatttctattcaaaccaccacattcccctctctggcttccacaggcttgtatcatagcctgacttcaaaagttccagggtctatcacagttacagcactgtttcaaagtttaaagtcatggaggctcatacagtctcttaactgcaatctcctataaaatcaaaatgaaaaatcagatcacatgctttcaacatataatggcacaggatatacattgccattccaaaagggaagaaagagaacataatgaggaaatactggatcaaacaagactgaaagacagctgggcgaactccaaactctgcatctccatgtctgatatcaaaaggctctttagatctccaactctttttagcctggttgactgcagcacacttctcttgggctggttccactcctgttggcgttgctccttggcaggtattctaccactctgccatctccaacatcttggggtctcaaaggcaatccaggcttggcagagcggcctctctaggcctccatgcagcaacaccctgacacagacctggcctcagtgactttccttagctgtggagggagattccaccagccctttcttctgtccttcactctagagcctgaaccataggctgaactgccaagttctgctgcttcctggagccagaacacaggcttctcattcagtcacagcttcaccagctttctggttttgatggtttccttcactgcctaagcttggctgtcctggaactttctctgttgatcaggctgaccttgaactcaaagattttcctgcctctgcctctggagtgctgggattaaaggtgcacaccaccatgccaggccctgatttcttttttaattcccttttacttctctttattccttttcacagatttgaagcttagttgggtacgttcttgctctccgatattccatctagcatcaggcttctttctaatctgtttatagttcctggtacctctttctcctcaaactatgcatcttgtatttcttcttgcttagtttgcttcttttcactaataaccaagcagtacagtcaatactaaggtgtctagaaatcttctctgctgttaagctataactcttctatttagcatcaggtagattttatggacaagggcagaaagctgccaaaatatcccaagaatagtctctaggccacacagtcactctgaatctgaaaccttttgatccaggccccacagttcagatcaccctcagcactgctgtcttccgtgctcccactagtatggcccattaaggcccacttaaagcatccagctgttttcctaacgaaagtcacaaagtctatattcctccaaacacggtcatgcctgtcatagcaataacccacccctggtaccaatttctgtcttagggtttctattgctgtaacgaaaatttgaccacacaaacttttacaaggaaaacatgtaattggggctggcttaaaggttcagagatttagtccattatcatcatggtgggaaacacggcagcatgcaggcagccatggtgctggaggagctaagagttctacatccagatcagcaagcagcaggaggagcaagacactgggcctcacttgagcagttgaaagcttaaagcccaccccggggatatatttcctctaacaaggccatgcctcctactagtgccactgcctgtgggcctgtggggccattttcctctaaccaccacatcttgttacttatttcccttgggatgcattcttgtcccactggaaatcctatggtgaggtcgctgtggtcagtgtgtctcnnnnnnnnnnnnnnnnnnnngggctctagttttggccaatccctcctagtaagttttgtatacatttatttcagttatttctggttgctgtgatgtaaaaatattttgtcacatattataggtatgtagctctatagagactcctgaaatggccttcgtgctttaatctaattatgtgtgacttacattctttagtgattagaatgcagcacatggctcaagggaagatggaactttggtaatttatattacacaaactctcaaagcattgaggctgtacccgacagcttcttggtgaggctggtgtcatgtttaacacctgagtgttaattgctggatacttgacagcagagcctaaaactgcttgaatggcagtagccacagagtagccctgacagttaggaggataactgctaagatatggggcagagcacattgcacattggcctgtggggaggactggggggactgggtctgatccaacgcaagtgtcagccagtgtccattggctgtgggtggatgatggcaccagagactgaaagtgcagtgcggctggtgtggtcacagaaggggacggaacggaggactgtttgcggtttttatggcatttaggacttgagaagaatgagagccctccctggtgctagactttaaagcacattgcagggatcttcagaaagggaggcttttacaaggaaaacatgtaactggggctggcttaaaggttcagaggtttagtccattatcatcatggtgggaaacacggcagcacgcaggcagccatggtgctggaggagctaagagttctacatccagatcagcaagcagcagaaggagcaagacactgggcctcacttgagtagttgaaaacttaaagcccaccccggggacatatttcctctaacaaggccatgcctcctactagtgccactgcctgtgggcctgtggggccattttcctctaaccaccacatcttgttacttatttcccttgggatgcattcttgtcccactggaaattctatggtgaggtcgctgtggtcagtgtgtctctcctgctttgatcttacaagtcctcttctcagatcgctttctgcaatacttgcagtctgcccttcagcagtgtacatgtgtttaatccaccatggaatgtatacagtatggacaatggattctaagtgagaggctgttagaactttaaaaatcatgttaatgtaattttttttatttcagattttaccagatgttgcaaggactctgggatccttatggtattaaaatgccggaaagagaattctgcactgaaagactgtctaactgcttagtaagttgtcacctcaatgcttgtgggtctgtgactgcacaagtgtgtagtaggagggtgttattaactcattacctgtaatatgttctgtacctctgcccaccaaattcttcatgttgctggtaagacatctgtatgttacaggttattctaagagaaaaacatttagggagggatttaataaaacattatctttggcagaattggctctatgattttccacatggcttaacaaatactttttctgcaacaggttggtttatagaatgagtatagcctgctttttagttcttctattgaaaagcaactgaacgagatgatccctaggaacttttcagcctggcaatttgttgaattgttgtttcaactcctggaaaagttgcaacaaatgatatggaagctctaaaagcaaatttcaatttttgaagctttattaaatcataaaagggcaggcttcccatggctatcagccaaacatggcatattaagttgaagtaagactaggcacctcccccgtctttaggttggaggaggcaacccaacaggaggaaagggtcccaggagcaggcatatgtgctagaggcagcccctgctcccacttctggggtcccacaagaagaccaagcttcacagctgtctcctatgtgcagagggcctatgtgcagggcagccccatgcaggctccctgattgtcgttcctgtgtctgtgagcctctatgagcccaggttgtttattctgccccatgtttggctatttctatcaactgctggagggagcttctctgacgacaactgggttaggcaccaatctgagtatagcagaattttaggaatcatttcattgattttttttttcttttcttttttcagtcacgattggttctatcctaggtctctccagcctttagttcctggcctgtcaggcagtgtcaggagtgggctcgctctcatggcatgggtctcaactggaccagtcattggttagctactcccacaatttttgtgcccgtccttaccccagcacatcttgtgggcagggcacattgtaggtcgatggctatgtggctgggttggtgttccagtccctcccctggaagccttgccgggttacaggccatggccatttcaggttctgtatcccgcattgctggggcccttggctggtgttgcagatctctgggggtttccattgcactgggtttgtagctcactcctgagaggcccccacttccagttgtcagttctccctccctctgtccatactcctcccaccccacccctgcacccatgatgttagttcgagttccccttcccagggaggttcacagtcttctcttaagccctccttgtgacttagcctctctgggtctgtgggccttagtattattgccatttaccttacagtgagcatataccatagaaatgagtacgtaccatgtttgtctttctgggtctgggttacctcactcaggatgattagttctttctagtttcatccatttgcttgtaaatttcatgatgtcattgtttttttttttagcagctgagtaatattccattgtgtaaatgaaccacacgctcttcagttgaagggcatctaggttgtttcctgtttctggctatagagaatagaagttgttccactagttgagcaagtgtccttgtgatttccaaagtggccgtacctaaccaattctttttatatcaacattttagtgccatctccatgagtacttaattgtacttcctcagctctttctgttaattggttttgagatagggtctggacgtgtagctgtagctagctatcttggaatttactatggagcccaagatggccttgagtttggccttgtccacttggcctttgcctcctgaggactggaattacatttaggagccactcctcccagattagtttttctaagtctttaaatgacagtatgcagatgtagtgtcccatgcctttgagccctgtacttgggaggctgacctctgagttccaagacagccagagctacatagtgagaccctgtcaaggaaaataaagcaaagaagaacgtaagcaggttttactgaatgcatttgtctccccccatatgtgtttattgtatacattactatatacagtattgacaaataatatcacaatattttcctaagttgttaattggtagttgtgagattttagttttggcaagctgttggtccctcttgtgtttttccggctgcagccagtgaagcactactgtgagcacagtgtgtgatgccgtcctaggcgagtaaactgaaggagaacacttgtgagtcccttgcggattaaccacagggctttagaacgctaccatgggaaggacgaggctacgcaaaccgtcttccatctctgcagttacagatgaggaagccaagagtttgcatggttttctccgaggcagtctcggctgcgggtggctgctgggcaggaactgcagaacctggtgtgtgtcgttttaaaaaccacggtccctgtattaagtaactttgtatataaatgtaattttggtaaatttttaaataattgattagtaggtactaaaacaaacctggtgaatcaaaaaaaaaaaaaaaaaccaaaacgtaaaaagcaacagacagatagacagacagacagacagacaggcaagcccaggtccaccttgcccaggagctgctgcactgccagcccctcaggctcccttttgtcccacctggcttagctcggattgctctcagccatgacacacagctttattactttaaaacttgcctgctaggcaccgttgtggggcacagataaccaccaccaggaagggtgtgcccttaccaatttattatctctccttcttctcctgccctaatcttagtggctttttccacgtagtccctgtcaaacatctttgttcacctgcctggagagaaggccgaaggccggagctgcccccaaggtcttacatggttgctgtgtcccttttccttcaaagcatggcagaaagcaggaaaacctccctccttccttgcctctgcctgttcctcctgggacccagaagtcccatctgtacctctgcccagtaattggttctcagccttctttagtgacaaattccgaacctagtagggaacgagacattagtatcagaaccttcccttacagggagccctttactttagaggagaggctccctctggtcatgtttcctagtgtgcctcagatgagcgtctcgtcctcttaaacatgtttttgtaggaacacagatattttacagacgtgtgataaactaaagcagcaaacacacttaaagaaacagaaatgagtgtagcccaggagaagccacaggtgtgctgcttccaggctctgtagtggaaggtggacgagaaacgaggacgtgattgccccttggtacagtcggaaggtttcctgtagatatgagggagagcacagaagatggaagtgggccatgagaggagggttgttggagagagtggaccaagagaggtccaggggaggagccagccaggagcctagagatgatcaaaatggctaagttatgatagggaagagaaactaggggaggggaagcgaagcccagcccccaggagggagaggtttaggatggggggcaagtgaaaagagctgggaggagctccaggtaaggagtgagacttgtcccaggttcctctgggacctgattatagtgttgttaatgaggtttagtgagttgcctcacttaaaggagggtctgctctggctagagtactgagtcctacagagaacaggaggatacagggagcctcacagaaaaagtgccagctgagcagaccagttggtctgagccctgtctttccctctaagaacagcatgtgctacattgagagaatggagagctacctgcccagagggctacagacccttgaaggaggctggcacggcacagccttcactagcacacaaatccacattgtctgggcagatgggaaataagtgtgttagttagaattgagacagggaacccatgcctcttcttccacaaaatgcaagcccacctctgtcgtagttcaggggcagaagccatacactgcatgcacatctaaatcctccattgctgtattactatacagcaccctcgagggtgacaggaagccctgagatgagtgaagcgcagcccgccacatcacataggctttcagtggctaaacggccctcacacacagtctgcagatttgtgctctccatggagaacaggtccaggctgtcagcctgaattctaacctggaatgtttctggatgtgtaggcatctgcagaggccaaagagcatcctaacctagtccgattcatccgttggtcattgatagaaactatggtccttcctgttggtgtacaggaagctggtgagcagtgtggagtcctggtgacaagccaccactgctctgtgtattggagaccatctgctcagcacttagtgcctgagcacagaaccctggtcacaagccagctggaatttcttccctgaacctcaaatttcccttgccttggtgactgccaatgccagtgtgtgcttcctttgtgaccttataaaaggcaccagagccctttaacaggaaggaaagcgatgtttgagcagtggatcgcctgctcctgcggtagcaggacaccttcgttaagtccatacctgtgaaaagcaagtttcccccagaaactgcagatgcctttcctagactccctcaggtgatgtatgtgnnnnnnnnnnnnnnnnnnnntattggagaccatctgctcagcacttagtgcctgagcacagaaaccctggtcacaagccagctggaatttcttccctgaacctcaaatttcccttgccttggtgactgccaatgccagtgtgtgcttcctttgtgaccttataaaaggcaccagagccctttaacaggaaggaaagcgatgtttgagcagtggatcgcctgctcctgcggtagcaggacaccttcgttaagtccatacctgtgaaaagcaagtttcccccagaaactgcagatgcctttcctagactccctcaggtgatgtatgtgctcagcagtgtgagagtcaagtccagtttccacaggttgaggctgtacacagaacaggtcagctcctgaaggccttggccggccagtccagaattatcatgggaaatgaaaattaaagatctgctcccaatatgagtttcccttggccaggagaccattctttgcatgtcacacaggattgtaaggtaccctgtgtcccacagtgcccattctaggtatgttgggtatgtgggggagtggggtggggatgtcccttggatacacaaagaccatactccatggagtccctctgctctcagccactggagaggaggacatgtctgattccatccatcttgcttgatcagagaaccctctgccttctcagcctagaatctcagatttttctccaaaagtgctttgagaatgccagagagtagaacatgacgatgcatgcttataatcacagcatgcacagcactcaaaagtgtgagataggattgatgctagttgaaggctaggccaggctacacagattcaagaggtgcaaagtacgggggcaggaggtgttagaagaaaaaggtatgtgtggagccagtcatgaaatacatttattatagaaattacaacatgaatattttcctcgggaactgctttgtgtactataagatcaccctgagtagcacttgggtagccatagtgacagaacaattgggaggaggtaggggttggaatagctgttgttttgtctagcagtaaaacactgatcaaaacaaaacaaacaaaaaaaaagttaagagatttggagtttggtaaagttagagtggggacttctagttgaccatggtagagatctgatggataggtaaatgttttcaaccctgtagctcagatctgaaatttgttacattgttttacatatgtattctccagaggaacagaactgacagaacacatctacttacattaaaaggaggttagaatggcttacagcctgtggtctagctcgcccaccaaaggctatcctgacagaaaggccagcagttgctcagtcctcgaggctggctgtctccgctggtctttggtcgctgttggattctggagaagtccgttccaactgccagtgaaggaagcctcggcaggaggagagatgggcttgccagggagagtgagggcaagcaggcaaaaagcaaggcttccttcttccatgtccattgaaagacgctgcagccagatggtgtggcccagacttagggtgggtcttctgacctcaaatgatccaatcaagaaacatggctcccaggtgtgcccagctgtttggattttagtggattctcggtgtggatgagttgacaacctaggttagccatcgcaagttgtcagtctgacacataatcacatctccttatgtaatttttagttttcaaatgaaaacaaaaccaggtcacaattatgtttaacatgacatcattatcccatgcacaacagcattatttgaaataactgagagttttactgtctgtctgtctgtctgtctttctttcatcctttcccacaaggacctacagccttttagaaaggtaactgttcactggggaaaggaaataatcagactttccagagtctattggatgtaggttctgaattgacactgatattgggataccccaagaagcattgtggacctccagttgaagtatggacttaacggaaggtgggtgactcctggtgttttggctgacatggaactcaagtaggatcctgggttactaggaatcatcctgtggttatccccagtcacagaatgtatacaagttgtcagaattcttacattggttccataactgtggagtgagagctgttatgtttggaaaggccaaatggaaaccagtagactgcctctaccagggaaagtaatgaactatagagcgcatcacgttcctggaagaatggcagacattggtgtcactatgaaagactagaaaggctcaagggtggtggttttcatcacatttccctttaattctatgtggccaatgccaaagactgatgggtagtgggaattgacagttgtctgcaaaaacttagtcaagtagagtcttagttattacttttctattgttgtgaagagacaccagggccaaagcaacttatataagaaaccatttaattaagggcctcatttacagttccagaggtgagtttgtgaccatcatggcagggaacatggcacaagtgggcaggcaggcaggcaggcaggcaggcatgcatagtactggagcagtagctgagagcttccatcttatctcctaatccttccctaaatagtactaccaaggagggatctagcattcaaatgtatgagcctatgggggccatttttcattcaaactgccacaagtagtggttcctgttgcagctgtggtaccagacgaagtgtgctttcttgaacagattgtatcacctggtgcatggtatgcagctgttgatcgagcaatgccgtcttctctgtacctgtccataagggctatcagaagcactttgctttcagttgccaaaaaccagcagtatacttttatagttctacttcaatagtatattaaccctagccttgtgccataacttagtgtgatgggatctcgatcataatgtctgtaatataaaatatcacactggagcactatattaatgacattatgcttattggaccaagtgagcaggaggtagcggccactatggactttttggtaaccatatgtgtattagaagatgggaaataaatccaaccaaatgtaagggctttctacctaagtggagcatttaatcccacggtgtggggtgtacatacagagatattccttccagggtgaaggatcagttaatgtacctgagcctctccgccctgaagaaggacgtccaatgtttagtggacctaactggattctagagacagcacattcctcacttgagtatgttaccaagtgacacaaaagctgccagctctgagtggtatctggaacaggagaaggagaggctcttcaacaggtccaggctgctgtgaaggctgctttaccacttggaccatattatccagaagacttcatggtacctgagttaccagtggcagatagggatgctgtttggagcctttggcaggccactttgggtcaacgacagaggagactttgggatttggagcgaggctttactctcatctgaatacagctattctccctcttagagacagctctcggcctgctattgggccttactggaaactgaatgtttgataatgggccaccaagttatcaagaaacctgagctgtgcatcataagctgggacacaaagtcttacacgcacagcagcactccattgtcagaggagcggtacatgtatgagtgatgtggcctgagtgggtaggtcctgaaggcacacgcagacttaatgaagaatttctctaagtgcctttggcttctactctgatggttataggtatcatttattacatctaattagtaattaaaatagcatgttttggttgcacataaatgttttctaggtggggcagccctagaacagagtggcaggaagagtctacagagagggcagcctaggctcaactggctcagggagaacttagctagcattgcaaccttgactatcctctactgagaagggatagccttctaggcgcggctgtgatgtactgtgtaagcacattgaccagggtacttgatgcacagtaggtgcttagtaagcacttacactctctgatgtactcttagttgactggtatttattgtcactatttgaacattcttttcctactcctagaaatatgaacctcagggtctagtttgttgtggggaaggaggactattgctgaagagagaaaagcaaccaaacaaaggtagatttgacactagctgaagaatgatggaaagttatgaattttttctttaagtcccagaaagtgttctttgttaattactatggcaagccacagcacgcatgtggccgccgctctctttgaggaacatgttgagacagtgtctgcctctcatcttcattcctcactacattgtgacccatttcggattctatcgtagtgtgcttgctgatggccacacccaagaagcagccccttttcattcaaccttcggataattgtagctccatcattcccctggcaatgctgtctagtcggccacacatttctccactcctcaaccctgtgtcccttaagctgttgcttaaagttggtttctttgggttctgttaagaatcttaaatctaagtgtagcttatacctctggattaaatcattacagatcctgtttctctgcttttcttcatgtcttactcatgtcttaaaagggaatgtttttgctcagtccatgccatgtggcttgaattagttttctataatctagagtcatctgtctcctaactcactctggttcgttaccaaatcagcctttcctttctgcatctccacatctcctccttgggctagcttaggtgcctgtcatttcttgcttcaatactattattagagatccaactttaaaacctgtgctgttcccttttagcctacctggcacacactgccatcattcaagacccctttacttctagtcagtcttgtcctgttgctctcaggatagactgtcgtagtgtgacgtcagtgctgtgccctcaagtgctcttgggctcttcttgctacatacacaatctactctgtgagcttcagtccacttgcagtgacacacgcgtctcgcttccctcaccagctctgttctgtggccctgcaaggagtggcccaactgtgttctcactgacaactcccctccctcgctcctagaatgtagcatcactcatcgttccattctgtgataagacgattacaaaatttaatgtttattgtgtcttggtgactattgttgaaagtcagcttttcaagattaaacatgaatagctaagtgtaataaagcttatattttatctattttgaaatatattgatttacttcttatagctataatgatccagccttctatgaagaatgcaaactggagtatctcaaggaaagggaagaattcagaaaaactggagttcctaccaagaagaggctgcagaagcttcccacaaacatgtaggcaaagcgctcatcaggaagtcccgtcttacggaagccagttatcacttaacccagaaatgatggactgaaacaatgtttgctcaccctgatcatgaaaatattgagtttttaaaaataaaatacaaatatttatttcagagttctgatttattaaatatgaaataggggaaaaaatatattgttctcctggtcttaccccaagtactgtaactctgactgcaatcacagtgctaactgtcatagagtttcatgtgtacatttccttctgatggtgcaggctgatggctagtgtgggaagaaaggactaaagcaaaggaggaatggagcgccttcaacactgctaacggcagcagtgaaccagagccttcttcactctaccccttagtgtgccagccactgtggccagcagtctcttacggcgataacttagccagcactgccatcagaggcttatgtgaaaacagatgagatttggtgaattattttactgaaacctttgacagaaaagtttctgcattgtttcttgatcttttgaacttggctactgaaaatactgtataatcttggattttaagaagttggcattgttagtgtgaacttctgttttgtgatattgggggtttgggaggaactgtggtaagtttctcttttagtgtgttaccctagtctgagctttttatattaaaaactattttaaaaaaaccaggaaggcaagatttaactttggctccaatcctatgaaaaaaatttctcattcaaatgaaatgaacctagtcaatgaatgcatgttcaagcttcacagtgtactcaccaaagaactactttacttttgtttgaaactcaaagaacccattctcccaaagcacagatcaacagaaggtgactggaggccaagcagagcaaactcaggaagatactgcagcacggggaaaggccaagcagcccattatctctgcgctggccttgttggcactggcacatttctattggacagggctacagttgttttcagtgactcaaagaaaaggtacagttactacaagaagccagtgacatagtaacaagatttctgttgtgtgtctcgaaaccagtaggtactagataaactgtgttcccattcaccgcttgcctgactagtgtacctgctgcagatgtgtctttggatccccggtttttacaggttcatggggcagttctattttggcgttggctcaatacaataaaggaccaagaggaaggagcatgtggctactgtcggttgtgtcctaatattaatgagttacaggtgagcttaattagatttagggaagcttgttggggttgtcagctagtatgaaaaggaccaacgggactgtcaattttaatgaatcacaaaatacagctgttaccattgactaagtatatatttaaacattttctgaccaggtaagaatattttagggtttctcttttctagctaaggagtcttacacaagcttttaacactttgactgttaacacccatcagactgttctagcaatcctttttgataacggttactactagttagaggggattccctccattcagagtatgttggagaaataaaattaataccagactttggaaatatacataggcaaggacagtatttcacatccaattccattttaaaaacaaaaataattttaattaaaacaatttcttggcattgttcaaaaacattataagactctctttacaaaagaaaacttctcatcttggtttgaaaaaaagcaaaccagtaagctacatcagtcctaagatgatggacagcctccgcagtcacacgagaactgcgtttgctttcttattacacagtcagttagtgccttcagctagagcctgggcttgtgtatttgttttatgcatattgggtcttgttgtattacttggcaggagcctgtactccctcgagtcagctgtgttcattggtcagaacacattccagtatctgacatcaattccattaatcacggacaggcatgagtaagtgactgagataactcaacagtgaacagtgcctggctatgcattctattcagtgatacaaggtcagagatcctctgaattcaagatacatgaaatggcacttagaaaaggataaagtcttcttacatcaaacaggtaatacatgattactaatactcttaatgcttccaccttgaaaaaatttagatgaatttccacatgaagccatctttgttatttctttacttatttacaagtgattgggcacttagaatgagttgggatatttcacaattgtacagcacaagatttagttctagatgcagctaattagcatttactttctcaaatgtcatatctaacagtgtgtaagctgctctgtgtaaaacaaatagctgtcctgctgaaaatgaccacacgggaggttcactacacatcactgaagagactgccctgtgagatgctctttcttcttttaactggacattgtataaggttataatagtttattcacataccacatcatttttaactatttaggatttaaatatactgggaaaaagttggcttcaatagtcattaattcaagtcttagaattcaaattgcactttaaatttgtatatacaaacattttacttaaaaatgattttaaatcttaaaacttgaaacaatagcatagagatgtcataacctacttttattccattatatttcaaatctttatgtatcaggaatttacagaagctcaacctactcttacttgcttcttgatacaatctaaaccagcagacatgttttttcttttatactaaaggctgctttttatttaatgattggatatttaggcaggtcacatactttataaaaccatgcctaaaattttcatttccactctatccaagaagcaaaaatgtataattgttatcaaaggtacaactggaggttcccatactggaaaatcaattacatatataatgttatacagaatgtacaaatgtacatactggagaactgcacaagccatcaatcaaagtccactttcagtttgaacaatctcttgggagaacccctgagtccgtgtcttcctgatcaaatcacaagtgaaattaacttttgtaaaggcagttctgattctgttgatccaggtaatgcagtggcggcaggttggataaaggtaagattttgcttttattttcaccaaatgctgtctcacttgatttaggagggcttgggaatacccaggaattatcttccagagaatttctcccataggagctgtgctctggaaagtctgcaccgtcattaggaaccaatctctcgttatctgtccatgactgaagaactgctttgtctgagaaaacctttctatctcctggtaaaggggaagacggagcataacaaggagctttgccatttggtgacaaagagggatgtcttttgtaagttgcagtaaaatttgtcaagtgcaatttcgtgctgtctctcccaaggtcttcaacacatcctactggggtacaggctaaaaagaaagcacagctatgtgtcagtcttctagaagttgagattgtaaacatattatataccagctttacaactgacactaaaattagcatttccagtttagtatcatcactgggaaatggatttggagggcgttaaaagatctaagttctgagagagtacatatttgctgaccctgagctaaggtcactcaccaattgctttgtttgcaaaatggatgtcaaacttctttcctgcctatgtcttcctgctgatgaagagtctgtgtgtggtaaaaaggtataagaaggcaaagagaagaaaagttcttggcctttagtgtggctagtcaaagtttttagaccatacttagtgggaaaaagttgtgaagaattagtaggtctaaaatacgttctttggcttactgaaatttctcagtgggagagggttcaaaaataacttatttttataagtataccttggattcttaagagtcaaatgaaaatttaacatgcactgtggataaagtagttgaaacagaaactgtaagctcaatttcttatagtaaatataattctgctttggtcaacaagcagatcaacttaaaaagtaaatggaaaggtatttcatacacacagtggcttaggaaagactgctcagaggttaatgttcaccacagccagtatcctgctacggcaggcagcctctcttattcttctcaacctgccacaattgaaactgtatctaaggcatggctctatgcaacctaatagtgtgtgtgtgtgtgtgtgtgtgtgtgtgtgtgtgtgtgtgtgcgcgcgagaatgcaggtacacacatgagcatgaaggtgagcggacaagtttctggagttggttctttccttccactgtgagctccaggtgcaacaggctctcaaacttgcaggggggagagggggctcttccactgctgagccatcctgctgggccaaccaactcatgtcattttaaaagaaacaaatggagacttttgggtgatgggtggaagggggtggatagagtaaaagaactgaaagaaatgaattcttctggaaagcagtgatggataggttatgggtaagtgagccataacccggtctacttaagacactgagtgtaaggactggtgactgtgcctaaccctgtccagggaagtacattctagttactgatggtgcaaaggcaccaaaagactgtattatcagtcagttaaaaagaacacagaatggcgagagctcttctcctttattagtctttggaacaaactattttatgatgtaagtagctgcactgacagcatacttggtaacagctgagtccctgtaagagaagtcttacttttgccatccatctatgctatcttcataagtaaccttagcaactgggaaatgagagcaaggtgaaccacaaattgagctatgtttgttgagactttgaatgaaccccccccnnnnnnnnnnnnnnnnnnnnnnnnnnnnnnnnnnnccccccccccccccagtgaaacattatcccttataaacactcctgagaagagttataaaagttttcttgttctcctttggacaatcagagatgcaagtaacaattttaaattagatgatgaccacctttcaaagtcacaccacattcctttgaaaagtaaaatttaagacattaaacgtatgctgtatggttctgatgtaaacctatcatgttgggtgcaaggacagattatttcctaaaaaaaccaaaacaaaacagcactggcaaaagtacccattactagttaacacaaatctcaaaagcgttagttaaacactggctttgaaaagaaagcaatggttgactgggtgatcccagcacttgggaggcagaggcaggtagatctctgagttttgaggccagcctggtctatacacacatacacacacacacacatgcgaaggggggggtgaggggaagggagggaggcggcaaacgagtatcaattgttccaggacagccagggctacattaaaaattcctgtctcaagaaaaccaaaccaaaccaaaccaaaccaaaccaaaccaaaccaaaccaaaccaaaccaaaccaaccaaccaaagcagtggcaaattttgattgagtctgccttcaaatcagatgtcctataaggaaaagaaaagtttataaaaaagatcaggaactaaaggagtcagagttgttttaaaaataaaaagcaaggtgtttggtatatttcatagtactgaaatgaaactttggagctctttttagatatataactaaatctatctatatagttatggtaaaaggccccttagcacaaacctaacaccatggccttacataagcaacacttggctgagaaaagccacaaggggaaaagaatggtactgaagaaaaaccaccagcaacaccttccatgtgaggctggccagctacagactgaagccaaggcagagcatgggtgtgagcgggcacactgctgcagaatggcttatcggcgtcatcagatgagactgagataaggcagccagcagctcttcaggcagtctggctggagtctgcatttgcagctagcagtgacttgcctttcttgactgcagctgaggttttcagttttcttagtagttctgcttgcacttgagtcaccaggtgtaagttagacatctccctcttcagttcccagtatgcatgttgcatattatcactgaaatggaatttgaaaaacaagttacactgggcctttttatggagaaagggcaacaacttcacaatagaattaaacaggtttctatttatacttttatgacaatataaatgaagctcaaaagtatttatttggaatgtgaaaaatgtaagggataacactgttctcatttcaggcagtcactactctattaaacacatcataaatagtcctctgatcagtgaggtttttactggctctctcagaaccaaggattgcttttaaccaataatgcacagtgctgttaatataattagtaagaaatatgattttcctttgtcaatctgatcaagaataaaattgcattgattcacgtatggtctttgacttcgtctttatctttggattgtttcgacactgtgaaatgaagtggtgagtagatatccaagaccacattaagacaaaattgagatttcctgcattccattctttatgtctgactgggctgtctcatactgttggttctaaaccaatgtgacatgacagcataaggcatgaggcatcacatgattccctaacgaagcagcagctagagaagcagattataggaaacaaaactttaaaattccttttatagttttacaattaaaaggatctgaaaatgtttataacaaattttaaaagcttttattgttcattaaatccttgaggctcatgattttctttaggttcttaattttcaatgagatgaactggaatcttcagcacatagtgtttccttgtacagtagtgcttgaaatagtcagtatcagagtaactgacttcacagtgtcggaacaaccactactgtcagagactgttaggtagtatgaaaatagaaccagacaaatatgctacctgctgtttcaggttttgtctatctgaatctagtattagttacagaagcaacagacatctagaaacaaataggtcaagttatgtgaggtaaacgttacctcttttaacagagtatttctacccaacttagactacattgttataaacagtacagcaaactatattgctttggagaaaaacctagtattttaagtatctttgcttaacctttggtattatttaagcagctctactttggagtcagtaaacactggatcggctttttacaatgtctgtttcatggtacaattctgggcattcaatgtctgtcaaaggttcagtcattataaagcagcagatgaaagtgttgtccacatgctaactcaggctcacaggcatgagtaatagtttgcaggtggtttattattgctataaaatcgtgaatctgtgcctgacttagaaaaaagaaaatactcatgatactacttgggtactcaaaccccagttactcaaaacagctagacaaacagaatatgatgataaaggtattagtatcaataccctgagtatattaaaaagttcaatttaatggagattgcttaaaaattagataagattgaactacatcatcaactgcccttttgtcctttgctcaagagtcacctacactaaaactacagattaaaacacagctatgattgggtagttcaagactgcttactaaggattcagttcctagcatccaagttcttgtaatcccacttgtaggggtctaacgccctcccctggcttctctgggcttctgcatccccctccccatcaactcatgcaggcacaacatgcacgttttaaggcatgtgtttaaacacatcacagactggcaactcatcagttttaattcctggaaccaacttaggagtggagatgagaactgactccactaagctgccttccacacagagctgtccctaccacacaggctctgtggcacatgtccatactgccactccagtacctaagattattactaactgaaactcttcctctatggagaacaaaataattttggttgctgttaccttaacatcaaagagttagtctttacagcgtgtaaaaatgattggtgattctatgcatgtgaacaaatgttaaaaaccatttaaaaaaagaaatgaaaaggcaagttatttctctaattcttagcagggctccaactaaccccgtgagtattgggtgttttatccaagtgtttttgagactatatgtggactgcaaaccactgtatcctactttcttttgttctctgtatgtcttcaattttatcttttttttttgtataaaacttcagttttatcagaaatattttcaatatacctttttcaattttttccagaagatttttccatatttgtcttcaattttatcaggaatttattctgtatatgtcttcagttttatcagaatattttctatgtatgtccaatttttttttctagatttattattatatctaagcacactgtatcttcagacacccagaaaagggcacagatctcattacagatggttgtgagccaccatgtggttgctgggatttgaactcaggaccttcggaagggtagttggtgctcttaacagctgagccattgctccagccttgtcttcaattttattgttttttgaatataacttcaattttatcagaattttttccaatattccttattcaaattttccagaatttttttctatattttctttgattttaccaggaatttttttctatatatgtattcaattttatcagaatattttgtttatgtttcaattttatcttttttttcatataaaaattcaattttattcaaatttttttcaatatatctatttacttttttcagaattttctatatttgtcttcaattttatcagaatattttctatgtatgtcttcaatttatcatttttttcatttaaaacttcaagtttatcagaaattttttcaatatacctcttcagctttttcagaaaatttttttaattttccttccttccttccttccttcttccctccctctttctttctttttcttttctttccttttcccttttccttttctctgtttcccttcccgtttcccttcccttcccttcccttcctccctccctctctttcctttcctttttctctcacttttataaatatacagttatccgaggtcacagttgcatacagaatgctccctccccccaagttaaaccatattaggaaggtggaattaggaactcaggagacctgtggtgaagaccctggtgtggaacatgctcttctctcgacaagctcggcctgatgacatctctgccctgcagaatgtcttcctgaggtggaccctgtcatgtgtttaaaaaggaaacaacaggaattatttcaatttttttcagttcatttactacagatatttcaccatttatacaatacagctacagttgtataaagtataagactagcttttagactcagttttaatgccacctgtccctgtcatgtttaactcacttccagctacctgagtattcatgctttcatttcctgtaaaacatgtctcatgggtttggaatcctataaaacatacttttgaaaatataagaagggtaatatatctatcacattactgtttaaagtacatctgtatgaattctatgggaaaatgggaatttctgcacacaaaaccagcaaatattgaacaagcataatttatgacagcataaattcattcctaaagaaatttcttgtgtgtgcaaatattttggtctatattttcagaaaccattgattccaatgtaagagagtgcactgctatgttaagtaaagcaccctgggctgggctgtgcgggggctgggctgcagcgtcaccactgctagctgctgaggctgatttcattctcatcaactgtagatggacactggcggcttaacggcggacactctgtcggctacacacaccagcatctgaagacgctctgccgcattagacaaagaaccatttctcatgaatggtgcacttttctgattttcataggtcttgttctcattttcttcagtgataacagagtttgagttggggtttggcacagtgtcatcagcttaagaccacacttcctaaacttccttgcaaggtacagccccacccccttctaagttgtttatattgtgggtgtgatacaaacaaacacctccaagtcaaacaatcgaaaccaaaaaaaaaaaaaaaaaaaaaaacccaaacctcaaccccaacacctataaaagatactttttaatctaatatattcaagatcttctatatcatacttattcacgaatctgtaacaaacattaatctcacaggaatgaattagtctataagcaggaactgctggtataagctgaaaaaacaaaattttactattcagtattacaagacataaattataaacttggctcactcccataatcccagtacttgggaaactgaagaggattgccctgaagtcaggacagcctgggctacagagtgagttcttaggccaacttggactatggagggacactctacctcaaaaactaccatagatgtaggcatccttggtactgttctttactggtctccataagaaataaaattatccccagacagcctttagtttttttgtatcattaattaaaaaccatgttccttggtgtatacttaaaatacacatttactggaaatgttctttaaagccaacagtatagacatacttcttgtagaataaggaaatattttacacctactgatagttcagaaaagttgaatgtaaatcatcaacaatacaagtcctcaaaaggactgtcccttaacatgcaaagattccttatggcaaataagtaggctgcactgttctgaaggccacactctcaagacttcatttcgggtttctcgggtccctgcaatacagctttcctagtacctttagtatactgcaaaacactaggactccacatgggctagttattttgaaccactgttttttcttacaccactttggctgactttgaactctcaggatcaactgtcctgaatgtaaatggctaggatataaaattggaaaagcccgagcagaaaggtctctgaaatgctgaccttacttacaaacactagaaagtttagacaagtttgctagtaatcaaaaccagaatgttattagtatgactacaaggg

SEQ ID NO: 124 - DNA, 1898 bp, Mus musculus
tgcagaggtcgcgctccggctctcccgcccgaggctgcgggcgagcaggcggctgcgcgcgcagcccagcgcaggctcctcccctcccggccccttagcgcgtgagtggcttgctgcttctccgccctccgagatggcgctggaccccgcaggtactggggtcggcgtggttgtgagggcctgggcgcgggtctccacccggcgccggcgattttaccagatgttgcaaggactctgggatccttatggtattaaaatgccggaaagagaattctgcactgaaagactgtctaactgcttaaatgtagcatcactcatcgttccattctgtgataagacgattacaaaatttaatgtttattgtgtcttggtgactattgttgaaagtcagcttttcaagattaaacatgaatagctaagtgtaataaagcttatattttatctattttgaaatatattgatttacttcttatagctataatgatccagccttctatgaagaatgcaaactggagtatctcaaggaaagggaagaattcagaaaaactggagttcctaccaagaagaggctgcagaagcttcccacaaacatgtaggcaaagcgctcatcaggaagtcccgtcttacggaagccagttatcacttaacccagaaatgatggactgaaacaatgtttgctcaccctgatcatgaaaatattgagtttttaaaaataaaatacaaatatttatttcagagttctgatttattaaatatgaaataggggaaaaaatatattgttctcctggtcttaccccaagtactgtaactctgactgcaatcacagtgctaactgtcatagagtttcatgtgtacatttccttctgatggtgcaggctgatggctagtgtgggaagaaaggactaaagcaaaggaggaatggagcgccttcaacactgctaacggcagcagtgaaccagagccttcttcactctaccccttagtgtgccagccactgtggccagcagtctcttacggcgataacttagccagcactgccatcagaggcttatgtgaaaacagatgagatttggtgaattattttactgaaacctttgacagaaaagtttctgcattgtttcttgatcttttgaacttggctactgaaaatactgtataatcttggattttaagaagttggcattgttagtgtgaacttctgttttgtgatattgggggtttgggaggaactgtggtaagtttctcttttagtgtgttaccctagtctgagctttttatattaaaaactattttaaaaaaaccaggaaggcaagatttaactttggctccaatcctatgaaaaaaatttctcattcaaatgaaatgaacctagtcaatgaatgcatgttcaagcttcacagtgtactcaccaaagaactactttacttttgtttgaaactcaaagaacccattctcccaaagcacagatcaacagaaggtgactggaggccaagcagagcaaactcaggaagatactgcagcacggggaaaggccaagcagcccattatctctgcgctggccttgttggcactggcacatttctattggacagggctacagttgttttcagtgactcaaagaaaaggtacagttactacaagaagccagtgacatagtaacaagatttctgttgtgtgtctcgaaaccagtaggtactagataaactgtgttcccattcaccgcttgcctgactagtgtacctgctgcagatgtgtctttggatccccggtttttacaggttcatggggcagttctattttggcgttggctcaatacaataaaggaccaagaggaaggagcatgtggctactgtcggttgtgtcctaatattaatgagttacaggtgagcttaattaga

SEQ ID NO: 125 - protein, 133 aa, Mus musculus
AEVRLSRPRLRASRRLRAQPSAGSSPPGPLAREWLADPSEMALDPAGTGVGVVVRAWARVSTRRRRFYQMLQGLWDPYGIKMPEREFCTERLSNCLNVASLIVPFCDKTITKFNVYCVLVTIVESQLFKIKHE

SEQ ID NO: 126 - DNA, 98146 bp, Homo sapiens
  misc_feature (1)...(98146): n = A,T,C or G
atgattcaagcataatcaagtgaatgattatttccctttaatctttgcttttaagtacccagaaatcaatacctttataaatttatccaacagatatttggtgagtggcttctatgtcttaggcactgggagaaatgctaggtgaggggctttggcatttgtgagtctttgggtctctagcttactggccaccatatgatatggagctgaactatgtatatagaaccaaatccagagaaagtgtgactgtcacacctggagtagcataacacatgggtcttcaaagaaagaaggcctggcatgagtattgagagctaaagtattgagagctaagggattttcagccagagaaggtgaaagcaaagaagagcagattacaacaggcaaagaataggcaaatagtaatatggggtcatcccgacaaactagtaggctgcttcctgtgcttggattttcatgtattctcatccagttctgttgcttgtatgatcttattctatgggcattgagagaaccattgcaggtctttgtattaattatgacaatgtttttgagtagcaagaggcaggaaccaacttaaacaaacatgggaaacaacgagcaagtgttcttttagaccagattgcatgcagattgattgtcttggaatataatcccaagaagcaggagtgaggaagagggaagagtgaaagagggaaggacagaaagataatacatgaatgtatcattaagtttcctacttcacaggtgactggtgtggtttaccacgagacctttgcaggaatctttaaaatgtgtttcaagattgtctgcctggggaattaaaaaatggcgcacatttatccattggattccattcactattaatcaaggtagtcctaccggcgttaacttcccctacacttctagattgtatatgaactgctactgagagggtgcctgtgcatgttccatggtgtagtgtcagaagcaagtgagaggcacaaggctgaggcaaggtgctgtcaagttgcacctacatgaagaaggttgaaggaagcttgaaaagaaccagccccatgtataagatttgggccaaaagtatttgaagtggtgcacaagaggtgtcctatgtatgtctgttgtggctcaacaaagagcaaagacacagaaaggcagatatagagctgagcctcacagaaactgcaactggaaaccaaacttcttctggactttctcagtcttaagtctctgtatctctttggttgggcttcacctttttcctctccctataggtagctttcactacatggcaaaaactagtcttttaatgacttctacatattttgcatttaacaattgcagactcagaatacaaactgagatgttagactcacatctataatttctaggacagagtttcatcagcctttcataggccaggtatccatttttggaccaatgaatatgggtaaagagagatgtcatgtaaggacacgaggacactggtagaaaccatataataaagtagggaaggaacagaagagcaagatgccaagcagacaataccagaaatgtgtacctcatgtcctgagttaagaaaacatctcttaaagtatatagaacctggaagtacctatagcaaataaccagaaaggacgaaaatagtgtcagaattaaggcaggagttagggacagggaaaagaacagaaatgatattaataaagaataattgatgggccatgtgacccacttcagttttacatggtgcccttacattctccattaacaggaatttgtgcaagaagcatttatgatgccaagtcctgtgagaaatgtaggggactaccatagcacataagacacaatctctttcctcagaaagcagatagtcatgtgacttagtaacaacagcaataccttatttttataggacatctttcatctacactttgagatccctggctccatgacacagaatcaaattaatagaagttaacataaacactcttctttactaaaggtcaaggcctgagttctttgggatgtcttcatttggacttaatgcttcatgtctaattggtaaagataccagaatcagtgatgtgggattgttttgtttgagcatagcactgggaagaaagcattgaaacttgatagcaatacttaacattagattttttttttcttgtatcttctttggctccaaatagtagtggataatctagctattttaaccatattcatagggcatggcactaatcccacacctattctacatggtaaaagctttgtcaatgaggactccatttgcctttctcttgttgaaaatctaattattctttaagacctactcgaacataagcaagtatataaagtcttctgaaagtcaaattaatttatccattctttgggctcccatatcatcatctatcagttgaattgtaattatttgttcatatatttttctatctccctctagactttgagtccttaaaggcagaaacctcatcttactgatctttattttcccaggattcagtacagtgagcggcatacagaaaattctctgatctgaaggaggaatggtgctcaattaagaaatttgtcttctttcagattagcagggtggagatacttggtgttaagtcactaaagttttcataactttgtttcctctaaatgagcaaaaggtctctgacttgttttcagtgcagttgacccactaactggtatgtcactgatgtttcaggctcggtgtacaacaaaaaacactcctgtgttttcttcgtcagttcctatgagaaattctacagaggatcatagcacccacacaaagccaaaataggagaaatccaagataagtcatgtcatagtattattattacttttgaaaattatttcattttctaggaatagagcctctgaccccagagaatattgtggtctgtctcaaaggaggccacccagaaaaccatacacagtaaaaacaaaacataaaatatagaaagccttctgcagaggtgagaggtgatatttcacacttttttttctcacctgataaatgatagggcacactgctaaatctcctttcttcatttgaaggttgtttcacataatactgatttaaacccattgttgtctagatttcaatcctgaaggcagagtagctctgaataaaacatttttaaaaactacatatcctgtaataatagtttgaaagaacagttttcaaaagtgaaaatagagaggacaatcatcatagtaacaattactatagtttaagaatggcctactgtgtgctggacaccactgtcagcgtttgtaacagggcatcattaaggctcaaatcaatcatgcggaggtgggttatatttgtacagatgaaaaaattgaggctcaggaggataaacaatttaccaaaagttacatttaaagtagcagagcagctatctctatatatacaacaacatgaataaatctcataaccatgaagttgagcaaaaaaaagccagataggaaagactacacactgtatgattacatttatataaagatcaaaaacaggcaaaactaatcaatgctcagaggagttatgagagtagctacttttgtagagagaggttttactaaaaggagataaaaaggaatgttctggatgactagaaatgttctatattttgacagaacattattctgggtggtagttcaaagtgtataaacatgtaaatgttctatattttgacagagcattattttgggtggtagttcaaagtgtataaatacgtaaatacttagctgcacaaagatttgtagtctttactgtatataagttatatctcaatttaaaaagttaagtaaagtaggggagaaaaatgagtttagctctgtgtattaggccattctcacgttgctctaaagaaatactaagactggataatttataccaaaaagaagtgtaactggctcataggttggataggaagcatgatgctggtatctgcttggcttctggggagccttcaggaaacttataatcatagtggaaggtgaaggaggagcagacatgtcacatggccagagcaggagtgggagagagaggaggtgccacacacttttaaacagatctcacaagatctcattcactatcgcaaggacagtaccaagaggatggtgctaaagcattcatgagaaatctgcccccatgatccaatcacctcccaacaggccccacctcaaatataggggattacattcagcatgagatttgggtgagtacatacatccaaattatatcactctgtttagttccaatggtcctagtgaaaactagatactttttctgcatcagtttcaagtttttatattaactacaaactcttacccatttttccaggatagcccaaagaagtctttacaggtaatttaataaaccattgtatgtaagttaatgtagcagaaattgcagattacaaggaggttggttacgaaaagttgatatagtaatctgggactaagtttataaagagttttgtgaaccttactaaaagaaggggtttgaattttatttatataaggaactactgaggatttatatatgtatgtatgtatgcatgtatttgtttcaactggcaagttagatagtatatatttatagtgtacatcatgacgtttaaaatacatattgtggaatgacaaaataaagttatttaacatatgcattactctacatacttatcttttttttgtaatgggaatacttaaaatttattacagagtagcagttttcaaatagacaatatattgttactaactgaagtgatcatgatgtacagtagatctcttgaacttatccttcctgtctaatggaaattttctatttttttaattaacatttccccaaggtccccaaacccctagcttctggttaccaccattttactctctgtttctataagtttggttttttcacactgcacatataagtaagatcatgcggtatttttctttctgtgctgagcttatttcacgcaagagtctttcaaaattgaaggacacataatgtccttcaggttcatccatgttgttgcaaatgacagaatttctctttttagagctgaacagtattccattgtgtatatataccatgttttctttatccattcgtctattgatggacccttaggatgattccatgtcttggctattgtgaattatgctgcaataaaacatgggagtgcagatatctcttcagcatgttgctttcatatcctttgaatatatacccagtagtgggactgctggatcatatgatagttctgttcttaagtttctggggagcctccagactgttttccataatggctgtactaatttacattcccaccagcagtgtgtaagtgttctcttttctctatatcgtcataaatgtttattatcttcctgtatttctgctattctaacagatcttaagtgatatctcattgtggttttaatttgaatttccctgatgattaatgatgttgaacattttttcacatacttatcatttatatgtctccttttgagaaatgcctattaatgtcctttgcccatttttatattgggttatttgttttcttgctatggagttgtttgaattccttatatattttggatattagctccttatcatttgtatgatttgcaaatatattctcccattccataggttgtctcttactgggaattttatataagacattttataatcatatttgctgttgtgggtgacatggaatagagagaataagtgggaggaagaaatgcctaggaacagagagccagttcagaactattacaataatatcagcacaaatgggcagaccttggactaggagttatgactctgattggcagatgaaataaagatatattaaggaaggagaactgactacatgttttgatcaatcagatgtagagaagggacagtcaggagctgattgaagtggataggtgaactgagtcagattaaaacaggccctattcaacagccaggaaaacagggacaaagtattttattctggtgacaggctaacactagacaggttctcagggctctagtgaagtgatttgggattcagggaataattgtagtcctttaaaaatatttcaatgcttttatcagttgaactgtgtctcccaaaattcttgtgttgaagtcctagcccccagcacctcagaatgtgactgcatttggagatacggttttaaaagaggtagtttagacaaaatgaggccattaggatattcattagagttggtcccaatccaatatggctgatgtccttacaagaagacattaggagacacagccacacagagggaagaccatgtgaagacacaggagaagatgccatgtacaaatcaagaagagaggcctcaggagaaagcaactctgccgacatttttgatctcagacttctaacctgcaattgtgagaaaatatttctgttgtttaagctacccagactgtggcacttcattatgaccaccctagcaaataatagaaatgtcaacatggacctaagtccttttaaaccagagaaggcacaagccatgcaaactgggtgctaaataatacagctcagaaagtaggcagggccaccagggacccttgattagtgatcttctggccgagaactacttctaaatcctatcctctggtagagatgaggcgtctaatattctttcaagtttgattcttactgactcaaatttgaaatctcattgatttcaagttttattctcatctgtagcagagccaagctgcagatgaaaagtctttacttctgatgctaagaagaggcagaagcaaggaggggctgactgataatctcaatttcaaaaaacaactagctgcatatcaacatatagcataaaggaatgttagatccaattcagaattgactcaaaaataatcaagatacttgtttctacttgcacattcctttgccttcacatacaaagagaaattcactgtggttcaactactgttattaccctgcattactgcaaatttctctgaactgatctttctgtttcattatcgccactgttagcccccaataatgaggatcaaggcagatcatttcaggcatgaataggcacattgccatgattttctcatttgtctgtatacatttgccaaaaaaaggaattatccagaaatcttgactctttgtcttagtcttctaaatccaatttcaaaggatagattcttcctttgcaattactctcacatccatccttttatatattttatatataaaaatataataaaatataatataatattttattatatttttatatatcccagttgaggctcttttcatatcttgcccaaaccagtacaatagcctccttacttttctgcttgccttttagctctttcctcgctgcctacattcatcctgcgcaaaacttttataaaacacctttagaaaattttgaccacaatgctcttttcctatatattaaccttcaacagattctggttgcttatagtaacacattcaaacacacctctgtctagtgtttaaggctgtgggaatctggacttttctagccaatgcataactgccctagcttcccaaatcctaaaatgcattgaagtagtttcaagcattgcccaccacatgcctgccacacagccccgtggtgcttcctgccacacagctgggtgcttcccacccctgtgcttttgttcatgtgattccattccttagcctgtactctgccatgctccaccatgctctttcaagaacagttcaaatcccagatgcttttgctctcatttttctcccagcatgagatgcccttttttctgtctactcattgtacccatcgttcaaggccgagcataacttctaacttatctctgaagtctttcctaaccattgcggcattcaatcctttgagaaaggcttttgtggggtcaccagttaccagacgttgcctgagctctagggatcacagctgggtaagacactgttcctaatttccaggatgatgtcctctcctctttccttgagctccttttgcagttactacccaaagaattgcctattaataatgcgatgcctcaggaaatttcttctgtttttaattgccaattacattcgcttaacttaaaaaatgacttatcttccctaggtatagattgtaaagactcagtttccccccaaagtatctggtttaacatgggagtagagagagatatactattatgtatcaggtattgggctaccgtttttgctagtgcttctcctggtgtgatacgtctagcagttcattctatggggcacacaaaacccatgatattacagatactgttgcttaggataaggctaaagtaaatagtgcctatttaagtgtttttaaaaagtgtgttgatttaaaaacaaatgttaaatagtaatgtttcaagtaatagctatggcagaaatggtagaagtggtcctttaaagtctttcaaatgcattgtatgatatcacatttattcctcagaacaaccttgtaaattggaaaccaaagtccagaaaaataatagaacttactcaactcactaagataacagatcaaactttcctcctttaccataatacccttttgcatatagaaagatttagtttaattcttgaatatgggtgtctgacctgtgttttcatactccatctcctcaaaaagattgctttagctttctaaatcaaatccttcaccttcagaacaataaaagaggcataccagagtcattttggtgtatttctaagcatatttacaaaatatacaaggaaaaggacctgattccctggctgggtgagtgaaacgttaattcttcaccttggcacctcaacctacagctgtaataagggccgttatgcccaaataggcccttaaacggaagacctgctgagcagagacccactttcccagccctgctcaactgcctcagcttttctgccaactgaccaggcggaagcagcagcaggggaggagggactgcaggtaggtggggaggggatcattttgaaagccctgaatcccttgcagggaagaagcagctgctccttgtttttctaaacatctgtcccatctgtcccaggcctcagctcaccctttcgtggctcgagccagttaaacgtgaatttgacaaggaagcacttctgaaggctggtttgtgagtggaaatgaacctaagtgccacctagaaagtttcttctattgagaagaggtgagtagtgggtcttcagcgggacggctattaccttccttcattttactctcacaaaacatacagcttttactgatagaggcaggatttgtaacatcacccaaatcatactgtacgtcctgaggatattatttcacaacatagaggtacttctagagcccatattttaacgtctaggagagccacagtctttgatttgaaggagaaataacgatattgcacacaccatatcacctttatggtagaacaagctgtgaacaactagtgcgtgtggcgtttatcacatttaacagcgtgttgcttttatttgtctcctctgccacactgctccttgagaacagggacgttatttttattgttattttcccctcgtattcagaaccgtggctggaacttggcaggcatgaaatagacatttatgaatgaatgaacgttaacgaagaaaaaaaaaggaactggatgattcatttggttctccgaaggcgggtatgggggacggggctcggactttggcccagtcaccgagtgaggcacagtcccaaagtcctgcaggtccgcctccagtcacggccgacccgggtctgcaactggtgcacaagcctcctgaagcgaggctgcgcgcgtcctgcacggtcccgccccaaaggcacgcagacacgccccctttcctggtcattccccctgcgaagtcagttccactctagttacaggattggggcggggccagaaaggcgcaggcgcaacgggcggcggaagtaggagcctgggaaggaagagggaacgggtcctggcggtgctttgcaaagggcccgtgtttctgttgcgggaagctcccgggggtcgcacgtgcgtccgagcccaagcccctcccctccactccccttcctgcgtgccccggagccgccaagcggctacgttcttctcggcccgccgagatggcgctcgaccccgcaggtaccggggcgggaagcggggtttgccgaggggcctcgccccgggtctcacgccgcgggccatgcgggctggatgccgacctgggaaaggtgcagagctctgggtagcattgcttccaccagcgtctcctcatacccggcggctgcttcgcccggtctgaggtcatcttctcacttgttggggattatggttatctgaggttgcgtttgttgtctaaagtatcatccattgtggtttccaacttaacgcgactagtctcttcattgtcaccctcttttcgccccttaaggtcacagatgcatttaatgtatgctgcagacactctggccccagaaaaatttgtatatttgttctggcgcacagttttacatttctgtttgggagttcatggaccccgagttcatccttgtaacccaacttaaaaacatatttcaaaggatccatcactatggcaggagtcagtttctttggaaaggatcttcaaaatcttgaatgttgttttaatctctttgcttccagccacttccgtttgcagcaatagttaacttaccctcgaattcccgtccttgtggaaggtcacctgcagtatctttgcgttaggctatttttgcaagggaatagataacatttttggagggaatggtagttggtctagtccatttctttcattttatggatacaaaaagtcaaaacattgagaggtaaatggcgtcaaacttgggagattcagaaatggaaaatgctctttcggagccttcaaggagcatggaaaatatatgtagcacagaaataatgttttaattgaacatgttattaccatgctaagtgttctctattatccaacaataatatgtggtatggtaggtccttttagctccattttacagattaggaaactgaggcgaagagaagttaagtgactagtccagcaggtagtggtagatcagggagtactctaatttgaagcatagaggagttctggaacataatgatcatattcattttggactaggtggttatgaagcagttagcagttgatctgggctttgagggatggaatttccagtggttggagctggagaagaggcagccctatgagcaaaggtttagatagtaaggtgcactgtgcgatgcttggtttcaggatgactaccatgatttggttcttgagggtagaaggggtagagtataagtgaggggtgagtaaggaaggttcaagtttaggcccatataatttatggtatcttttttttttattttactgaaacggagtctcactgtcgcccaggctggagtgcagtggcgctatctcggctcactgtagcctccgcctactgggttcaagcaattctcccaccgcagcctcctgagtagctgggattacgggcgcccgccaccacggccggctaatttttgtatttttagtagagatgaggtttcgccgtgttcgccatgctggtctggaactcctgacctcaagtgatctgcctgacttggcctcccaaagtgctgggattacaggtgtgagccaccgcacccagcctaattatggtacttctgaacttgaagtgacctttaaagtaatctcatacagatgaggagactgagaatgagagaggttaaagatttccatatatctacactttttgaatttagacaaggaaatttgggaaaaaagtcttcatacttgctctcttcacttgcttaccttccagttactcataagccactccaatcttgtgttgtacccaaggccacacagctagttgctggtagagtcaagtctggttagaacctaggtaatttcatttccagtccagtgctgtagaccatgccaccttttgagtattgattaaacaaagacttgttgagtgtctggtatatgtcccatattgttctggaccctagggaacagtagtacataggacaaacaaaattcctgctcccaataaagcttatctagtggtagaaaaaacaattaacacccccttttccccctacacagacacgtgcgtgggcacacacacatacacacacacatttttacagattgtgataaacatgaagaaaataatgtcatgtggtagatggtgaagagattagtcagtgaagagctttatgaggaagtgtcatttgaattggaatctgagggatgagaggaagctaggcagagtgtgcttggccatcaggtagcaaatacttaaaatatttaacttgaacgtgggtcagagtgtggaggggatccataaggaaagatattgggaaagtaggtagtcactaaatgcctagatattgcagaggctgcaagtcctcaaaggctggctgtgataataaagcatttggattttttctaatggcatcaaatgcctttagaatcttttaaagagggcagtaacataatttatgtgtttattatcctcgctacagtggtagcatgcattgtagaggggtcaggtcataagtggaagaagggagacaggttaagggataggagcagtagtccaggccaaatatgtttgtatcttagcccaagatggtaatagacagatggaaagaaatatacagcgtcatgaggagaaattgacaggacctgtggttgcattgaataaggatggtgagagaaagggaggaaacagtgggcaccgtggctcatgcccttaatcccagtgctttgggaggccgaggcaggcagatcgcatgagctcaggagtttgagaccaccctgggcaacatggtgaaaatccatctctactaaaatacaaaaaatttagccaggcatggtggcacacgcctgtagtcccagctactcaggaggctgaggaatgagaatttgagcctggaaggcagcggttgcagtgagccgaggttgcgccactgcactccagcttgggccacagagtgagacttcgtctcaaaaaaaaaaaaaagaggaaatagggataattccagtttttgtacgtcagcagctgggtggaaggtcatggtcaaatctaacaatgtgattattggaaacttcatcaaaggaaggaatggaagcaatggagagtaaaaaagtggagtcagcaagtaggaaggttttttttttttccctaaattgttttgtctgtttaaattccagaataaaatgtatggaagccagtttttttttttttttaatttcgtgtttatttggttcatacgttgaagcttagtttcacattttgatgttttactgctttgtacagcccacgatggtatttgcccatattgagtaagtgaataatagatacaccaattgaggttcatttagcaaaatctgttttcctattggtttattttgtattttctgtgatctttatagaagcttgattttcatttggcagcaacttttaattaactttgtagggtctctgttttcctcaagaaactgtgaacccagcgaaaaaatgcaggttacatgcttatacatagttttatttacattattttccttttttttgttaatgtagcagtaataacagcaatctttgcttattgccatgttccggacaaattttcagacatgattatattctcagatgatggcccataggaacctgcacctgataaatttgatttttcactttctctatcaactaaagtaattcctttctcccttctttgacctttcccctttttagttaggttctcttccctctgtcaacatagattcattctctacttatgcagaatggggcatggcagcctaagggaagtttccttaatcaggtgtgtgtgtgtccctgtgtccttctattgctgtttttttccgggaacttaataaaaggaggaagatgggacagagatagggcttagggggtggaaagtgggttcaagaatttcatgacattccatgagaaggtgtttaaggtatatgtgtcttgggaagatttaattatggatgttcttggaacatttgggttgcagtactccaagttggggttctttcagtggttcctgtgggaatgtaggtaaattacctttaggggtacaggaacagtactagcccttacatttactagaaaattttaagttagacatgtaaacaaacttgaagaatcttttttgagcattgtatgtttaatatgtaaaaggttgtggagttgattagaaaaattttttattttttttagtgatggggtttcaccatgtcgcttaggctgcacttgaactccttgctcaggagcacttgaactcctgggctcaagtaatctgcccacctcggcctcccaaagtgctgggattataggcataagccaccctgcctggcctataagaaaaattttgattttattattgccgccatatctctagagtatcttcttagacataaattacgttggtggctcagaacaaaaaaaaaaagacctaacatctacattttgtatatttataaattaaaagcatatttgccatagaaaatacattatttttgtctcatcggattaacaactctctgatggttgctctgtgaaatttgaaaaacacaggcttaagcaaagacaataagaaagaagaattgagatcaaagaggagtatgtgccatggcagtgggttgggggttgggatttcagttttgaagcatgaaatgatctgtaaaccatttcaaggattttgaattttatactaagaacaatgggaagacactgcaagtttttaggtaacggagtgacaaacagaactctccttattttgtgttgatctgacttttgtttagatcaagaataaccttgatctcagccacatactgcatacatgatgtgtctttccagagtatcccatctggaggtacatgggtatctgtctctcgtaggtgatgttaattttgattacccactcaaggttttgccctgttttgttgccgtattttctctgttttgcaattagtaactaatctgtgggaaggttaagaccttgtaaatatttgcttctcatcaaatatttctctttgatttggggtccattgattttttttttttttttttttacctgattcagtctttcccataatggttgcaaaataatgattttctacctccagcacactcccttcacatttactagatggttgttgacattttactgtaagcaagagattgctttgtttcattttcattgatttatgaatttattattggtatttttggtaaggactcatgaactgctgtattttcaatcgtttgtactctgttaatgtacataagtattttttgtgttcaaatttccccagatttggccagagttccctttaagctagcttctggatctttgtcatatactctcaccatttttttgagcatttcctttttattccctcacacaaggtatcactgcttcatcttgtacctaccctggccaatccatacaattagttatttctctgagaagccctggttccttttatttgggcacagtattagagagtaagagctggtcactagaactgcatgtaatttgggtggtttattaatagattgcctttaggaaaagaaaaaaaaaacccttaagagagtaaggaaaataggagacgggaggggaaaaatctgagcaaggatgtggtttcaggtcttaacctaatcagctctggtgtaccacatggtacatacagtttattgtgccttggaggcaagggagctgggctttcatgccctttttcagtcattggttactgtagtagttgggagagggacagcagcaaggaaaacagcaaagggctaccatggccaggggcagtcctgagaaggttgcagatgtgaatgctccaacattctctgctgcaggagggataccagctctatcctaaaaataatttatctgaatctgttaggaatcttagttggatagtaagagttttgatagtagtgagagttcagatagtgacaggtcagataggaatgggtacttgcacacatgtatacatacacacaggtgtgtgtactgcatccagtaaagtgtcacaggttgtggttaacaagtttgaataacactggcttaagatatacctaaggtaggctaagctgtacttttttttttgtcttctaggccatcgtacatgctgttctctctagaatttctcccatcttccctatccccaggtctactgaattcttgttcatttttcacaactcaatttaaaatcagtttcttaggagagttttcctgattgccaccacctccagttaaacatttttttttaaggtttaggattaaaaactccaccaaaatatcatataacctatgtatagagttgttttccttttagatataaaatccttttctttgacgaataaaaggaaaccttttattcagatatgatgcgcctatatgtaacaaataattggagaaataaagaaaaacataatttgaagaatgggaatgttctacctgtgtaataaatagtaaatatttttcatatgaatccacctctttaaattcattagagaccagataaaaggataggtcagttaatttcacctagattatagaagattggccacctcctcccagggaggtagtgtactgttgtggaatcaacaccgaatttgggagttagtaagactgacttattgtctcagactttgtcattaacctgtccttaatgacataatatgaggtttgaggatgagaagtagggaaagagatgtatcagataattgctaaggttgcttcaagccttgaacttttatgattctaaatattaatacttgtcataggtctcaaggggttcttgactccacacagaaataaattcaagtttgtgtcttgttgcctggattagtatcttttttaattttttgtttggggtgttaaaatcatatgtgtaaaattctgtagatgtcaaaaatatgagaagtattaccttgtacttgatataagtggaccaaacaaaattgtgcccaaataaaactattgatacccaagttaacattctccccgacaatcctctgttctatttttgcattttttctttttttttgagacagagtctcgctctgttgcccaggctggagtgcagtggcgtgatctcagctcactgcaagctccgcttcctgggtttgtgccattcttctgcctcagtctcctaagtagctgggactacaggcgcccaccaccatgtccggctaatttttttgtatttttagtagagatggggtttcactgtgttagccaggatggtctcgatctcctgaccttgtgatctgcctgcctcagcctcccaaagtgctgggattacaggcgtgagccactgcgcccagcctatttttgcatttttaagtaagaagattgaaggaaaaaattgctaagaatgtggtgtttaccatcctgcattgtgttttgctaaagaactgttactgggagattcttacagatcaaaagatatgttaattacctaaacatgactaattggaatgtagagtatcacatgtttatgctgcagagtaaggaaccttgcttgactgattcattattgtatacacaatccctggtgtggtgattggtacataataggtacatacgtatttgtttacagtgtatctgtaactatcaaatactaaaactcttttaaatatacgtgtcatttgttaaacagttaaaacaattttattgcatatttaccatatgctaggagttagagggaattacaaagatgagttagacgtggtctctgacctcattaaagttaacttttacttgcagtagttctcagtctagctgcatattataattatttggggagccttaaaaaatatcaatgcctggcttttaccccagcatttctgatttaactggtctggggtggggcccaagcattaagaattttgtacagccctctcaggtggttcttgggtacagccagggttgagagcttctggtaccaaaatctgtcttagtctactcaggctgccataacaaaatcccatagactgacttgagtgacccacacaacatagactgggtggcttaaaaaatgtacattaatttttttactattctggaggctaggaagttcaagaccaagattcaaggagatctggttgctgacaaggactctcttcctgacttgcagatggctgccttctccctgtgtgtttacatggcagtgagcggggagggatgggggaagaggaggttgagggaggaggaggagagaacgagaaggagagagagccctctgcttcttatgaggccactaatcctatcgaattaaggcctcacctttatgaccgcatttgaccttaattacctcccaaaagcactgtctccacatacagtcacattgagggttagggattcaacatatgaatttggagaatggtaaacacaattcaactcatgccaaccactgatctagcaggagaagattggatatatagtgtgatgtgatgtgtttaagtccaggtgtgattatagcaacagaacgagtgcaggcaaaatcttggggttagaggaaggagaaatcactttttagtgctggaggtcaggaagaactttgggatggagaaatgttgaattgagttttaaataagtaaactttgataacaaaaaataagaggttgaagatggaaaataaagactgagattgaactagagtttggctttacctgttacttgccgggtaatgctgcaagattgctttgagctttctgagtcttaatttctttgtatctgcttctaaatgagatgatgtttgtaaaccagttccatccaccacccttttcttctttctgtaaatatttatcgtgttgcttctgtgtactatataactataagccgatttttcaggtaagaagggtaacataaccactaggttggcaaaatgaaggtttacattgtaggaaatttaagttggaattgagctgctggtgggacttagaaaccaccagtagatagttgaaaatgtggaaagttggagatggagatgagcactgagaactcagtatcataaacactatctttaaaggtggaaccttgtgggattgccccaggaggattaagtacagatattaccttggaagtgtgtatagttctagtattgttaccattgttcaggatatttttgaaactcctttaagatttccctttggattcttcagtacactcgtcttaatatcctcattttggcaaatctttgttctgaaagttaatttgaatttcagccaaggtttaaccagagacagtctggtgaaggtgatagacgatcatcctgggaaatgctgcctcttcccttgtctcagtttgttttatgttgctataaatgaataccttaggatgagtaatttataaagaaagaagtgtatttagctcacagttctgcaagctatacaggaagcatggcatctgcttggcttctgatgagaacatttatgctgtgtcagaacatggcagagaagatcaaaggggaagcgggcatgtgtgaagagggaccaaacgtgagaggtgtcctgacttttacaacaatccagtctcttgggaactagtcattttctctgagaaccagcccactctgaagaactagtccactccagcaagagcaggaattcattactgctagaagggcacaaagctgttcatgagacatctgccctcgtgtcccaaacacatcccattagggaccacctccttacactgccacactggggatcagatttcaacatgagatttggtggggacaaaccatatccaaaccatattgctcccaccccaaaaaagttatattatggaactggttttcatgtttacttcagattagctctgaagccataccaagaaagatgatgtgatttgagcaaaggctgagtctttgaaataagtgaaaaacccttcaatataaaaataattctcctattccattatcaaagtattatattttctttataggaattctatgaaatattgtaagataaaagaagaaccagtagtaacatggtggagagaggcttgaggaacattcataggattgagaatattacacaatcttctagatttatatgaggaaaaaaagtaaatcaggcaatgtattgctaagaaggccacacgtatgctgtcatttattactttctcaaatgtctgctcctgtcccataacactgctgattttctgccggatatcagtgggaaattgtgcttgtaggcgcaaagacagtcttgaagttttaccaaataaagtaaatgtgaaacttgttcatttaagaaattatggccacaatggcggttgtaacacagttctaaaattggcatgtcttattgcataagttaatttcctgctttggtatacttttaaatatgttgtccctttctggcctcctcttggttaaagcagtgtgggtggaagaggaacttttcacacctagcaatctgcagaatctgaggtccaagaaataggtgctattgggaaatgggcacatctagtgtgaacaaggtggttaattaacagtgaaagctgataggacagagaagctcagatgaagcatactattgtgggatatgggtgttacttgacccagaagctaagcagaaataggcacatctacctcactgatgtactttccgtattttgtaagcgtttgagcttatacaaaattagattgttagtggctgacctaatatttgatgtttattctctttgaatgtgtttttcagccagctgacaaattgctccccttgcttttaaaaatatttttttcccgtggtaggaagcagaatcagaattccctttgattttactttctgataaaaaattgagaactgaattttcaaattttgctggttcaaatggtgcttctgaaacacaaacttactgtctaaaggttgtttccctgcttcagcataactgtggaagctcatttagccttgtttgcttaagtctcctaaggcccccactccatgtgcatggtggtgtcattgaaggtttagagcctgggttacatgatcttggcattggcactttattagaagcttgggtcatttcacctctgtgagcctccacttctttatctgcaaaatgaaatcaaaatacttacctgagagaactgttatgaagactgtatgtattcattgccctcatcttcaggtttcacagacaggcaggctggagcattgcggggaagaaaacatctctcctactcttgatttccctttttgtttttgttttgtcagttctagtatggcttgaaggaaagaggtgaattttcctattttaagatgtctcttcgtctacccttcctcattttactctgtcgttatagcaagaaggtatgaacaaactggcaagaggaatatctggtcatgagcatacatatctttgtgctgttgagaaaaactggagtctgcctagattcctggtgtgaagcacttagtgagaactaacaattgagaacgctggtctcattgtattgtatatcatgccttcttcccggggctctgccttttgagactcttcatagctagtaaagaagagggaccagtcggacgtggcagctcactcctgtaatcccagcattggggaggctgaagtgggtggatcgcttgagtccaggagtttgagaccagcctgggaaacatagtgagatcccatctctataaagtacacataaaaaaattagcttgatgtggtggtgtgtgcctgtgtttccaactacttgggaggctgagataggaggatcacttaaacctgggaggtagaagctgcagtgagctgtgatcacgccattgcgccctatcctgggtgacagaatagtattctgtctcaaaaaacaaaaaccaaaaccaaaaaaccccccaaaaaactccccccaaaaagctaaacaaacaaagaagagggatccaaatatagaaactattgctaatgagaacactgttgcaagtttattacaagcatttttcatgtttttcctacagagtaaacagtagcaccaaactgtcttcaggagcaagtaagtgttaactagtaaattttttaaaaaatggcattacctaagtaagtatcaaattagttaaattagaatgttttcattattgaaagggcataacttgcccttcatatatcacattctttgctattaaagactctgtaatattcttatttgcttcactgttgtctttgtggattcatagcaagtgctgttgtcagtagccttataatctagcactgccatattgcaagaacacatgagccccaaagcaaaatatgagctaacaaattcagccagtgaaaaaggtgaaaattgacttccaggtgatgatagaatgttgagaagttagagctttggaaattttccctgatggtgttatcctgattctttaattcagtataaatttatgtgactatacagtagcaaactttcaaaatttaatttttagttttgcaacctctgtacaaatgtataacatatatacaccagattgagattaagagaatcactttgtaatattgtgaatcaaaattgccatttctataatatttgtaatgttgaagatagctttttcaaaaattataattaataaatcattgatatttagtggctggtatgctatcaagtgggaaaatctttagtagaattttcatatttttaatactgtcatttctgatttaataccaagaatttggaaaattgaaatcaatattaatacaattctggaattatttatttgccctaggaagttttagaagaaggatcagatgtcttgacaagccgttttaaaaatgtgtttgataggaatattatagcttagaattcgtaatgtaggtaaatttctgttataatttatttttggaaaaatggtttgatattacacatctatgtctgtattcaaggaattgattcaaaataatattgccttagttatttaagaccattggaagatttatagagcaaatagaagattcatcaggatgcattatgaataagttgtatagatgaaaattatatatgtgaaaaaaagtaacaatttgaaattaattttgtaaattttgaaaaaattttgtaattttgtataatccaatgtcttctaatctgtttagtaattacactgaatagttactgatgtctagttatgatttattctgtaggcaaggcaaagaggaatttgtggagatagtctcagttttattcttttctctgtaagtaagcatcagctttccactctacaagatgtgtcacacagtcccttcaaattccacaggtccgcaactgaatttctctcttatctgatccttcttttgtattccctatctcaataaatggtcatatccttttacttgaggccagaaaactagcagtcctccttgaatcatccctttccctcatcccctttaggcaccatcaagcttataggacctccctctgaatttgtccttttctctccaaccatgcttccagttccttctcagtgctttgttttgtttcctctttttttttttttttttgagacagagtctcgctctgtctcctaggctggagtgcagtggcatgatctcggctcactgcaacctccgcctcccgggttcaagcaattctcttgccttagcctcctgagaagctgggactatagatgcgcgccaccatgcctgggtgatttttgtagttttttttcactagagacagagtttcatcatattggccaggctggtcttgaactcctggcctcaagtgagccgcctgcttcagcctcccaaagtgctgggattacaggcatgaaccactgtgcccggcctgtttccggtagcttctggcaaagctaaggaaaaagagaatgtgtaaataaatgatacagcaaagagttcagcaaattatgacctatgggctaaatctggaaaggcctataagctaggaacggttagtaacatttttgaaacgttgttaaaaaaatgtatatatatacatgtacatacacacacacacacacacacacacacacacacgcgacagagatgatatgtaaagcttaaaatgtttatactctggttcttagcagaaatagtttgtctacctttacataggcaatgaaaattagaatacaaccacaggtgttgtaaagagaaaaaaagtcatgtgaacaccttcatatcatttttttgtttgaaaattaaggcgaaatagatagggtcattgagaaatataattttgctaaaacttcagctgactctagaattagtaaaaagcccttacaaaattgaaacaatagttacaattctctttgtgcctgtgtgtcttacacatgcacacatacatacaccaaaacgcaagccctgataggttgtgtattggtcaggattccaccatggaaataatcagtaggagaaaaaacatatatatatatcttaagatgggtatatatatatacacacatatgcatatatgtgtgtgtgtatatatatatatatatgtatacgtgtcaagagatcttgcaagaaattggtttatgtgattgtagggaccagttgggcaaatctgaaatgcacagggcaggctgtcaggaagggcaggcttggaattcttgatcttgagctgaagctgcagtcagcaagtgtaattcttcaggaaaacctcaattctactcttaaggcctttgaactgattgtattagacccacccaaataatctttgataatcttctttatgtgaatctgcaaaataccttcacagcatcacctgaattaatgtttgcgtgaataactgggggctataacccagccgaactgacacataaaactgaccatcacaggtggtttttaacaaactttcaaggaactgagaataatctttgttttatacacaatgttctagataatataaagggagaggaaggtccctaatttattgtttaaataatgcaactttaacaccaaaacaatgcaaagataagggaggagagtcataggcaaacaccgacatggtgacaacttgaaaagattttaaacaaaatttgagcatccaagacagaggtcttgctagttactacttaaccacttttctaaaggatgtagccagcaagaattaaaaaagaggatgcaaaactgtttctgattgtctacatagaaattggaagagaatcttttgtcagaatattaaaattgagagaggttttattgattataaggacaacataaaaaatcaattgaacctaaacactagcagtaaataattacaacaggttatttatggaaagatatatttaccaatagaaatctaatgaaagatgaacagtaactttaaggagaaaattatgaatctttttgtctacttagtaacctaatttctaatagttatgtgttgaaatctcccactatgagtgcagatttctataaatttttaagctaatcgattttaaattgaggtaaaatatacagtgaaatttacagatcttaaatgagttttcataaatgtatatatcctaattaagacatttttcagagagtaccttttcagctcccatatataaccactgttgtaatttttatcaccatagattaactttgcatgtccttgaatcatggcagtatgtactcctttgtctgctttcttttgctcaaatgtttttgagattcacctaggatagatcacctatcctactgatagtagtggtatacaaatagtatcattgttttttatcactaagtagtttttggctattctgaataatgcttctctaaatagacttgtacaagttgtcttctggacttatattttcttttttttgtttttgagactgagtctcactctgtcgccaggctggagtgcagtgatgccatcttggctgactgcaacctccgcctcctgggttcaagcgattttcctgcctcagcctcccgaatggctgggactttaggcgcacgccaccatgcccagctaatttttgtatttttagtagggacagggtttcaccatgttggccaggatggtctcgatctcttgacctcgtgatctgcccgcctcggcctcctaaagtgttgggactacaggcgtgagtgagccaggacttatattttcatttatcttgcataagtgaatacctaggagtggaacatatttaactttataactcagcagttttccagagaaatgtatcatttcacagtcccatcagcaagatatgaaagttgcagatgcttcacattctctccaacgttggtgttgtcattatttttaattttagtcattcttgtgcatacaaaatgatataaggggtttcatttgcagtctcttgattaatgattttgagcacctttatatagagagagatatatatatatacttacaatttgcatatcatcttttgtgatgtgtccattcaagccttttgtccatcttttattgagtttttattattgatagttaggggttcttgatatattctggactcaagtcctgtgttatatatatatgaaataaatttttcttcctggtctgtggcatgcctttttaaaattttcttaattgtgtcttttgataaacaaatgatttcatattagtgaagtcaaatttataatttgtataatttatttttactgccttatgccctttttgagaaactgtctactccaaggaattgaagggtcttttttgtttaatagttttagtttttacattaggcttatgatccattgctaattaatttttgtggttactgtgaagtagggggtcaaagggtttagctttttttttttttccatgttaatacggttctgccaccatttgtcgaaaataattttatttcttcataaactagccttggtgcatttgccaataaattgatcgtatatacatggaagtatttctggatttttttttttttttttttttttgagatggaatctcgcactgtcacccaggctggagttcagtggtgagatctcagctcactgcaagctctgcctcccgggttcatgccattctcctgcctcagcctccggagtagctgggactacaggcacccgccaccaagtccgggtcattttttatatttttttttagtagagacagggtttcactgtgttagccaggatggtctcgatttcctgacctcgtgatccgcccgcctcggcctcccaaagtgctgggattacaggcgtgagccactgtgcctggccttgtggattcttttgttctcttttgttacattactctttttggctacccaaattatgccagcactacgtcgtcttgacttctgtagttttgtagtatgacttgtaatcgggtagttgctgcatagcatctaaatttgttcttctgttttagtgttgttttggctattctatgtcctttgtgcttccttgtatgttttttcacttttttattataactttattttttaataatataataataataataggaaactacaaaatcatgcagtttccatgtacctgccttcttccctttccctaatgatgctatcttacataaccatgatatgtatattctcagtgggtgtgataactgccttcaaaaggataacaattgacattggtggagacagaaatattactctcttaatgtataaaacaatgttacacccgcagtgcataaacatatatgctatatctgtgatattaacatttcataggggtacattaggaaaaaatgtcaaaaaagggtccttttagggcaaaaattaaaaaaggttgggacaggctcctataattaaatgtggacaaggaaactgggaattggcaatggtataatattgttgattcaggtactaatcttagtcgaatttcaccactttttacatgcattttttttgttgttctgtaattatatgacatctgcatcatgaggattttctcctgtgattgtttctagaagtttttttctttaactttttattttgaaatatagactcacataaaattgtgaaaaatgctatatagtcttgagtgtccatctcatagctttccccagtggtgacatcttatatatctgtagtacaatatcaaaaccaggaaactgaagttgatacaatactgttaactagattatagatcttttcagttttcaccagtttttacgtgtactcatatgtgtgtgtgtataattctgtgtaattttataccatgtttctttttttatagggaaagcgttcagagttttagtattaagtatgatgtaagctagaagattttttgtagatgcccttcattaaagaagttctcttctgttccacgtatactgattttgttttttatgaatgcatgtagaattttgtccaattttttttggcatcgatatgattatatggttttccttttttggactgttaatatacctcatggattacatggtttgaattttgaatggtgaaccacccttgcctccctggaataagtccaacatttttgttatgtgtctttctttttatgtattgctgagtttgatttgttaatattttgttgaggatttttgcatctgtgttcatgaggcatactggtgtgtagatttggtgtgtgtgtgtatgtgttttgtaaataccgttcttgcttttagtatcaaggtatctgtgccttcttgagtgagctttggttggtttgtagtttttttaaaggaatttattcatttcattctagttgtcaagttcattggcctaaatttgttcataatattcccttattatttaaaaatatttatcatttctgatgtttgaaatttgtgaccttagtctggctagtggtttataaattttattgatcttatcctctcgaaccagctttaatttcattgttttttttttcttttatttgtgtggtattctttatttcattgatttatattttgatatttatcttttcctcttttgcttgctttgtgtttattttaccctttttctggtttctcaaggtagaaacttaatacaagaccttttttctttttctagataggtttttagtgctacaaatttcctgccaagtactgttttagctgcatcacataaattttgatatattgtgtttttattttcattcatatcaaaatactttcccatttcctttttggcattttcttagatccatgggttatttaaaagtgcgttatttagcttacaaatatttggcgattatccggagatctgttattggttgctaatttaattacattggtgtcagggaacatagtttgtagggcttgaaattccttcagatttattgagatttgttttatagccagattgtggtttatcttagtagatgttctgctgttattaggtagagtattctataaatgttagttaggtcaagttagttgataatgttgttcaagtacttcacagttttaacgaacttaaatatatgtttttgtaatatgacatatattttacatttgtatatcatgcgttcagtttttttttttctatcagagcatattctctgttacatcttgtgagagattttattttacaaagaaggttacaaaattatctcccattcttcatgcttttctgtagtgtggttttgttaccaagaatagaatctgatttccttccacctgagtgtgggctatccttaatgacttgaaatcagtatagtgtagcatgaacgaatggtgttgcatggctccaggtagagaggccattggtagatgttctggtttacagtcctaactgagcacttcttttggccattccaggccagatgtcagatacatatatgaaaaaagaagtaattttggaagtaaatcctccagccccagcttttgtagctggtgggactctagagcaggtgttcaatttgccattttagtccaattttggaagttgtgtttaaaatgcacaccagagccaccagaactttgagtcttcccagatcaggcccctctgacccatagtttattgtttattgttttacatcactaaatttgatgagtagttgttgcacatagtagtcattccccagtgtacgaaggggattggtttcaggagccccatatttaccaaaacctgtgcattctcaagtcccaccatgggcccctcagaacccatgtgtatgaaaagttggcctgaaaagttggtataccatataggttcgcatctccaaaatattgtattttcaatctgcatttggttggataatatctgagtattaagtggacccccacagttcaaacccgtgtcgttcaaggatcaactgtaataaggagattacttctttttctgtagggtttgaaggtggtaagcattttagttcctatatatctgaatgtccttaacctcactcataattggtagtttagagactctagaattctttgtaattctttataattctctctcagaactttgaagttatttctccattgtcttgttgcatcatgtcttgccagtgagccatgatgtaaatctgattctcattcctttatgtaggcagtgtttattcccttttgaagcttttaggattttggggtttcagacatttcatcagagtgcatttaggtaatccatggtccattgctgtctgaggactcaggtctttgtatttgcctcagtatatttattatacttaataataatctaaaatcttctttcctatattcttttaatgggaaactttctggtcttttggggataaatacctatatatacttttttcacccgtggcctgaaggcagcagaggaggtgaccatttggctcctactgagtcactttaattaataactgtttagtttcctccagggaagttttcttgctttccatatttgctgcttcagagcatggagcagcacccacttttggcatgcgtgtttttcctggatactctatagtaatatgattacctcatttaatctgatctaatctgcctttttttctttcagagattcctcatcttttttggttcactgaaggcacttatcctttgtttatttttcaggactctcttagcatttaaggagcaggtgggactctagagcaggtgttcaatttgccattttagtccagttgtggaagttgtgtttaaaatgcagagaaatcacacacgctttgttttcatatggacttgtagttccaccttttcttctgttagttcttttttaggctactcttactactaggtagaaaaactacttgtgtgtctcttaatcttgtatctcttcatctattcttggatctcagtatcggtgaaaatcctcttttgtggattatattaataagggaatgatttagatgccaactttgacaagattgcatggaatatgttataaagtaaagatgttgtagtatagtttgcagaaattttaagaaacatgttgcttgtattcctcacatttttgttgttgtatataaaaaaacattgcaaataggatgagttttaatgactaaaataatcacaatttcataaggttgtaagttttgagtatatttgcataggcttttattttaagtaaaccagagtcttatttttcctttaatctggtgatttgcttgagactttattaaagaaagatcttttttttttcagaccagcatctcagacatgtcgaaaaagatgttttgatccctaaaataatgagagaaaaggccaaagagaggtgttctgaacaagttcaaggtaacattcaaatattcatgtaaagatcaaatttatttttaataatatgatctgaatttaatccttagccccagaatcaagtagtcaatgaattaatatgtatgaattgcttctcaccctttcgctgaaataccagtatttcagctttcagaacttccagtgatgttcaattcatttacagtttaaaaatatttccctaaattactagtaaaaaacattttttgtttttttaccctcagaggtacagttatatacatggaaaaacttggtatgagtaatttggagaaacaagttattcttacgatttttataggggaggaagaaacatcaaatctaacatatacctgtttcccatctgtcaccatattcgcatacatatatatattctaaggtgattttctttggtgtcattgtctattactgaattgttaatagaatcctgataggacttacagtgagtctggggtttttgttttgttttatgtttctaagtggaagatatttatgtaaatacatacactagacagctacaagtgtatgttttctttggaaaatgttttaacatgaaatactcctatagatctagagacatcagtgattaatatgtaatattctagtgaaacatgtaaagaaagcagtgaaaggtgaatagtgaggccataatacatttgtaaatgatgagttattagaaaagcacatggcaatattactttagaaatatctttaaaaaattctgtctcttggaagggccatcaaaaagaagtaataaacttttatgggcataggctattttcctggctttacttcttcactttccctgtggtcatctttattgagggaccacaataatttttagtgaggatgatgggctgcacttccactgcaagcttcactacaggggagcagggctgtgtcaactctaatttcaggactgggtcaataacatttggatactaggaacgcttttgttcccttccctgtcctctgcccttagagaggacctttgcaattgatgaatggaggcaataaaataaagagtagttctttggaatcaacaatgtgtgatggtcatttttgtttcttcaataacttattatgacctattccattttaaaactcatataaataaccatccaatggttttactcttgattcttgtgagttagtttaatcagagtacctttctttaacacctacccccagatgtcttgagacgtcaacctattgacacctgcaggtagtgcatgtatggcattggtaggtgtcatgtttatggtcacaagaggtacatcctgcacattcctcatacaacttaaaaaatatatatcctgattcaggtgaggggagataaaacttaaaaaccctataataaagttgtagggctttttactgctaggaaaatttacttattactgatatatcagtctaaagttacacatataagttgtatgtgtgctgtcatgtagcatattgtctttatacctagaatgaaagaaagctagctaactcaattacagatttaatttttactgacataattccaaggaaaatgcagaatgattgtatgactttgagttttatttttggtttttgaaatgaaagcgtagagtataactttaaaatatttatttgtgttacaaaactagtgttttataatggtacagaaaataaagtgtttaattttcacttcatcaaaagttaagttgtttaggatgttgacgtagttaagtttttgctgttttaatatacttacggtttctgaagactgaaagcatcttaaaatctgtgactcatttggattatttaaatgtattcatctatattagaatgtaataatataatttgaatatcttatagataattatgtattgattttttaggccatgtgattcaaaacaatattttagaatctaaaattgataagagaataagaagtctttagtattttctaaccatataaattaggaaatcatatacattagaattattcaagcagcagaagaaaacttcatttaaactcaacagttatacataatttagaatcgggacatttccattgtagtttatttactgtttatagcttttgctttattaaataattataggattttatataaaagcattatatatgccaattgtatggttcttagataaaagatacaggaattttaataagtgatctgactttctgctaaatgcctaaaacatgattatgtaggaaagcttttccgttagattttttttttaatgtcatttcaacccagctgatcataagaattgggtcagactgccagcaacttaggtttgtgaagggaatggaacagcttttccatggacaaagagaaatgaaatcactttcaatgaaagaaagatgcctcattatagtcaccaacagcagttattgacagctacacttcctattaacaaggagcatttaactaagagtttggctgttggatctttggacttgatctaatttgctagcattaattagtttcttttgagcacagacacttggtgctcacagctatagatttgcagggctaattaggatagaaaattgaacagaattgggtaaggcattaaccttcaaccattaccagctgggacactgataaagcccacagagtccaaatgttacctattgatgtgaggagtaccctaatgaatatcaatttcagccaggttgctatattcttactagttctgtcttcattttaattttttaaccagcttacatgataccctctttatctatacaccattggtttttacttaatgtacactgaattagtctgagttgcatatttcacctaatgtttaaatacagttaaaatttgtcttaagcaatagataacatttagaatgtttcatcattatatacccttatacttctaaaatttaattttaatctggaattacatgattctaattctacagtgaatttgtataagttccagtaactatgccatttcagtataatgaaaactataacgtaatacaaaaaaattttagcttttgggtgacaaatagtgttcatattatttaaatggtgtcaactcttgaatcttggtctttataaaatatatttttaataatgtaaaataaacacaaaagtatatggtttttttttttcctttttctttgaaatggagtctcactatgttgtgcagactggtcaccaactcctgggctcaaacaagtctcccaccttggcctcccaaagtgctgggattgcaggcgtggactactgcgctcaacctatgtttctttttgaagagaagaatagtgcttagcacctttcctttttgaactttgatttgattacaaaggagaatcctgatcttgctattggggaaactttgacaagattataaactctgttgatatcaaaagaaaaattaattgatttaaatataaaatttaattttatagtattctttctttgctagtgatattattggtggtgaataaagccgctaaaataaatgactgaagtatactggtagatattaacacagtgaacactgagtacattgggaatggaactgaaggaaaaccctagaatggccaaatcgctttcttacttcctcccactttcctcaccttccaaaagccaaaacagtaacctcccaccaactgtaatgatgaaatcattgctttttcttggatctaggagttagcaccttgtgtcttagggagatggtttgacaaactctggatttcaacttttgtctttttctagctgtttgacttcactaattaaatgatttatgttttctgttagtaatatttaaaaaatattgtttgccgtatataggtaaagtgtgcatactagtattaatacatttttctccataagaggaagagtcactgaattatatagtgttttgtaaaaattcctcattatatttctttgctttttttgaagtgcatagttgacatttgctataaagtctctatattggataatgacgtttgctttagaaataataacagccctttctcttttttccttttgctatcacaggtaaagacagaaaagtattttgtcatcagggatgggctggaactttctttaacctagctgtattctcttactgactcctttcatcccttgggccttcttttcccttattttaatgtttcttttgtatttatgttgcagtctttatgatctgttgtccaataagtgggatatagctctgaaagaattacataaagtacaaggaagcatgggttatttgtttgtttgaaacatcacagagctgtaggtaaataacaaagaagcttgataaaatgcgctcttctgtcaatcacacagaactgaagtatgttgtattttgtgaaattccaaagataagtgaatgaacaaaaaacaatcaagtcaagaatgcttagaatgttctttaggaagtttacaggcaggtaattatcagaacagcattgaaataggttgcagggctgcagactatatacatggtcaaagtaatcactcttctgtccaactgtgttacttgaagctgccaaaaatctgcctttttatttgttgtttgaggtgtaccactcttattacatgtatttttgtcattaaccagtgcaccagtattaactaatgctgaagtggatatgcaacacatcttgagactggttttgatatactaaaaggaaaataatcaccgcatatgatgaatagctgttatatatgagtatattatacagtctaagaaatacaagtagatataaggcacagtttctgcactttggacttacactgaactatctcatgggttcccaatcaccattggattggttgattcactaggaagactgacaggactcagcatataatcctattcatagctaaaggttattacagcaaaaagatacaaagcaaaatcaacaaagggaaaaggcatatgggaaagttcagaagaaaccgtggcacaagctccatgagtcttctcctggtagagtcactcagggtgtgcttaatttctccagcactgtattgtgacaacacatgtgaaatgttgtctaccagggaggctcattagagactcagtccccagaatttttattgagaatttgttctcaataaaacatttgggaaccctctgcctaacatgtaccaaaatttcagattcccagaaggaaagcaggtgttcagcataaatcatattgtttgtacaaacagtttgggcacagtgagccactcttatcaattacgaaatggggacactcccaagatccgagttctccgatgccacctaagggccaatcttgcaagcaagccttttaaggatagcagtgtcatgcctgctatgttaactcttttctgcacatggacataataaaagttacttagcagtaactatttgtgtatgcctatcatgcctggtgttatgccaatggaatcatgagtaataggcttatatcaatcataaatacagctgaattattttaaaaataactgaacaaagtatatagcagtccttcttatttgtggtttcactttccatggtttcaattacctgtggtcaactgaggttctagttttatcatttcatatcatcatcataagaagggttagtataataagatatttatagtacaataagatattttgagagagaccatattcacttaacttttattgttacaaacattctattttattagttgttgttaatctcatactatgcctaatttataaatcaaattttatcaggggtatgtatgtagaggaaataaacatagtatacataggatttggtagtatctgcagtgtcaggcatccactagggggcttagaacgtatcccccatgcataacaggggactactgtataatggttattacttactgatccagtggttctcaattgtatgtgttagctcatatgctcattatcagactcaatagcttattatgattatcttgtttctgaaaacaggacagttttgcaataaaattatatgtagttggacataaatacccttgaataaaatggctagttttcttctcacagaggaagatgcagtatattttggttttagaaataaatgaaactttactttaagttctgggatacatgtgcaggatgtgcaggtttgttacataggtaaacttgtgccatggtggtttgctgcacctatcaacccatcaacccattacctaggtttctttttttttttttctttgaaaccgagtctctctctgttgcctaagctggagggtagtggcgcaatctcagctcactgcaaccactgcctcctgggttcaagtgattcccctgcctcagcctcccaagtaactgggactacaggcgcacgccatgacgcctcgctaatgtttgtatttttagtagagatggggtttcgccatgttggccagtctggtctcaaactcctgacctcaggtgatctgcctgccttggcctcccaagtcctgccattgcaggtgtgagccactacacctggccaatccatacctaagtattaagcccagcatgcattagctatgtatcctgatgctttccctgcctccctgcccccaacagaccccagtgagtgttgttcccctccccgtgtccatgctttctcattgttcagctcccacttataagtgagaacatgtggtgattggttttctgttcctgcgttagttcctgctgaggataatggcttccagctccatccatgtccctcattcctttttatggctgcatagtattccatggtgtatatgtgccacattttctttatctggtctatcatggatgggcatttgggctgattccatgtctttgctattgtgaatagtgctgcagtgaacatacacatgcatatatctttataatagaatgatttatattcctttaggtatatacccagtaatgggattgctgggtcaaatggtgtttctggttttaggtctttgaggaatcaccacactgtcttccacaatggttgaactaatttacattcccaccaacagtgtaaaagtgtttctgtttctccacagcctcaccacatctgttgtttcttaactttttaataattgccattctgactggcatgagatggtatctcattatgattttgatttgcatttcttcaatgaccagtgatgttgagctttttttcatgtttgttggtagcataaaggtcttgaaaagtgtctgttcatgccctttgcccactttttaatggagttgtttgtttttttcttataaatttgttaagttccttgtaaattctggatattagacctttgtcagatgggtagattgccaaaattttctcccattctttaggttgtctgttcacgcttatgatagtttcttttgctatgtagaaactctttagtttaactagatcccatttgtcaatttttgcttttgttgcaattggttttggcattttcgtcatgaaattcttgcccgtgcctatgtcctgaatggtattgcctagattttcttctagtgtatagttttgggttttacatttatgtctttaattcatcttgagttaatttcttttttttttttttttttttttgagatggagttttcgtgttgcccaagctggagtgcaatggcacggtcttggctcactgcaaccctgcaacctctgcctcccaggttcaagcgattctcctgcctcagcctcctgagtagctgggattacaggcatgtgccaccatactcggccgagttaatatttttttgttttttgagatggagtctcactctgttgcttaggctgtagtgcagtggcatgatctcagctcactgcagcctctgcctcctgggttccagtgattctccgacctcagcttcctaagtagctgggactacaggcatgtgccaccacacctggctaatttttatgttttgatagggatggtgtttcaccatattgaccaggctggtctagaacttctgacctcaagtgatccatccacctcagcctcccaattgagttaatttttgtataaggtgtaaggaaggggtccagtttcagttttctgcatatggctagccagttctcccagcaccatttattaaatagggaatcctttccccattgcttgtttttgtcaggtttgtcgaagatcagatagttgtagatgtgcagtcttatttctgagttctctattctgtttcattggtctatgtgtctgtttttgtaccagaaccatgctgttttggttactgtagccttacagtttgaagtcaggtagcatgatgcctccacctttgttctttttgcttaggattgtcttggctatatgggctcttttttctggttccatatggatgtcaaaatagtttgttctaattctgtgaaatttttccaattccgaattctagtggatgcttgacaatggtagtgtaatgggaatagcattgaatctataaattactttgggcagtatggccattttcacgacattgattcttcctatccatgagcatggaatgtttttccatttgtatcgtctctgatttccttgagcagtggcttgtagttctccttgaagaggtccttcactttccttgtaaactgtattcctaggtattttattctctttgtagcaattatgaatgggagttcattcatgatttggctctctgcttgtctatttttggtgtataggaatgcttgtgatttttgcacattgattttgtatcctgagactttgctgaagttgcttatcagcttaaggagcttttgggctgagacagtggggttttctagatataggatcatgtcatctgtaaacagagacagtttgacttcctgttttcctatttgaataacctttcattttcttgcctgattgccctggccacaatttccaatactgtgttgaaaagaagtggtgagagagggcatctttgtcttatgtttgttttcaaggggaatgcttccagcttttgctcattcagtatgatgttggctgtgggtttgtcatgaatggcttttattattttgaggtatgttccatcaatacctagtttattgatggtttttaacatgaagggatgttgaattttattgaaggcccttttttgcatctgttgagataatcatgtagttttggcctttagttctgtttacgtaatgaattcgtttattgatttgcatgtgttgaaccagccttgcatcgtggggatgaaggtgacttcatcgtggtggataagcgtcttgatgtgctgctggatttggtttgccagtattttattgaggattttcacattgatcttcatcagggatattgtcttgaagttttcttttttctttctttttttttgaattgaagtcttgcactgtcacccaggctggagtgtagtggtgtgatcttggctcactgcaaactccatctcccaggttcaatcgattatccttgcctaagcctcccaagtagctgggattacaggtgcccaccaccacgcctggcaaatttttttgtgtttttagtagagatggggtttcactatgttggccaggctggtctcaaactcctgacctcgtgatctgcccaccttggcctcccaaagtgctgggattacaggtgtgagccaccacgcccagccttctttttttgttgtatctgtgccagattttggtatcaggatgatgctggcctcataaaatgagttaggaatcccacctcttcagttgtttggaatagtttcagaagaaatggtaccagctcctctttgtacctctggtagaattcagctctaaaaccgcctgattctgggcttttttggttagtatgctatttatcactgcctcaatttcagaacttgttattgttttttgttgtgagcacttagtgctataaatttccctcttaacactgctttagctgcatcccagaggttctggtatgttgtctttttcttctcattggtttcaaataacttatttatttctgcctttatttcattatttaccccggagccattcaggagctagttgttcaatttctatttagttgtgtggtttttagtgattaagtggttttcttaatcttgagttctaatttgattgtgctgtggtctgagagactgtttgttatgatttcagttatttcgcatttgctaaggagtgttttacttcccaattatgtggtagattttagagtaagtgcatttggtgatgagaagaatgtatattctgttgatttggggtggagatttctgtagataactgtcaggttcacttgatccagagctgggttcaagtcctgaatatctttgttaattttctgtctcgatgatctgtctgatattaacattggggtgttaaagtcactcattattattgtgtgggagtctaagtctctttgtaggtttctaagaacttgctttatgaatctgggtcctcctatattaggtgtatatatatttaggataattagctcttcttgttgaatggatccctgtaccattatgtaatgcccttctttgatctttttggtttaaagtcttttgacaaaaagtaggattgcaactcctgcatttttctgctttccatttgtttggtaaattgtcctccattcctctattttgagcctatgtgtgccttggcatgtaaagtgggtctcttgaatacagcacactaatgggtcttgactctttatccagcttgccattctgtgtcttctaattgggggcatttagcccatttacatttaaggttaatattgttatatgtgaatttggtcctgccatcatgatgctaactggttattttgccaacttgttgatgtagttgcttcatagtgtcattggtctttgtactaaagtgtttttgtttttttcttttttttttttttttgcagtggctagtaacagtttttcctttccatatttagtgcttctttcaggagctcttgcaaggcaggcctggtggtgatgaattcccccagcatttgcttgtctgaaaagaatcttgtttctccttcacctaggaagcttagtttggccagatgtgaaattctgtgttggaaattcttttctttaagaatattgaatattagcacccagtctcttctggcttgtaaggtttttgctgagaggtccactgttagtctgatgggcttccctttttaggtgatctggcctttctgtctggctgctcgtaatatttttccttcctttcaaccttggagaatctgatgattatgcaccttggggttgatcttcttgtggagtatcttactggggttctctgaatttccctaatttgaatgttggtctgtcttgctaggttggggaagttctcctggatgatatcctgaagtgtgttttccagcttgtttccatacttcctgtctctttcaggtaccttaatcagtcataggtttggtctttttacataatcccatagttctcggaggttttgtttgttccttttcattcttttttctctgatcttgtctgcctgtcttatttcagcaagatagtcttcaagctctgaaattcttcctttcagctatttatacttgttgcaaattctcaggttgtgtttttcagctccatcaggtcctttatgttcctttctaaactggtcattctggttaacagctcctgcaatgttttatcatggtccttagcttatttgcattgggttagaacatgctccgttagcccagtgaagtttgttattgcccatcttctgaagcctacttctgtcagttcatccatttcagcctcagcccagttctatgcccttgctggagaggtgttgcgatcatttggaggagaagaggcactctgggtttttgagttttctgtgttttttagttgattctttctcattttcatgagtttatctagcttcggtctttgatgtcctttagatggggtttttgtgaggacctttttgttgatgctgttatgctgttgtcattgttactgttagttgtttgttttttttttttcttttttttttttttttacagccgtcttctgtagggctgttgtggtttgctcggggtccgcttcagaccctatttacctgtttccctcctgcatctgaaggtgtcaccagtggaggtttcagaacagcaaagatggctgcctgcttcttcctgtgggatcttggtctcagaggggcaccgacctgatgccagtgggaacgcttctgtataaggtgtttggcaaccccccgattgggtctcacctagtcaggtggcacaggatcagggacccatttaacaaagcactctggctgccccttggtgcagggcatgtgctgctctggtgggaatcctactcgtctggactgccccagtttctcagagccagcaggggaaagactaagtctgctgatatgaggagatcgtagccgcccttgcccccagggtctccatcccagggagatcagagttctgtccataaacccctgactggaactgctgaaattcccactgggaggccctgcccagtgaggagagatgcatccaggtttgatctaaacaggcagtctggccactatctgccacagccactgggctctgctgtgggaaattcctcctggttccaaaccacccagtctccctggcaccggcaggggaaaatggcagactggagctgcagtggtggctgctgccccttcttctgggagctcggtagtgttaggcagcagccatcatctgcagtgatggcagccacccctctccccgggaactcagtagtcttaggcagtcccaaccgcctagccagtcccagtgagaaaacctagatacctcaattcccagtgcaggattcacttgcccttttcattcttggtgggagcctttgaccgcagctgttgcagctgtttctagtcagccatcttggccccaatgaaatatttaaatgctaaaaatttaaatgacaaaattagtgagaattttgtcaggatggatgaatatagttttttaaacagtttatgtaactcatctttcaaggtataattgtgtaaaatctacatttgaacacaaatgtgaagaattacgtatcttgaaattttaaaatattgttaaaatgaatatatattattataaaatgtcatagcttttttactaatacttcattaacaatattttattgttctaatcttcctagacattaactttgaattattttgctataatagacttaaatactttcatgagaaattaatctaaaattaaatatggcctttaagcagatgtgcttgtatatacaatctgagtagaagatcacacttcacttaagttacctgatgatcctgcagttgcagttggcattttttcctggtaatcagagcctgacactggtaaacattttgcaaatacccacagataatcatattttactgaaatacatttttataggaatcttgtatatctgttggaaaaataacaaaggaggcattttggtttctacaaaactctggaatgtattagactctcagatttaaaaccagttattaatagcccgtttttgagggtctggggacagaatttgctttgaagcgtaatgtacaaaagagataaaagcagttttattgtattgtgcttcattttgttacatttatagagccagcacatgacagcaatgtgtgattttgatgaagcagattttaaatcagaagttataggtgacagttgcagcctagtatgtatctccttccacttcctttttgtggttttctcttttgggagatagaaagtatagaataaattctaaatcctataaatcagcagttttaaagaataatgatttcttatgatttattcaaattttcagaatattaaataaaggtgatagagattttattctgaggcccataaacaagtttatctggtgtcatattttaatacattggttgtctccattgtatttgcgtttggtaatactgtttgcatatattttagtgttagtcaaatattacatcactaaaaatataattttacaaagcaaataaagaattttctgattcctttgagcacttgaaccttagcgttatgtggaatgtactcatttaaaatatttattattccctgtatgtcagttaccattttataacagtgaataaaatagacaaaaatcttgaaagttatgaactttagtgggggaggggaggataaataataaacattattagtaaatataagtgccttaaagaaaaataaattttgataaggtcagtggggagtgctgatgttgaaaatgaggctgcagtttctaatacgtgatcaatataggtctcactgagaaagtgacatgtggaccaaattcttgaaggaggtgaaggagtgagataattcagatatctctgagaagaatgatcttggcagaaggaatatcatgtgcaaagaccctgaggtgtaagtgaagctggcatggctaagggacaccaaaaaggtcactgtggttagcttggaatgaatgaggggtagagtgaatagggaggagttcagcaaaatgattggaggcagaatctttcagggtctcctgggtactgaggacttgtagctagtaaggagaaaaatggaaagatgaagattgctttgaacaatgaaaagagacagggtctgatttataatcagctctcattgctatgttaataataggtggaatagggacaaggggagaattagagacaccatttttgtctgattgtgtgattgatgtgattgtgtgattgatgtgattgagatactccaactgacagatgatggtggactggaggggtggtaaaaatggaagtggtgagaatgagcacatttgagatatattttgaaagtagaggcaacagagaaagagatggctccttatttgtcctgaacaagtaaaagaggaggagttatagttagcagagatgaagaagactgtgtgtggagaaattatattattttattttattattggtggtagatggactcagagtttagttttggatatgttaactttgaagtgtcttattaattattgcagtgtgaaaccactttatcagacagtagtaaaaatctctcttataaagggaaacaaaggagtagaatgtttgtacaattgtggtggttctaatgtttttgtgcacattatgcaggttctattttctgttagtgaactatcagtaacatgttcaacttggatagtgatagattaaaaattgacatttgtattcctttgccttcctcttaagatttcagatagaccactctccctccagaagaaaccataactacactgatttgttaattcaacaaactatccttcagtactactatgtgcaatacatggtgttagatacagtggggaatagaaagacatggtgtcatagctcaataaaaagagtaaattacctattcggtatcaactgacttgttaatatagcaggaccattattagaattcagctatctttattcccaacctagtgtgttttccataataatgtaccttttaactatgtcaaagatagcaaatacagttcatctgtgtcaactttaatcagttgatagtggctgtctagcacattgtgaatggggtcaatcagaaagaatgtcattagatcaattagctattactttatattacctaaacttagtataatttaaaatttgataatgagtttattcagtttataaagagttctgtttttggcatggcctagtagctccattgcacaattccttctgcagaaaactactataacctatgaacaaaataggaaaaataactacccgaaagcactggagagcaaacaaaagcagacagaaaatagaagtcaaacattgaaggaaggaaatagcactgggtgagtcccctgccaggtagggtggctgaaactcttgacaaacaaaacccctcagtcttgttggtctgaagaaccaaggacagggtttggtgtagctgcaggccttggaaagtgcgtgtgcatgcatactcaaagtaaattaaattgcctgcttaaatgaaaaagaaaaaaattattcagaaaaaacagaacccaaactttctactcgtattactcacaacatttgcagtagaatgcaaaattattcagtgtacacagaaacaagaagacatgaaccattctgaaaagaaatcaatggactaacttcaagataactcatatgttgctattagcagacaagaatcttaaagcagctgttgtaattgcttaagaacataagggaaaatatgtttgcaatgaataaaaataggaaatattaacagagaatttgaagtaataaaaaagacccaaatataaattctaaaactgaaaaaaaaaaaactgacataaaacttttagaatggaaatgaataggaatcataacctaaagatagatcaaggaaatacctaaacagagaggggaaaaaaaaagatttaaaaaatgagcaaaacccttacggacttgtaggacaataacataaggacaaccttcatgtaaatggaatggcatacttgccagaatggctacaattaagagcactaacaacattcacaaaacacacatctgcccagtgacctagcaactctttccaggagaaatgaaactacgtaaacaaaaaaggcctgtatgctaatatttatagtagtgtatctatcagtagccaaaaattgaaaatagcccagattcgtctcaaaaaaagaagagatgactaattgtggtgtacttgtacaatgggcaataaaatggaacaaactactgttctgtacgacagttgagatgaatttcaaaactattatgcttagtgaaatataagtgaaaaaagtgtatactcttttaatattatgttctagaacaggcaacatttatatagtgtttcagaatagacaaaacttatatgaacaacagttgcactacgtgggagtgggacaagtattgattgaaaaaggatattaaaggaagtttctggagtgattttaatattctgtagttttcggtggtttgtattgcacaaaggtatacttttgtttcattgaatggtatatattaatactcatttcattttagatcagtgttatctaattagaaaaatgtagacaaatattgaactcttatcacatgcatgatgaagtatttctgggtaagaaaacatatgtaatgtatagtgttgacaagattttggaaaagcaggtatttacactgctggccaggaataacagcatgaaaggagcttgtatttaaaaaattcacaaaaattcataaatgtggctactctcttacttagcagttctaccattaggattttatcttaaggaaatgataagagatgtacaataaaatatgcataaggatgttcaacatagcatcatatataatatggaatattgccaaaaatgtagttgtcagcagagtccgattgcttatataaattatggtacagccataggatataagatacatacatttgtagtcacagtaagtgtgttgatcagagtgagaaactagttaacaatatattgtatttattcaacagttggcaaactgcagcctgatgcccagatttggtccaccacctatctctgtaaacaaagttgttttggaacacagccatgctcatttacttatgtattgcctatagctgctttcacactacagcagtagagttgggtagttgcaacagagaccatatggcctacaaagcctaaaatgtttactctttggctctttaccgaaaacatttcctgactcctggtttaatcaaattaaattctagaaacacaggaaaggcttgcctaaattaactaattccgtaaatttatgaatacttaccatgtatccagccctgcacgtaagctgtctacataaatgtgactgaaacagattcagtctgcattcttattgagtttaagtatggcaggggagatagttatcaaataaatattcaaattaaaattgattctataaaggaagagtgcagtgaggaaatgttaacaggtattatttctaagtgttggtaatattggcaattttaaaacttgattccttttctgagttttttctaggatttaaatatatttcattggaaaaaggtaacaaagattgagtagataactagacattgcttcagtaatttttaaaacttctgatattgctctgaatgcacagaattaagtttaatttacagaattaagtttaatatcatgtctgttaaatattattggttgcctatcacatgttcaatactgtgagaagtgctgtagatacagagttgaagtctgagacttgcttttgagtaccttattgtgtggttgataagagacaaaccaggcacagaaaatagaattacaccatattaaacaatttataataaaatacctacatgttactttagaaaaaaataagccagtgaattctgatataggcaggtgagacttaatgaagtatgtgggttatcaactggaccttgaagtacggctaattatttggctaagtatagggaaactggaaaaacatttcagaccagagacccaggatttaaggcacagaggtgagaatgggcatgtttgttgatacagcagcaaagagattgaccttaggaaaccagtggtgcattaggggattaatgatgtagataaagactgagagtcaaggctgattttggagtgtcttaacagtctgaaacagaagtttagatttgatttctggttaaaaaaaatcagaagaatttgaaatctgttctttctacctccctttattcatttttttcctctttctcttctgtgtatttcccttcctaggaaaatacttcatacaaataaaacggaaagattaattttaccaccaaatacaagacaaattacaagtttactttttaaattttggctttctgcattcttttaaaactagaagctgttttccattaacagtgacagacagcagtgtaaccatgtgtgtttgctagaactaaagagacgtccctatctcagattgctgtggcataacccgtggcatttattcagagtgaggctgttttaagagaatgagcattaactgcaatgtagtcctacagagataactgaacagtctttttgctattgttcttacaggtgtcctacgcattattccttaccttctctggagaaattgattcaccagatttgtcagatttttaaatgtaatattttgttttatttgaaatcaaagctaaagaaatatgttctttgctctaagaacatattttagctatgtttagctaaatagctaaacacagtttaatcttttaatttaatggctactgacttgtgcttacataatctgaaagttcacattgtcaggctgcttttttccttctaatcaacaccagtaattttactctgcattctaatatattacctgtgttattatctttaaaatgcatccacgaatgatctgtttacatttaactttttcatccctttgattcttcatcataaccttaaaactttggttttaatgacaatcaaattcaaaccagaacgaatttaactctaagttcatattattagatatctttccttatttcagctatctctaccagcagagcttaagaaaatccgatttgacttgactagacttactaggacatatctttctgtaagatttccaggtcatcacacacagctcagcttctttttgactttctgaactttgccatgtatttgttgcaaagtatttccgtagttcaaccctgtactcataccttcctagtcagtgacattgccaaaggacaagtcttgcatagaattaaagtgatgggcagaatctttatgatatttttcaaagtgctttatgtaaaatattaggtaattgactagctttaggtcaaaccatgggtaaatatcaagcacatgattagaaaccagttcttggccaggtgtggtggctcacgcctgtaatcccagcactttggtgggctggggtaggcagatcacttgaggtcaggagttcgagaccagcctggccaacatggcgaaaccccatctctactaaaaataaaaaaaaaaaattagccaggtgtcatggcgcatgcctgtaatcccggctactcaggaggctgaagcaagagaatcgcttggatgcaggaagtggaggttgtggtgagctgagattgcaccattgcattccagcttgagcaacagagagagactccatctcaacagcaacaacaacaacaacaacaacaacaaaaacaaaaaaaaaaaaaaagaaaagaagaaagaaaccaattctctgcagtaatatattgtcttgcttttatagttgtctttttaagcctattgggtccttgagcattttatgtggtgatttcatttccattctaactgactgttccagacagatgatatgcctttatggtgacggaataccctggctttattgactcagtaggaacagttgtattccatctcaatacagattactgcagttacagtgtctgcttatttcttgtcactcacctacacagactgaactagaccatcctaggagaaaagtcaaagctatatttggaaatttgaaaccctctttaaaagcagctagatgttcattgaatcctagattgtgtcagtacagtgtacaaatttaaatttaggatatgttgcattgtatttttttcctggtatacctcccatagatatattttatgcctagatcgcaaaatttgaacttttggaaattagaatatctgaagatttgacttaagtgtactttgtgatgcattagtgtgaaaaatcttaattgttcctttccctctcattttggcttcagagatcatctgtggttgacttatttattgttgagcatattgaggagctctttcatttcattagtacccagtgattttcagagtagacctaaataggtctactatttactgcttccgtgattaaggcttcatgcaacttcttttgtgttatctttttctttcatatcttccctggtgaagtctgtttagatgatgagattcaaattgtcatattcttagagtagaacctttactttgcctgtacaatcgatgtgtattggatcctcatctctcacacacaggctaaatcagtgatcctcaaacgttcattgtacttcagaattatctaggaattaaaacaaaacaaaataatagtgcacatgtttctctccacagagagataattgcattttttttcccaaagctttcaaggtgatttgaatgtgcatccaaggttgagaaataatggattagccaaaggaacagaatgtctccttaaagcagcccatagcaacaaaccatatagattttgctcatttgtgtatcttaaagttacataatttattatctaaagcactcttctatataagccataagtttttggctgtttttgttgttagatttctgtgtgtgtgtgtgtgtgtgtgttggctatttcttgacctttacttcccttacttccatcttggaggttaaaagccaaattatctaggctaggtgtcaggttcttttccagtaggccaaggattcttagcaaactcttagggaataagaaagtatgctctggcagccgtaaaccttgacctcttttgtatcctgtcaattatatggctgcttcctttactaaccctgttgcacacaaacttcaccttctttagcagcttcttcctactctgtgttccatcagtgcattctttgatgtttcagttttcatatatggattctaatccaaatgagcagaaattgctttgtgattattgagattcctaagtacttaggatgtaatgctaataattaattgatgaatttagtgaagaaaatgattgtgacatggagaaagagtctttaaccagcatgtgtgtgtattctctgtccttaccaagatgatggttctgttgctgagtacagtagctaaggaggtactggtgaccttctctgctggggaggaaggacttgtgacacaaaatacatattttccttcaaaagctgtttatggatggaattataattttgttccagttagtgaatacatattgtagaaaatatatacagataaagagagttgattatgtaaaagtcttatttgggttaaaaaaaaaacacatgactttctgtcaaatatcacatgttctcacgtataagtggaagctaagtaatgtgtacataagggtacagagagtggaataatagacattgaagaccaggaaagatgtgagggtaggaagtgggtaagggatgagaaatctattgggtacagggtactgtattcagatgatggttacactaaaagcccagacttcctccctacacaatatatccatttaacaaagctgcacttgtaccccctacatctatacaaataaaaagtgaaaaaaaaaaacccatgacttttggaccaagttatcagttagttattattattctgtatattgtccaggtaaattttcagcatttttttttttttttgagacagagtcttgctctgtcgcccaggctggagtgcagtggcgcgatcttggctcactgcaagctctgcctcctgggttcacgccattctcctgcttcagcctcccgagtagctgggactacgcgcctgccaccacacccggctaatttttttgtatttttagtagagacggggtttcactgtgttagccagaatggccttgatctcctgacctcgtgatctgcctgcctcggcctcccaaagtgctgggattacaggcatgagccaccgcacctggcagcattttcttttatgctaccttttttggtacatacattttatacttgtatatgtctaatttttgagtttcattaaaaaaggctgaatctaagatatcattgttggccttgctagctagtacatttttatattgatagaataactttttttgctatgtcagtattttgtgtgggcctgtttgaatatcagtacttctttctaatgaaatagcgttaacttagtcgggcagcaaggaacctcttgacattttgactttgaagaagcattgtttttcctgtagtgttttatactggatagtttatatagggttgttattgaaattggattcttcacttttttccctgtaagttttaacatgtcatttagtgaatgtaaagttatgcaaaacgtttatattaaatagacttgttaagtatgtctttcttatctgctacatgattcctactgagagtgttaatattcacatattcatttatgaagtctgttattcaggaatatacctatttgtaccatagtcttcattgttgaatgattgctgttaaagaatgtattacataatgatattttgcattagtgaatggaatatatcaattttcttctttccatttcctttttgtattagaggaaaagttccaagatataaggaagtaggtcatggtatctataaactgctgaggaactgaagtgtatattatgaagtaaagattgaagctcagttgccctctaggggttcaattttaacacagcacatgtagaaataatttactgagatcttgggggaagggtagatctgctgaatgtgggagcctatttttcattttctgttagagcctgactggtcattaaaaagctggttttgattatttattgcaaaagagaagaatatatcccagttttgtaatatacagacagtttaatgaaacatcctttttgtttgcttaattttaaagtcagggcttttgtgctggaataatccaaccgtcaacacattttcaggtattatttggtgaccaattctcggattcttcctaacactcttttgtcttctcagtgtcacctctatagcacttttaaatcagcttcctcccttattctgcccaaatccaagaacagactccagtgaagtggcttcttcatgaatcctctctacgttttatgagatgtgatcatcatgaaacttttccttttggtttcagcacctttgactggcatctttgtctggattagtaagactatttctctcagtttgaaacagaatggctactggctctctagtttaattgatacccaactttgtattgattgaggtccacataatttatgttggaatctttctctggtgcaaagtgctctactttgtaattgcagagttagactcctactgttttggtaagagggagcaaatttttttttcctattattgaaaatgttaactttgacttgtgtaaatagtaaatatgtttattgtatgtgcagatatttacatgttttaaataagcacatttctatactaaatttgaaaattcacatggttattggtatactttaaaaagatttgtgtgttttaatatatgctcttttattcccttcgaaggatgctataaactttactccttttaatatatattggtttttatttttaccgttatattgagcttttctatttttttcctgatgattttggaaaaacctccattattaatggtcagaatctttagtttttatcattgatttatagtaattttatttttaaagttcagtttttatgtgttattttacactctgaaaaccatgattgaatttcaatgtatattaaaatattaaattggctataatatagctctgtgctgtccagtatattagccagtagtcacattgcctatttaattttaaattaattaaaattatataaaatttaaaattgagtctcgtagtggtactagccacatttcaaatgctcaatagctgcatgtggcttgtggataccacatacgacaatgcagacatcaatcatttccatcgttacaaaaaaaattattgaacagctctggtattgatatatgaatcttcttcaacgtgtttttaaaaatacgttaatactggtagtttcctgtgtaaaatgaaacatgaaaatgttatatgtctttattttattaaaagatattttggaaataactaaattaaaaatgatcacatgtgaagtgagtttacctttatcataaagagtagcatatatttctgattatgagccaagtgatatcaaataatttaataaaattatatattttgatgtgtgtaaatacatctactttatctccatcttgtggtagaagtatctgaaaatcctgttaagaatatcattaaagcttattcatttttacattgacttatccttgctctttctcattaccgtaaatgtaacattaagtgttaaatgtttctttaggaaattttgggtcttactaaaggagccaactgaaaataattttaggttttatagttactattgaaggtaaatgtacaactgcaactgccacattttgactgtgtgttggaatattaaaacaaggaatataaacatttaaatcatagttgagaggaaaaacaaaaaagaaagctttagctgcttcattgcaaatgtagctttgtgttgttaaagaggattatgatgaatacatttgtgtgataaatttataaagttttgataaattgtttcatactaatattttttataatttttatttttataattttttaaagtatactcacagtccttttgtggataattatgattgtaagaatatttttgcaagtaaatgaaaaagtgattattaaaacactttgtaaactgtagcattttatacaaatacataatcttatcttttaaaaatatataatatgaaatatttggttgggaagaccatctcagaggtttaaaaacatatttccaatcaggtctatttgtatcattcttttattttctttttatttttttgatgagtttctttaaatatatttttaaaattttatgttctttgaggttttttttaagtttttgaattaagactaatacagtctgcaaagcagtattaatttagagttatgtttcaatatagaaaagtctcgatgagtgctctaaaaattctgaaagaatttttttagttaaattctaagatttcaggaagaattttgtgtagcaaataaactttagctaggtatcatttagatagtttctttttaaaattcgttttgtttatcttactaagtattggggaaggaatagtctgtgaaatggaaacacctaaattatttattaaaagatattccaagtaggtagtaagatataaaagccgagtataacatgagatatttgtaggacaatgagaaggttagtttaattatataaaacaatttagttgccatttagggtcgtattttggtgctccttgaaagccaggcaaagaattttagaagtcatataatagaaaacagggatttttatgctgcaaagatctttatttagggagaaagtctgtgatctcagaaacttaacgttagatgaagcctgtgaggttaactactaccaatgcaggaatctttctaacaatatgtgagacttcattttcaatacctctactctacttcaggctttcagtatttacttcctttttgcattttattgttgtgggggaaaacaacatcatgcttttaataaaaaggatattcaatttatgtaagtaatgtagaaaatataaaatgcattccaaaaattactctaaattctaccattcacaaagacagacatctctctgggaacaaaaggataatacaaagggattatattatatacactacttttttagtggaatttataaaacaaaagatttgctaaagtttatgtaaatgtttcttgataaaaggttacttgcctccattacaagaaaacatatgaaacccactgacaagtttgagtgattatgttttaactccatattctaattttgaacagtattgagtgattcccttgtatgaaagtacagttatacttcccccaccttttctctttcaggtcccagtttctgtaagttgtaattttacattgtcataatttataatacttatattcttgtctgtaaccataaatccagtgctcatcacattttgtctttaaaaatttttttttgatctgttgcttgattttattgccaatagttaatttaataagagtctttgggttctagaatccttgatatctttcatggttgggaatgactgcttgttgcctaatagatttgtgacatgtagagtggatataatattgtcaggtcgtattttctgtacctcagaactttgtagatacacattgcatcagtattttatgacattaaatgttgctctgggaagtctgagagcagcctgattttcatccccaccccaccttgcaatcatcctaccataggtgacgtgatttttctggttggatcctagaagaattctttctgtatccttgagtttggaagcttaactgggatatatcttgtatcagttctttctggaacatactgtgcccttttggtttgtacattttttttaatcagaaaacttttcttaaattataattgaaaatgttttttgtttcctttttctgggggaatttttttcctcagagataaccaatcatccttggaactttaaaacgaggattaacatttgatggtatttactgcataactaattattccaaaatgtagtggcttaaaagagcacatatttattaatctcatagtttctgtgagtcaggtatctcggtatgacaactgggtcttctgcttcagtttctcacaaggctgcaattaatgtgttggctaaggagggtctgtggtctcatctgaaaccttgactggggaagcatctgctttgaaggtcactcatggttgttggcagcattcagtcttctgtaggatgctgggttgatagccttacttccttcccacatgagccttttccacatggcagtttacttcatcaaaacaggcaagccaggaagaccagagagaacatctggtaagacatgccacagtcttttgtaactcagtcatagaagtgacatcctgtctgcattaccatactcttggttagaagcagatcactaggttagaagcctgcttagtgggaggggtgacatggacatgaaggacatgaacaataggaagctgggatcattggaggccatcttggaagctgtcttccaaaatagttgcctaccatgccttggttttctctgtttgcattaacctttttttcccctctatatttactgtgattatcttgagtaatttaaataaaatttttcatttgaattttagctgtgtctatgctatttcttttatgtttctaatatatttattagcactgttacagatttgttttggtcttcaatttatctcttctgtcatctcactctgttttatcaactattccttgaagtctagttttcttgaatttatgtttttattaagttctaatagagtgtgacatttgagatgaatcttctttttccttaggcatgtttgcagagttgccttgctgtttctctgaaaaattgtgggtgaatgctctttaacacttctgccacctttttctgatgtttgttttctcctgtgggctatattgtgaaggctggggtgttcttttatgtactttcctgaagcctgagggagggggagagggagcacatggccaatgcagtgtttttgttaagtagccttcaggaatgtttcctcttttctgtggggttacctttgggttatcttctctattaagtgtggatccctgaaaaatggcataccctggtggtttttctagcccctgctgaaatcctttgaaggtgggtaaaggtttttttatactaagtgtttttgttttgttttgttttgtttttgtttttgctttatttttctgtgggctatttgtgccctcagtctacttctctcaaaaacaaagagtgtttttagcgggaatttgcaaggtattttaactcattttctttccccagtgcattctaggagctaggatccatggcatgttgagccttgccaaaatctttccttttttcctactttttgaaatttatagtataatactatcacccttttatggcataggggcagctagccaatttttgtctttttaaaactctgtttatcttatagaatattgaggaagagtttaagagcttacaatatcttgcagttttacccaaaactgtcttcaatatcttttcaattattttattagcatgaagactagttttttctatctagaaaatttctttttctccttcttccctgattttacccttatcctaaacgttgttgctaggtaaagctttttcaattgatcattttagttcatgtcattccccactgcttatgatcaagcctaagctcttatatttaaggtcacctgggtttttacttcagcttactttagtgatgatagtctcattccctttcttgaattttcttttctggataaatttaaatattttctattttcccatagatgccttaggtagatttctaagatgtggttagtatataataggatgtttgtatacattatggtttttaaaaagaccccttaatctctttattgcctttctgtaggaatgtacttatttgtcaagattcgtctaaaaatgtggtctccagaaatgaacatagatgtgctgtgagctccttgcagttgtgattgcgacactgataattaagattggtttagttgttctgttgtacttcatcaaattgttgattcacattgaatttatcaaacgtcattctattctaaaatgtgaaagtatttttaacttaaatgtaggaattcgcatgtatccaggtaaattttacctttaaacatttttttgctctggttgtccatactattgagagtattttgaatctccagtcagttctctcttgtatctatatatgctaaacatacctttaatgatttcctatacatctctaaatagtaattttgtgggaacgttaagtgcagtagttctattactttgcatccttttaatttcatatagttctgttttcttccccgtgtctgcctgggtgacatgagagattaaagactgtggttgttctgtgtatgggctcaagctggatggaggagttgatattagagaaaagagaagctttccatttgattaagctacaaatagagggacttttttttttttttcgagtggctggggaggtgacagaatgggaagcatcaaagggaactttggcagaacttggtaattgaagagaaaaccactgaagagaagcatgatgatgccaggagtttgatttcaaatgatttgtaagaaacagtgaaccaggacacattaagtttgaggtagatggttgtaagatatcaagaagatactcatctttaacgaaaatttgcttttgaggcttatgttctagattttaaaacaaaacacacagtcttttaaaaatattctttctttttttgagatggagtcttgctctgtcacctatcctggggtgcagtagtgtgctctcggctcactgcagcctctgcctcctggattcaagtggtttttctgcctcagcctcctaagtagctgggattacagatatccaccaccatgcctggcgaatttttgtatttttagtagagaccgagtttcaccatgttggccaggctggtctcagactcctgagctcaagcgatccgactgcctcagcctcccaaaatgttgggattacaggcatgagacaccatgcctggctaaaagtattcttttttttaacttgaaaacctgtgtagttctgtaaaatctttgttaactgtcttcctaagaccttttatattttacatatagcattaaatttgaactatatggatttcaaataaaagaagagaataattgctattttcgaagaactcattttaattggttagagtaaatatgaaggcagtgatttttgtaaaatggcctttaacatattaatgtctggttatgtagaaagtgctgtaacaggatcatctgttctactataacttcatgtatgcctattaatgatacataactgtggagcaataatgtaagtgagctctgtcaaaaaaattacataaatgaattgcagtcaggagaaccttactcagtggttatgtatacaaaatttacccccccttgatatgaaaaaattttttataattgctttattttcttacggaataggcttctaaagttgcgaattgtattattgttaagtagcaaaatttgggggtagtatttcctttttgtcatgtgaaataaatttttctcttttacaatacaggacaagtaaatttttgtgaaacattgcagatgttagatggatttgggagaattttccaaactaagtggacgaacttatatagctacataaatagtagtgagtaccagaagtttattaatttgcttatattacataaaaataaaatgctttagtcatgagttaaaaagctaatggaaactcatgtaggcaagttaaagtcaacataaagtaataataccagaaatcctaaatttgctgtatttcagtcatttttatgaattaaaaaaatctttttaacttgtggttctttattttttccattttcgctttaggaaatttgtttgtgttcattgagttgggtaaaatagaagacttaggttcttagtgcattttgatatgactccttctagatttgtcattctaaaacatcagacaggattcgggttgcctattactcagaactagttatattagaactcaggctttgggtattaactgaacccttctttctttgttacccatagagaagttacagagatgcttagtttacagtgctgatcattattgttatttttttttaaaacaaaacaaaacaatctgtagacaggaaggagcaaagaatgcagtgttcacgctgtgctaccccagaaatacctttagtgaataatgtttttctaacagactcattttaacgtgagctcgtttttactcttaagtgtgtaagccatttttaatgtatgtcttttgtctccttagcctttactttcattttagtgacattgtgaaattaagccctgtctgattcccacaagagtaacttaggtacttttacattagcgttagtagctatgccttctctttagactaggctaccttacccatgttgtgtttaggaattcgtatgaaaatttattcttatctacagttatttttttcttcatgcccattttccttgaaaatatttaattatagaattagaaacttcagtatcggtatcacatcactggctataaaaactatgttactgatttatttacttcctttaagtttttccccaaaaatctccttagaggggcctacctggatgaccctactgaaaatgtaacctactaggtccttcctcctataacttcctacaccccttaacttctctctctttttctgtaactcttaccacattgtaacatactgctcaatactccttttagaataagagatcctggtttgttttactcatatatccctagaacctaaaacaggcttggtacatagaaatgttcagtaaatatttaacaaaagaatgaattaagaatatacagtttccctcggtatccacaggggattagttacaggatgcccgtccttctccaggaagccaaaacctaaatcccatgaatactgtattttttatctgtgtttggctgtggatatggaacccacagataaggaatggtatttattgggggggaaaaacccatgtataagtggacctgtgcaactcaaacccatgttgttcaagggtcaactgtatcatctgggttatatttctcctattatatagaataagaattttcatgccctaaaccagttactttcagtttcttttcacctggtccatagtaagaaatacagtttaaaatacaaccctgagtacacatacatatgaacagattgttagaaatctgaattactctcttcccccagctgttgtaagactaaacaggccaggaattatgcatatattcagtaaactagaatgtgacagatacttcctatgaaaaaatgtaatgctgagactccttaaatggtttgttgatcaccattgtaaccatgtaatattttatactaaaaccagatgacttaggaaataacttcctgtttgacattaaaaaaatatgattctttagttttaaagtttatacatttttgaggaagctctttttagcttaatgtcagcaaagcagctgctgcttgaatttactttctaaaacactgaattattcatttccataaataaaacttccttagtaattatttagcattaatttatttctctttatttcagtcaaccctgttgacattctgttttaaaattaaaaatattctttgtggaatttaacaaataagactgtgacagccactttctttactttcttttgttttcataacaggatttccagatcctgagatgagctgtgtcttattatttttattattttaataaatgttaaactaataaaatgtagaacacaagtaaattcttatttaaaaatgtcttctaagtagcttctaagatgaactgctatgattatgacttatttaacatatattgaattctaacaatgtaaacttattagaaatactttaaataattatttcattgtattcaccaattgtttaatagagtaatagggaaaaaaagtaaggtttgttgttttacatttcttggcactcttccatctatttttgcaaatatgggaatacctccttgaattttgtgctgcctttctagtagcctgtggtgagcccttccaccttcaaactcttattagttatttatgtggcctctttgggctatcagtctttactgctgtgtgatatttcttgccatctttccagaattgctgttttatttatttgtttctttgtttaattttaaatgtgtcactgccttgctgctccattggagacttcctgagggcaacagacaaactatttgatagctgaatacatatttggtaagttaagagaggaggggagaaaacccctttataaagtagcatccattcaaatgaaacattcttacctaaagtgcttcttggagcatatatttagagaggtttagtaactgatccataagacaatcagtgtgggcttaaagaaaatgtaaacttttaggtaagggcccatctgaatccctgttgaaatgtactatagccaccattactgtggcagcctcataggaccatggaagagaatgaggcctatggaattagagatgggaaaagtctccatttaattcctctgtcctaggttctacaatgctatttagaatataattatggagacctctgctttaatagttgttgagtgggtgacagcagttttaattggaataaccacaagtgtataattattttagagctgaaatgtttaagaaagcttttccagcagatgacacagaccatcagccttcagctgggagccattacgcagacatgttttgtttttcctctgcagtgttttagaaaacaaagttggctatttacaattgtgagattttacataaaacaaaaattccagcttagaaaaaaggtaaatcctcagatctgatgattctgtatttccagtcctacaagacgaacaatgatctggaataaagtaacagctgtacctttaaacatggacatgtgttgtagtggttcattacagtttttgtgcttgcactgttcatgtatttgtatacacacacattatgtatttatatgtatataatatatataaagatagatacatttatatgcaaaaacatatttctctgaaactgtgctccagtcataagaaaaccaaactgagatgttggtctggttcaagaaaaacaggatggagccttttgtgaaggtaaagaatattcttttgtgtttaacatgcaaatggctcagcttccaagttgcataggtagcccagcctgagtctacaggactctacctgtagagtagagtcctactctacaagtcttggagagtatcagatctgtcaagttttgatttttatgcccttaattataatctgtaggtaactcatatggctcattggatatgaattttggaaatctatgcttccagattactttgcttaattcttgcgtcctcatactttttctgtgaagggatatatacctaagacactaggaaaagcacatccgaggtaagtaacactgatgaatatttagtacatggttaataacctagtttgtgaggtttagaaatagtaaattatattttatatataatattctatataaaatatatttttatatataaagtatacatattacatatataaaatatagtatgcaatgttagtacatactaagtattctctaaattatttttatttctaataaagtgtacatttatctgtggttctgctctcttaaatttattttttaaaatttgaacattttcatctgaatttttgagtttgctaacaagccaaaaatcatttctatttgattaatccaacaaataatttactcttctttatcttaaatttgaagagaattaagaaataaaagaggaggaacatctatttcatgttctgtttagtagtaacagttgcaaatatgtaagcattttattcttggattcactaatttccctgctcaacaaagatgggtcagtatgttctgttttttttctgggaaagtctgtagaaataatttggttgtttttaagcacctgcatgctttttggaggcagtggtggtggaaagagtatgatgtaaaaggagctgtttctttacctaccttacaaatatctgtgcctgaaacaagcctcttctctgagcataatcagtctctaataaaactgtattcctaactacttgagctgataaatagtgaggttgttttaaacaagtcaagtttattttatgtcaattttctatttgccctgtgtaagatatatttaattactttactccatctctgtgttcaaattaatcagattctgccacatattggtgctcaaaatagaataattctttaatcaactgtgttatccatgctatggtagagtagaatagaaaatctactcgtggcatattgaagatgcatgcattttattttctattgtaatttaaaagtaaaatcagaaatactgatttctacttgactggagagatgatttagtttgaatatcagcctgatcttaatcaggtgagaattaattgagttggaggtattagatattcagtgatgttaactgaaccatgatccatctagagagaagctttcttttgtactgtgttagaattatcaaatagctcatgcactacaatgtaaaataatcttttcatgttcatccttctaccttcttgtctcattaaatgcaccactaaattcattctatacacagactaatctttaaagtagcaagctaataaatcacaagttaatagaaaattaaaagcataataattttgtcataagatgctgctgtcacaattttataatgatatattttctagttactaattttaaaaccaagtgattaaacctctgcttttcaagtatacctgggacattaaaaaaaactcttagtttacttttttttatgttcaacattgcaagaagaaagtgagcaattcagaagtattttaatgtttatcttcagaaataaaaatagagtctgtaacattatagtggtctgaaatgtggcatgggcttttcatttattttaagagtgtgacagcaatatcataagtgttgtgaaaatataaatggtgagataacacctccatgggacttgctcttaagtagtaaaattgtaaattctttaaataaactgcagctagaactgaaagcatcgatttgccttgttaactatggatactatacttattaagtgtctaattaaatttagtataacatgtctgttatttcctcctttttttcccttaaaactgaaaatttggacttatttattagcaaagtatcacgttatcattgtcagatttcttcgattttggcagttggtgtgacagtgttaaattaaaagaaagccagtagtgtgacttttgatagtgtcgttttacactggaatactgttttttgcttggtattgctataatgggaatattcgaatctatgtagctgtatattttgtgaaaaggaatatccaaatttatattcgagaacaattagcatttaataaaattaagccataattgcagaaacattcctagagtgcgatgaacagggaattctcacgagatacagtagggttccccacctagttgttactaaacagcaatttagggcagaatggcctgcttaggaaaaaatgagagagagggagctggctttttcactctgctcttcaaagccgaggcttctcttatatagaccccactctcccctctccagcacccaaaatgatttctatctctcttccttccttcctccctccnnnnnnnnnnnnnnnnnnnnnnnnnnnnnnnnnnnnnnnnnnnnnnnnnnnnnncctttccctccctttccctccctttccctccctttccctccctctcaccctccctccttcctccctctctccctgccttccttccttccttcctttttttttcataatattctgtaagatgtagagagtaccaaaccacaatacaaatgtgtttttttcaattcttgtccctgccagttttcctcctatgaaataaccacagttatcagttttcttacatattctttcatagccattatgtacttgcagacatacccccccgacgtgtacacatgcacaccccccaaacacagaaatgataacgttctgtaccttgctgttttcacttttaagtcttaggggtcattccctatcagtgtgctattttttttagtggctacatagtatttcgtgatacagtgttaacatttaagcagttgatgttactgtgatagatttgatgacatcaccaaaagccacattcatataaaaatactttttgcttcaggtgagagaagacaagatgaggaatggctaataatatgttattcttttcatgattccttacagatgggaacctatttatttactattttggagacaaggccatgctctgttacctaggctggagtgcagtggcatgatcacagctcactgcagccttgaccttctgggctcaagcgatcctcccacctcagcctcccaagtaaacagtactacatgcgtgtgccaccatacccaactaatttttaaaattatttgtaggggcggggcctcactatattcctgaggctggccttgaattcctggattcaagcgatcctcctgcctcagcctcccaaagtgttgggattacaggcgtgagccactgcactcggcttactgatttatttttgttaagaaagacatatatgtagtctatatctgaattgcatgaaaaattctactgcgatcgaatttggagaatttactgtccttatggatgctgttttttttttttaaaaaaataggagatgctaatgttttttaagccagttgttaaataaataaatttgacaaatgagcgtactataaagtgggtgacaaggatttgttaatagtctggaaatcacataccttgaggaggcagcaatgtttaaactggcgctgagccaggagaagagaaaaaaatatgaatgttatttcctatagtgtatgatgaagcggcagcattagactaccttttttcagcctatagtactcccatcccccatcaacacacaccaacccccatcaacacacacacactatggaactggctaccttgcgagttaaggaattttctgtcaccacaaatgtttaaacagtaagatggagtaggaaacactttgtgaaatagattaagtgacctctaaaggccttcacactctaacctttttgattccagaagtctagaacaagacagctggtcctgtccagggccctcgataagtagtatttaatggtcactgttggctcatacttattgccagaatgggctgtagaccacttgcaagtatgaaaaagtccaacaggttcgtttattacttgtgtcactaaaaacacggatcctactttcgtttctccattgtgtaagtgatgagagaaggcaaagcatctactagtggcaagaaatcctagaaggctccatgttcaaaagtttgcctgttttgttttgttttgttttttgtcagttgcttttatcaatacctatcaatgaattggccttttaacattggagactatgtgggacagcaaagagggaatatgtaagaaaagtgtgtttggggagacttagggaatcttctatgtgatcttttaaaaaagatagagggatttggtgctttcattgtccacaccaggctgtgtgaatgtctctctttcaaattctggtagcacttaatatctgaaacatgaaatttagcacttcattatattttgtttgaagaagcccctttctaatgtgtaaaatccttattttaaatatttaaatatattttataggaatactggaaaacagtatggaatcggagagttgaggtatctgatgctatttgattttatatggttgctaagtggtcatttagcaaaaaaccagcaacagtgtctaccttattctttcctgtggtagtgatacaatgtgatgaaccattgccacttgcttcccaggtctcatttgtgacctcatgtgtgagatacctggcctgggttaagtctctattgcgtgggcatggaaatttctgccaagcgtaggagtttttcatgtgttctggaaaggaataagtgagatccaatagtaattacagataacgtttctgaagttaaaagacctggttctaaaccaatctatgtatgccacactaatcttggaaatatgatgtagcctatttaaagttcattttattcatctggcaaatgaagataaaaatagtgcttacttgatcgtgtttttgtacaattcaagtgagctaacacgcataaagtacctagtatagtagtgcctggtacagagtaaacactcagtttatcttagttgccattttcatgtttttattgctattactactgacattattaactaccttgcaaaaaatgattaggaagttgtcatgggaaaatggaaaaacaagaaaaaggccacctgaaataagacagtttctattcaacattattaatgtattcttgaattttggttttccatcatgtatgttcctagtgttttaactgcttcttgtaagaatcacattttaatctcaaacttatattctaatcaactgagataatgaatctcagtatcctcctgaaactttttaattttgctatgaaaccccgaagttttgttactgtttttttgaattttgtttatgaataaatgctgagtacagcctttactaaactgaagagatagtcatgataaagtacaatgttggaaattttgatctttgtcaaagaagttagataacagtaatggcagagattatttagcaacatattttaaaatattagagtgagttaaatcaactaaaagctggtagaaaatgagaattattaacactccttcaattaattcacttattcagctatttgttcgataaatatatatgaatatttacagttattcatttatatacaaatgcacaaatatttattgaataaatataagctaagcaagtaagctttgctgaatgattattttttaccttagtctttattttcttaaatattttattttgattaggtattttaataggcttaaaaaggatcagtggataagaaaatatgttccaaggaaagatatggaagataactaagcctagaatgatcataagttataaatcataaaacagtagccaaatcatcatcagccacctgtttgcatctcacctgaagtataaggaactaaaaatgtctttagctatgttgtccaacatggtcaccattagacatacatggctattttaattaaaatgaaaaatttagttatgcagtcgcattagccacattcagcttgggcaacatagtgagaccctgtctcttaaaaaaatacatcttatttaacctaatatatcaaaaataatatctttttaacatgcagccaatataaaaatttttaatgagatattttatattccttttgtcactggattttttttttcattttctgcctatgttaggtagaataatagtccccaaagatgtctcagtcataatccctgaaacctgtgaatatggatataaggaactaactgtcctagagaattgaaaataaaagctatgtttaatgcatcacacataagaagtaaggatttttatctgttctaatcccctcactggaattatgtgaatctaaggtatttctggacagtatcgcttaaaattttaacataaaaactgttgggtgattttcactcatcttagtagacgtctcaacagcatttgacaataatgattattccttccttgacccaaactttcccagaaaagatagtcatctgatggatacattttgttagtttttatattttaaagttgtattcaaataatttatagaagaatgaagacaatgactttagaaagtataataagaatttaaacatagcaagccccaatttttattccctattttacttgttctgaaagttttataacttggaatggtttatgtcctttgattgccactaactgcttatcatgaacctggaacataatctattttaaagattctgactccatatagctctaataggttctagtttaccattaatctttaaaatgtattttctttttactttagatttgaggggtacatgtgcaggtttgttacatgagtatattgtataatgcagtggtttgggcgtctattgaaccgtcacccaaacagtgatcatagtaaccaataggtagtttttcagccgttgtccttcctccttccctcccattttggactccccagtatctataatttatatctttttgtccctgcatacccattgtttagctcctacttgtaagtgacaacatgcggtatttgtctatttctctgttaatccacttaggataatggcctccagctaaatctatgttgctgcaaaggatgtgttttcgtttttatggctgtgtagtattctatgatatatatgtaccacattttctttctccattccactgttgatggacacttaggttgattccataactttgctgttgtgagtagtgccgcaataaacatacaagggcaagtgtctttttggtagaattatttcttttcctttgggcagctatccagtagtgggattatccagttctgtttttagttcttttagaaatctccaaactgctttccacagggattgaactaatttacattctgtttataagcattccctttctccacatcctcaacaacatctcttagtcctttgttggatgcatagtttgcaagtattttctccttttctctaggttgtctgtttaccctgttgatggtttcttttgcagggcagaagctctttagtttaattaggtcccaattgtcaatcttctttttgtttcatttgcttttgagatcttagtcataaattttttgcctaggccagtgtccagaagagtttttcataggaatttttttttttttttttttttttttttttagtttgaggtcttacgtttaagtctttcagcaatcttgagttaatttttgtatatggtgagaggtagagatggagtttcattcttttgcacatggctagccagtttccccagcaccatttattgaataaagtatcctctccccagtgtttatttttatttactttgttgaaaatcagttggttgtaggtatgcagctttatttccaggttctctgttctgttccattgttctgtgtgcctatttttgtactggtcccatgctattttggttatgatagccttgtagtatattttaaagttgggtaatgtgatgcttccagctttgttctttttgtttaggattactttggctatttgggctcttttttggttgcatataaattttaggatagttttttccaattctgtgaaaaatgacattggtaatttgataggaatagcattgaatctatagattgctttgtgcattatgggcattttaatgacattgacactttcaatccatgagcatgggttgttttttcatttgtttcatctgtgatttctttcagcagtattttggagttctcgtagagctctttcacctccttggccagatgtctacctaggtatttgtgtgtgtgtgtggctattgtaaatgggattgagttattaatgtggttctcagcttgaacgttactggtgtatagaaatgatgatttttgcatgttgattttgtgtcctgaaactttactgatgtcatttatcaatgcagtagtcttttagaggaatctttagcattttctaaatatataataattgttggtgaactacttacatctttaaaatgaagaatttttttttttttttttgagacagagtcttgctcttgtcacccaggctggagtgcagtggcatgatctcagctcactgcaacctcagcctcctgggttcaagcaattctcctgcctcagcctcctgagtagctggaattacaggcacctgtcaccacacatggctaatttttgtacttttagtagagacagggttttgtcatgtgttggccaggctggtctccaatcctgacctcaggtgatccgcccacctcggcctcccagagtgctgggattacaggtgtgagccaccgtgcccagccaaaatgaaatatttttaaaaacaccaatgactcataattttgttgaagttaagatggccatctttttggctccatagttttaaaacattttcacttttagatttacaaatactatttccttttaatcaccttttaaatatatctgtctttagcatttggatcaagtacatttcaacacacagatatcataaaagatgaaagagtactgcgttgccctgtttgtagcacaatgggatacaagtttttgttacattatacttcatgaaaaatcactcctgttaaatgtctaatgggatgagaatactatatttcctttttgtccttaaaaatgtattattcaggccaagtcaagagaattgtttgaggctaggagttcaagaccagcctgtgcaatatagcaagaccttgtctctaggaaaaataaataaaaaaaattagctaggtgtggtgctgcacacctgtagtcctagctactcgggaggctgaggtgggaggatcacttgagcccagagttcaaggctacagagagctatgatctaaccagcgcccagcctgggtgacaagaaaaaaagtattattcacgcatcagttcctgattttgagaaaattcatctgggatactgtcacctgaagacttatagtcaatatgattatgtgcttatatgatcaatttcatcatcttcgttaaagtctagagtgctgctcttggtttctttgcattcttctaattcatctaataattgcaaaacatcttttagccagtttttccccccactgtggtagtatattagttttctattgctattgtaacaaattatacaaacttagtagctttattaagacaatacaaattcattgtatcatagttccgtagttctcaagtgtgacaggtctcactgggctaaaatcaaggtgttagcagagctgtgtttgtttctggagcctctaggggaaagtctgtttccttgcctttttcagcaaagatgcaagtattctcttttttccatctttaaagccagcaagatagaatctctctgactctgcttccatcatctcatctcttttctcctgttctcttccgcatctgtctttcacttttaaagacccttgtgattactttgggccttcccagataacctccctattttcaactgattagcaaagttaattctgtctgcatccttaattcccatttcctgtgtatcttaacatattcatgggtttcagagattgtgactgggacatctttggggactattatgctacctaacataggcagaaaatgaaaagaaaaattcaaaccttaactgtattcagtgaaagctttaaaaaaaaaagaaaagaaaaagctacttttatatcttcatgaacggtaatacaatacattgagcaatatagtaaatgtgatgtaataatggaagctttatttcactattgcatccttctaggggatttcatcattttcttttcttatcgtagttatttttagcatagttggaaataactgacaggccatgatgcaataatttctgctatgatgaaataaaatgtttgaagatacaggaaaaataagatcaataagttatatattgaatcttagctttacacgaagatcaaatgatcctagttgataaaatgaattttattgtattaaaaatatgtccattttctttagatttttggaggcctctaagaaagaataaagtcttaaattattcttgaaatagttatggaattacttataaatgaaatctacaggctgagcatggtggcttacgcctgtaatcccagcactttgggaggccgaggtgggcggatcacaaggtcaggtgatcgagaccatcctggccaacatggtgaaaccccatctctactaaaatacaaaaaattagccctgtgtggtggcgcatgcctgtagtcccagctactcgggaggctgaggcaggagaatcgcttgaacctgggaggcggaggttgcagtgagccaagatcatgccactgcactccagcccggcgacggagcgagactccgtctcaaaaaaaaaaaataaataaataaataagcctgcaaaactaaaattgggtctagtggaccctgattttatactgagggtcaaatgcttggtttccttgctttctctggtgccacatagtcctctgtatttttccagtttcttctttttctcctagcgttaagtgttaggattcctcagtggttgtccagggcctcttttcattatttttgttaagttactactatcaaaacagtatcttcagaacctgcttccaactcataggtaactgccttctacttggatgtttcacaggccccttaactgaacatgtcctaaattcattgtcatctttattccatcttcctccaccaaaacagaacaaattcatatgctattcctttttggtgagtgtgtgttatgtaaaacagtgcttttgtttgtttttctggtgttttttaagtcatcaacctgggccatcatgcacccagcaagaaaattaggggttatccttgactcgtccttctattacactcataaataactatattccaagtcctgttagttctctctggtttcatttttattcactcacttctgtcctttcctgctttgtctgccacaggtttaaatgtttttagccccttggactattgtactaactttctatccagttttcttatttccagttctgtttcctctgcctactctaaggttctgtgcagaagaaaacatgatcttgtcattccactgcgcaaacccttttgaggatttcgatagcccttagaacacagcctaaacattttaacattgcctactggtcgtatttggtacatgccttttctcctgcagctgatatttaccacacacacacacacacacacacacacacacaagctaattgcaaatatacattttaacattgcctgctggtcatacttggtacatgccttttctcctccacctgacgtccaccacacacacacacacacacacacacacacacacacacacacgctaatagcaaatgtacaaaccattctgaattattctctgtaatatgtcctgcctgttcatctccagaccttctgtgcccttccctttgtccagaatactgttccctctcttcatttgctaacacaacacagtgtacatcatagcttaagagtatttcacattggaattccctcctgagtgtgtctgaggttcccgttctgtgcttccatagcaccctccctgcccagagcaggtatcaactcaactgttagcatttgaagattacttgtcttcctcagggactattgttagctcccacagagtaggaaccctctctttcttactctacatggtaaccccagaagctagcacagtgtttacacagtaagtactttgaaaatgtttgttgaatgaatgagtgatattttatgagcccctgaataaatgagaaaatacttaaatattgtaatttattgaatcagctaaaacgtgaatcattaattaactcattggacagtgtctattataaacacaataaatattagctattgttgctatcatgaagacaggaatgtagataattttttctttttcgttctactttggtaattaaagaaaaactaatgcagtatttacaaatgaatcttttctttaaaattaaggtaatgatttggtgatttcccatctgcagtgtatagatttgcctttgaaaatggaaatgtttttaaagatgtagtgcagtgaagaagccactgtttcaatatatgtcttgtgagatagcaatccccaacctttttggcaccagggatcaattttgtggaagacacttttccagtggttttgggatgaaactattccacctcagatcatcagccattagttaagagtctcataaggagtgtgcagcctagatccctcgcatgcacaattcttcacaagagggtttgtgctcctatgagaatctaatgctgctgctgatctgacaggaggtggagctcaggcagtaatgctccctcgccagacgctcacctcctgctgtcccgcccggttcctaacaggccatggagtagtaccagtctgcagtccgggatttgggggacccctgttgtaaaagatgtttatcatttctggacattatatttttccatttgaactaatggttttatggatctttagaaaattgtctgtggtactctttttttttttctgtagggatgggtggctagaatgtttgctggaaaagatttactggtgcacttttttcagcttacttgaatttatcctaatttacttctcatccagtctggaattaagttatatttggctttgtctataggttggattagattctttccaaaagccaaactacttaggtcattgatgcagaggtcgcagggagacctacaattgtgttactaaattttatagacgaatgtatataaagtctgaacctcatgaaatactgttcatgctgttggttatacagaataatgtgctgtgtgtccctgtggccttgattttcttcagctgagcagtcattagaaagaagaggacaaaaatactatcttcattgtctctgctttggttcagaccttcctccctgcattgaaaactgagggtgacctcctgttgtcttcaggcactttttacttcacagcttccagaagggatgatgattactgagagtggcgcagcacttaggcgtcgtctatagggacctgacattagactgttcactacagaagtcctcacataaaagatagcttttcttgagaaaatttatttgtagattttaatttatgttacagatttaaaactgcagacacctttgtctgaagggaaatcttactaaaagtcagcacttagaccctctttcaaattgtatcatttttagtcctatatttgtaaaacctcttataattcaataactgttcaaaagatcttttctacattatgtttaaagtacctctctgcttttattcttacctagttttatggaagcaaagttttgtgattcagattcctatttgtagagttgatatgatgtattatgaatttagggtgatttttaagtctgccctactatgttctttaataaacaagatgtcctaattttttccacctattaagatgatggtgcagttatggaaatattgcctatagcttatatgttaaaattctaaactgtattggtatccaaatatgcctttgctttttgtaatgctaggagaaaataggcattttttgatgactttactagctgaggacattaaagtactgaaaagttaggaataagtgctgtgtctaaagacagttgtgaaaaaattcattttaaaaatcaaattaatggagatatgaacagagtggttctaatcagagaaatgaaataatggggattatttcttttaatttgatgtgttttaaaattgtcatctcagtgaatgctttagttctaactggataactgcatttgcaaagtaatgatgttgcttgaaactgactatgtgcagagaaagtgtaaaagatgaactatctgctatttctagttcaatgcacagttgtcatatttatcctttgctcaattaaggaaccatattattggggattatttaagtattaaagtatatctggaagttccataaattaaataagttaaaaaataaatcacttctgttagttttatatggaagctcccaagtttttttcatatcatagttaaactgtactatgatatgactacttgtacttaattatatagactacttgtacttaattacaatgtgaataattattttgtccattatgttaaagttaggagaagactttatctctttatgttttttcctagataatcttgagccaaatttaattatatccaaagaattttttttaaattttttttttgagacggagtctcactctgttgcccaggctggagtgcagtggcatgatctcagctcactgcagctttctcctcccgggttcaagtgattctcctgccttggcttctcaagtagctgggattacaggcgcctgccaccatgcccagctgatttttatatttttagtagagatgggatttcaccatgttggccagtctggactcaaactcctggcctcaagtgatccacccaccttagcccccaaagtgctgggattacaggcgtgagccaccgtgcctggcttcaaagaatatttttaccaatagtatatgatattacgtggtttctttgagataaattaagagtttacaaaagaaagacacagacttttatgttcttgatatcttaaagaaaaaaatatactgagtgctcattactttaaacctttgaataacttttaacaatctctccgcattcctactgtttattgatattcttttgtattatcttaagatagactgaattgaatgaaatttgaattttatagtttttaatagtaattaaaattattgatagaatcagatatacaagctctttaacatttaatgtaaattaaaagatggaactgatttaaattggatttgtttcagaattccattttggaaatcagttggcagtattagcaacatcactattatatgaatatatgctaatgtagaatgaaagaaaggtcctcattaaaatcttgttgctaaacaagtgacaaaaaccttgcagacagcttaaggcttcaggtcagtcatatttactcctgaagagatttggacaagtgtgaaagtatatagactatgcctttattgtgatcagaacacataaatgctagtttgtaccagttccctaccaaggacatttttactaatattagacaaaacaagtcttaatgcaatgcctaagcatcctatttatctaagtaagttaaaatattgggtttgttaaatcagaaagtaagcatttgctaacagccgttgtgtctgtgttttccagaaaaggactgaggtttggtcaactagtgtgttttcatgagacaaaattcatgatctaattacctttctaccaaatattatttgggtgaactggtctggtataggtatagtaaggtgacagtaaaggtaaggtggtgcaggggaatccagcccatggttcattaccactattgaacatggcagttctcttaaagaagcctttagctagctttagctaattccggattaactttatatacatattgtttgaggattgcccatgtctttttatttgggatcgtagtctttgcttatgtaaaggtagatcttaacatcatgctataaatagaaaaattaacgtataggaatagataggcattccagagtgaaagttagttgacttttagatagccatgtggctacccttcagcgtctccactgaaaatgagctggctataagtctgctttgccttttgagtgttagagagtccttagtcaaagggcacaaagaatttcccttggtttgatttgacctgtgtggccagctcatctgcgtcaagaggaacaagaacatttgcagttggaataaagaagatacttgattacgtttagagtctaacaggctgggttgggaatgagagagcaaatgttgggactgctgagactagtgaagcagaagccaaagggaactaatcctgtgtgtccttgaaggggaatactatgtatcactcacttcatgtgatcacacacattaaattatttgaattaaagtcatttcttgcatcccttgttccttcttcctattccaccaattttcttggaagtatcactatgatgttgtgagtggatacaggtatctatgctatagggctcttgtcccagcaaggcccccctaatgaattttttatgcatttaataaatctcatttttggttgcttgtggtttaaaaatatttttgttacataattatgtattttcatggacactcctaagattatctgtctaagacaattataaataatttataatcccaagtacctggaaggataacacatagctcaagaaaagagaggaatcttgattattttgtattttcaaagttacaaaagatattgagaaaacacaatacacaatttatttttattttcatttttttgcctacagcttctttgtaaggacgatgtttaagatctcacttggaaatagttgcttacttacagtagatgaggggtggcagagtctggaactagggcagccagtggtcagaaggagggaccagagtagttcatgagagtagctgcaagagatgaggagcaaagcatattgtcctgtgtaagggataagacaggactgagtctgacccaaagcaaacacaagacagagtagtaagtggcccacctgtgggtagcataggtaccaggcttttctgggtttgtggtcctgaaaaggcagaatacccaaggtgccagtacaatttaaagagcaaactagcagagtggaaatttgacagaaagccatttgaagtatctacagcacctagaacttacttgggaatgaaatgggggtcctgttattagaagttaagaaaccatggcagggttgtgtaaaagcaaagggatgccttgctgccatcaggtgggaatccaccggcttttgttgccaggtactaagaagacatgcagagactagacaacagataccaatgtctggaaacaattccctttcaaaggaagagtcaactctttgtatttctcctagaatatacagtcgtgcactgcatgacagtgtttaggtcaatgacagactacatatatgatggtggttccataagatgataatggtgtatttttactgtaccttttctatgtttagaaatgtttagatatacaagtacttacctttctgttataattgcctgcagtattcagtacagtaacatatggtacaggttttagcctaggctatacaaaatagcctagatatctactcagctgtaccatctaggtttgtgtaagtacactctgatctttggaccacgatgaaattgccaaatgatgcatttctcagaatgtatcctcattgttaagcagcccatgattgtactgtttctctactagaaatcctatctctacatcctgtctctatgaagtctccttgcccttcatctcagaagtcctctctccctcttctcaaatcacatttatttatacaaagtgaatatcactcatcttattctgccttttactggtgtacatgtcttttgttgagcacggtaccatgtgccaagcacaatgtacataatagatgttcaaggctgcagtgagctataatcatgccactgcactccagcctgggtgacaggctttctttttttttttctaaaaagaagaaaattgtgtgtgtgggtatttatatagatataattacaagtaattttttccttccaaatttatttcagattttaccaaatgttgcaagaactctggagttcttatggtagtaaaatgccggaaagaaaattctgcattgaaagaatgtctaactgcttagtaagtagttgtctcagcgtttgtgcttgtatgtgtatttgtggtagataagagtatgttacttaactcattacatgtaatatattctgtacctctccataccaaatttatcatattgttggctgagtctaaagttccagtacagtcttaaaaatgcaacatatttatgaaagagtcttttcaaattttctcagcattgtatctgattaaaaagatgaagtcagcagacaaaaatatatgatttttcactatttaataaatcttttttcatgaacagtttgatctgtaaaatatagtacagactgatttttgtttattctgttgtaaagataactgaatgaaaatatctctgagacttcctccagccttgtgatttgttggattaatataatttaactcctagaaagttgagataaatcgtatggatgataaaaaggtaaatttagatttttgaagttaaccaaatttacttttaaaataattttataatatcgtgttcactaatattttgttgtagttccttaaatttaagtaaaaatgtgtgaagttctttgaattcacatgctgatttattcacccatgttctattgcccacattattgacagataagattgcagaatactttagtaagtattgttaattgaatgttgagagatcttagttttggtaagcctttgtttcctttaatttctgtagcctgtgcagcgtatatgtcagtatggtatgtatcttagaggattaaataaaaatgtaatgaacacccgaaccctacatttttttttaaataaaatatgtacacataaacttatagacctttttttagaatggtggagttggaaaagactttagagattatgtaaactcatctctatatttgctatatttgtaaatgatgaaacataatcaatattgattttttttcttaagttaataatatcaaagcagcccttatttatggtccaggtattgtactcagtgctttaccatataggagtaaaagttcattctgtgacttaatattctttcagttctattctcaagtgcttccaagaaatgtttactgagtaaacgaatctcttaaacttttgtatgactgaattattaaattctgtcttatacattgattaaataatttttatatctcagattcagtcatcataattgttattgctagtttgacatattatccttcactccagttgggggagctctagagcagagtagacaggagtatagactgcagagagggcaacctgggttcagcttctgtatcagtgagagcttagctagtcgtgttaccttaggcaggctcctcattgtaagaaggaataattatatcttatggagtgattgtgaggtactgcatgtaaacacatttaccatgataggtattcagaaaatgttagctcttttttgattagtatttgttattatttatctgaatattaatcatttgaatatccttccctctctcaccccctagaaatacaagaagaaaataacagattctagtccatctgaggggaggagaggggctaggaaggatggctgtttctgcttgtttagaagagataagcagtggatgtgacattaactgaaagtaaatggaaaattattagggaaaattgtacttgactttgagtccccagatacactaagaaatagtatttattcatctttaaataagaaggtgttctgctttgttaattactattgacatttccatgaaatgaacgtaactgctatcctctctcattttgaaacattgtttttgctcctttatttctacctcttactttcatttttttccttaatacactatgatctgatttctgtcctcacatcactgaacctgctctttttaaagactctaatgggctgatggtagacaaatccaacaaattgttccttttcttttactggacctgtctctggcaatcccttcttaaaagtctcctctgtcttccctgataatattttttcccattttcccaaaatctctttgtacttctccatgtttttaatctactccttaatgttggtgattccccaagttctcttctcattcttaaatctgaggaagtttagtttgcacccatgaattcaattacttactatagaaagtaacatttgtttctttgttcaagtccaaaaatgaactgggctccttttgctcgtcctacaacgtgtctttgtgaattatacagtagtctagtatctacagtcttgtctcctaactctaattggttatttcctattgatttctgaaatttcctgcacatcatctcttccttttcattcctacagctcctcctttggcctgcgccttccatcatttttgcctggattattttaacagtttattggctatcttgcctctaaccttgcttgcctccttttgtcctatctgccacatgttgtcagattcatccaagacacaaaactgatcttacaggtgaggtgctctattaattgtgccccattttcttcaggattgattttaatttctgagtatagcataaatggcacatcatgatttgacttttgcccattccatcttcatttcaggccttttctcctatgtgcataatctgctatagtggtacctatctacttggcaggttttcctgcattaatttttcctcatccatgtgtcttcccacacttgccttctatatggatttctgttggtctttcaaaatacaacgcaagcatttccccttgaaacctctgccctccccatttcttccttgtttccatggtgcactgggccatacctctgtcacagtattttgtagatttaattttaatccagtctttacttgtcctttacaccgtgggttcccaggacaggagctgtgcttctcattgctctattctgtgacagtgctatataaaaatgaatgatttggtctttagtttggtagcataaagttaacagtgaatttttaaccattactaaaagtgtacttctaaagattgagcctgatgaaccagatgtctgaatattagtaattaaagtaagcttacatttaacacatgcaggattatttacttgaaaatattttcatttccttctcatagctataatgatccagccttttatgaagaatgcaaaatggaatacctgaaggaaagggaagaattcagaaaaactggaattcctacaaagaaaaggctacagaagcttccaacaagcatgtaggcagatactcaaatgacattcaggaactctaatattcatggaagtcattttatagtccttaaataatggactcaagcatatatgtttgctttaccttaattatggaaatattaactttatctgaaataaatattttatttcaaagttttggtttcttaaatgggaaaggagtagttactgaattgggatatggttttcctggtcattctggaccttttgaaagttttcccacaactatagttctataacagtgatactgattttttagagttcaatatggtccttatattatttttttccagtgtatatgctaatggctaatcatgggagccaaaactaaagaaaagcaggaatggacaaccttcaaaggtgttaataataactaggcagtatagcagaatggctatgaaccagaatccttcctgattctaccacttattagctatacagctgtggaagtaaatctaatacagtttgtgaggatgtactgagtattgcatatagcaggtacacgtacagtgtataagacagtgcttcagacctggtacatgctcttatattggtagttactgttagtagtagtagaggcttatttggaaactatcttagtccattttctgttgctatgggagaatacccaagaccaggtaatttataagaaaagtttgtttggctcacagttctggagtttatttgccagcagcttctggcaagggttttcatactgcatcaaaacataatagggtgtaaaaaatagaaggacaaacaagtgtgggcaaacttttataacagcccgctctcttgagaactaatacctgtaataatggcataaatccattcacgagggctccagcctcatcaccctattacctcttaaaggctccatttcttagtcctgttaaattagcaactaagtttccaacacatgaactcttgggggacacatcaaaccatagcagaaccatagataaggagatacctacttatatgaattaattttacttacatctttgatgtagaattttctaaaacataatgttcttaacctgataacttgttagtcctttaatctttcattttgaaaagttatatttctaagtgaattaccattctgtaacatagtaatggactcaggaagtagtataaaaaatttatgtcccaatttaataatttgagcttttatattaaaagttattttttccccatgagctgttaactcttccacagccattgtaactagtttcaagataagtaaattttacgtatattttcacagtcctcattaaaatcacaaatagaaattactacccactaagacaaggtttaactttccctaatcccatgcaatagatctgagagatttttttttaagaaagaatttaaataggacactaaagaatcaattcaagttccacactttactcttgagtgaaccactcaaaaaactattttacttttatttgaaatacaaagaaaccacattttcccaggccacagatcaaaaggagggagattactagagcagacaaaagcaaagcaaatatagaaatctagagaccacacagcataggggcaaacatgcccatatttccacattgacctttggtattggtgcatttcctagagcacaggaagttaactgtttttagagataaatgaaaatggaagagttactttaagaagctagtgaaatatacaatctattttatagctttgattaaaatcagaagtagcccacttcatgtagaaaattcacttatgtacatgttgctttccccatagaagccagattagattacacagtataaataatatgttcatcctccttatgtcaaagactaaaccattcattgtagccttcagaatacccatgtgtatccatactgaagatttttttcacctggtacatctgtctcagttgtgtcttgcttgcttatgggtgcctctgttgatattattccctgttaatatgtggtaacccacaggttttttaccccttaagatacaccttctccaagtagcctttctgaattaagatcagtactttgttgtcacatgattcagctcttcaagtctgaattttcccatttattttggttttctaatgtttcacataggcacgttcctgcttttaagaattcagttccattttggcagcaactcagtaagtcttacagatgtaaattttactttagctaataagggagcaagaggaaggaataggtggctttttgttatgttttcttcattctgtcgatttatggatgtactgaattgaaccttataaaaagaaatctaaagattccaaaggaagctctttagagcaagtttcagctagtatgaaagaagtcaacataaaatattcaattttaaatagattcataagctacagatgggccactgttttttggttgtttgaattttacctagaacagagatatcaagtgtagatttaaaagcttctagctgggtaaaaaatttttggctaatctttccttactaaagaaccttatacatcatttgtctaacactttaaactgtcacagtcactgactttttagtatacctgtttgatagctatcatcactgtactgtttaaatggaaaataattttctccactcaaaagctggtttaacaaatgtctattgtatgaatcatattaacaaccaacaattagtactagattttgagatctataggcaaggacaatatttcacatccacttcaatttcaaacaaaaatatttattttaattaaacaatttcttggtattgttcaaaacattaatcaagcaattatctcataagactttttttctttacaaaggaaaatttccaattttggttttaaaaaaggcaaaccagtaagctacattagagatcagatataatatacagcctatgcagccacatgagaaatagtttttgctgctttgttattacacaggtagttgcttccttcagctaaagcctggagtattgtatttcttttatgcatattgggtttggttctattacttggcaggagattgtactcccctgagtcagctgtgttcattggtcagaataaattccagcatctgacaccaattccattaatcacagacaagcttgaataagtgtaagataatagaaaaaaatatctagtgaatggcgaacattgtctatgtatgtatgctattcagtaatacagtagaagagatctgagatattgagttcaagatatatgaaactgtctatcaaaaaggataaaagtcctcctacatgaaatactttaattcaggcaaaaggtgtatgaaccaagtaaatctccaccctgaaagaacttaaatttccatgtgaagccatctttatttccttctttatttccaaataattggccacttagaataagtgtggacatttcatgatcgacaatatcaatacagcccaaaccctgatttctatgattaaaaataataattttaaatcactttctcaataaatagaatattacatttcaacacaaagtctaacaatttagaagctgctctacacaatgtgcagctagctgtagtctctttgaagaaaatgactttttatcattacacacatttatgtttatattatggcccacagaagggcagattagactgaaatctgtgtgatgctccttctactacttattgaatagtgtgtagggttacaatcatttgtttacaccccagagtttttcaactatttcatttttttttttttttttcccaattaggacttaaggaatgtgctgggacaaagttggcttcagtgatcaggttgtttcaagtcttagaattcaaacttcaattctaaaaaaattttatcaacaaaacactgtgaccaaaaaatcactttaaatcttaaatattgaaacgcaatagcatataaagatggtataacctaagatgcttttatttcattatattttcaatatctttacgcattataacaacagaaatgtaacctactcacattgccatttgttccattatgcaatttgaagaaacatgttttccttttatttttatgaacagatatttagacatttcacattttgtaaaaccacgtctacaatctccaattccattcttctgagaggcaaaattttacaattaatatagaaggcagagttttttaaacaccttaagtttacttattaattagtatagtagcatatttcagattcttagaatatggagctagagggtgctctttcatactagaaaaccaactatgttggtttttgtactattgtacagtgtgttcaaatatagatactgaagacctctgcaaaattttaatcaaaatctcctttcagtttgttaaataatttcttgggaggaccactgaaagagataagtgtcctcatggtgaaatcgtgaatctcttccaaattaattcttataaaggcagttctgattatgttgatccaagtaatgcagtggtggaaggttgggtaaaggcaaagttttagttttagtttccccaaatgctgtctcacttgatttaggaggacttggaaatacccaggaattgtcttccagagaatttctgccataagaactgtgttcctgaaagcatgtaccatcattaggaatggatctctcattgtctgtccatgattggaggattgctttctctgataaaacctttacatctcctggtaaaggggaagatgtggtatgacaaagagctttgccatttggtaagagagggggatgtcttgtgtatgttgcagtaaaattcatcaagtgcagttttgtgctgtctcttccaaggtcttcactgcatcctacaggggcacaggctaaaaagaaaacacagactaaatgtcagttttcattacatttgtgatcataaaattcgataacacttcaccaatttgaattctagaactggtgatgaaattaagatttccaagttagtgtgatcattgaggcactgtgactaggagataaatgacagatgatctgagttttaatcctggatcagcaatttactgtgactttagatatttgtctcttagctgctcctgatgtctctttccttgtctgcagaatggatatagaattcctgtcccaactatgtcatagagcttttaaaagatgaagaactacatatttttaaaagttggaaactaatacagttaaaatacaaataaagatcctgttcttggctcttattgtggctggagaaggattgcagactgttcacatgtcagtggggactgagacagttcttaagttttagcattttttagttaaatataatattcctttgctcaaactctttgtccacaggcagtccaaaagcaaattttttagaaataattgcatttttaattggtgagacccaaatgaagtttttatatatcaaaggcttttatggataaagcagtttaaataaaatttgtgaaatcttgtttcttgtaaaacacagcaaatgttaatgctactgtggtcacaatgtaggtaaagtaaaaaaaaaaaaaaaaaacagccaaaaaaaaaaagttttgtacaaatgcaatggcctagaaaaagactacttaaaagctattatttcaccacagccagcacattggtaatacaggtttctccactccctccagctcagcctaccagtgtggaaaggtaagtttatccttagctcaagaaggatggccaagtgtaactaaggcttgacttcatgtaattttagaagaaacagattgaacgacattataaaataagttcattgtttttcctgggagggtggatatggatggaggagaactggaagtgtagtgtttggctttggaaaaaaggtgatacaaaggtcaggagaaaggtggttctagtctcatctctgtactcctcaaagcaatgagttctgtgtaaggagtggtgaccttgagcctaccactgtcataggaaaagtgctagaaaacttatgttccaaagcaccgaaaaatattaatcagctaggaaggaacacaaggatgagccatgtccaagtatgaaaagagcattgctcctttattattctttggtagttctatttatcatgtaaacaaagctacattgaaaactcaatgcagaattactctgtgagtccctttatagagagatcttatttgtacattcaacctttggtctcatatataactctgaccactggaaaactcaaggacaaagtgaaccaaaaattaagctggacttgctaaaacaccatactattttccctgatttatatgtaaccaactctctaaaaatgaaaaggagttctacattcaattttccttcccaaaatttaacatttttcctcactaataaacactcctgaggagaactatttatgacacaatcctcttgtgtcctctttaagacaatgtgaaatataaataagtaattttaaactagatggtgataatcttttataaaaagtcctatctcatttttaaaaagtaaattttagggcattcaaatttgtatcacacaacttttcagaaatatacctgttatgtaatactaggtacaaatgtactgatttttctccaaggtataaaaatagctttggcgaaagtagctactactagttaacacaaaactcaagaagttaaatcagtcaagcagttaaatatgaaaggcaaagcaatgaaaatttttgtttggttgaagggcataaggggagaacacctagtcttcgttgtaatcagctatatcctttatggaaagaaaagcttataagaaatgcaaaaacccaaataatgaatcaaagtttgttttctttttcaaaacaacctaaaaagctaggtgtttggtgtattctgtagcactagaatgaaaatttgcttttggtgtctttttttttttttttcaaatatatgaagtagctgtggtaaaaggtcaactagagcaaacttaacacctcagtcttatacacataagcaacacttggctgagaaaagccacaaggggaaaagaatacagtactgaagaaaaaacacatcagcaacacctttatgtgtgaagttgaccagtatgagactgaagccaaagcagagaatgggtaggctgcgaatgtactatatatactttggcttatcaatctctcatttgatgagattttgataagatatgacagctagttgctcttcaggcagtttggctggaatcagtggtttccggtaaacagtgacttgcctttcttgattgcagttgaggttttcagttttcttagtagttcagcttgtacttgagtcaccagatgtaaattagacatttctctcttcagttcccagtatgcatgctgcatattatcactgaaataaatttttttacaaaaagttaatactcatcattcttttttagacaaaagggaataactttagaaatatgcagatcaagtttctgctccaattagttttgagatgatgtaaactgaaaaaaacaattgaaagatatttaactagggcattaataagtgaaaagatcttgaaagaataacactgtccatctgatatgtagcaattaactattatattaaacggtataataaaaataaaattataactgataagagcttcttgcagagtctcagaactgagatttcattttaggctgtaatgtgcagctattaattagtaagtagtaagaaatacattctttatttgcaaatctgattaagagtaaagttacattcattcaaatatggatcaatttgtatttatcttttgattgttttgacactgtgaattgaaatgatatatcaactgctgaatatatatccaagtctacattaaaataaaatttaggtttcatgcattacattctttatgtttgactgggctgtctcataatgttggttctaaaccaatgtgacatgacagcacaagacatgaagagccagatgatttcctggtaaggaaaaagaagctagagagggaagattatatgaaacagaaatagaaacttcaaaaatgcctctcctgtttttataattaaaagtattttacctcaattatctaagaaattataattagtgattttaaatctaatttttatagattttgttttccattaaacattcatattcagacattcatgattttctttttttgctgcttaattgccaactaaatgaaattaaaatcttcagcacatattctcattttgttgtacaggaatatcacaaaatattaaatgtaagactaaatcttataacattaaaaaaaaattattaccccttagatactagtgtaattttaatagtacagaaatcaaactagacaaacgtgtcaccttatgcttcaatttttgtgttgccataaacacttaaacttcaaaaggataacatttttgaaatctaatatctcaaattacagaatatagtttatatttaatatataatatataaaatattttgaattctgtaaggtgaaatacctttttgtcaataaactttacactgcttttcagaaaaatctgctttagtctgttgtaaacatcatttgttaagttgtagtatattagaaatcagagctctttgcaagtttttaataggtgtcaaataattagttcacaaaattaaccatgtctacttcaccaaaaaacatctgagttgtttgctacaatgaatgtttcacataggaacctgtcttaagtgtgaagagagttgttggtttcttggtacaattctaggcattcagtatgctttccgaagagttactcacattatatagcagtaagtgtaaacactgaacatgtgctaattcattcattcagtcatggtatgaataatacagcttaaaaatagtttattattggtgcgagacagtaaatcagtgcctgttttagagaaaagaagagcaaatactgaagacagttctgagtactaaaatacacagctaggcatggaaataaacaattctagtaacgtttacagtgcctaataaaaacttttcagttcaatttaatgaagactgcttaaaacttaggtttagttaaaaactaggtcactgagtttaatacacatgtagtcttgttttttgctcttaatgtaacctgaatttaaaactacagatagacaaatctaaaattattactaagtatagctctccctcttgtggataagaaaataactgcagttagtgtttcccactttacagttaacattaaaagtgctacaatcttcaaagtgtgtaaaaaattattttaaattctatctacttgaacaaaatgtttaaaccattatttaaatgatattggaaaaggcaagttgtcatccctaatttttagcaggcttccaattaaacctcttatctaggtatttcaaagacaatgtatagattgtgaccttcctatcctcaccgcagttccccaactgggagtataaagtttagttttgctttaaatgccacacaagcaaaatgctagtaatatatatagttgtctataaagaacttatacaactacttaaaatattgaaatgttacactgaaacttctcaaatgagaactctaaaaacagataaagcacaaataatgatggctgagcacttattatatactaggcacttcacctacattgtcacaccaacttggtaaagtgagtaacctcattttacacacgaggaaatgggttgagaagtctactccagtctgccatgttgctgttcaaagctgtctttcacttaacccggtctaatgactgatcactgcccttttggagtaacatttttgatatcatcatcaattaccaagcacctacaatatgctgactgccaacacaatcttataagttttatacttctcagtataaaacttcacatctctgacttttaagtgaaacctgcatgtccacaactgaaggagggagtacatgtcctgcttacaaagtgtaacagctaaaagcccagctttcttaattgacactatatatggaactctttaatacacaaataactattccttgtataagaaaaatccacttacttgagtttctacttcagccatacatatttttctttagcatttgaaaatttactgaactattacatcctccatcatcacagtagaattaaactatgggatattcttagccaagagttatagacttaaaagtgtgtattttgacaactgcggttccccc

SEQ ID NO: 127 - DNA, 563 bp, Homo sapiens
cggcggaagtaggagcctgggaaggaagagggaacgggtcctggcggtgctttgcaaagggcccgtgtttctgttgcgggaagctcccgggggtcgcacgtgcgtccgagcccaagcccctcccctccactccccttcctgcgtgccccggagccgccaagcggctacgttcttctcggcccgccgagatggcgctcgaccccgcagattttaccaaatgttgcaagaactctggagttcttatggtagtaaaatgccggaaagaaaattctgcattgaaagaatgtctaactgcttactataatgatccagccttttatgaagaatgcaaaatggaatacctgaaggaaagggaagaattcagaaaaactggaattcctacaaagaaaaggctacagaagcttccaacaagcatgtaggcagatactcaaatgacattcaggaactctaatattcatggaagtcattttatagtccttaaataatggactcaagcatatatgtttgctttaccttaattatggaaatattaactttatctgaaataaatattttatttcaaa

SEQ ID NO: 128 - protein, 76 aa, Homo sapiens
MALDPADFTKCCKNSGVLMVVKCRKENSALKECLTAYYNDPAFYEECKMEYLKEREEFRKTGIPTKKRLQKLPTSM

SEQ ID NO: 129 - DNA, 644 bp, Homo sapiens
agcctgggaaggaagagggaacgggtcctggcggtgctttgcaaagggcccgtgtttctgttgcgggaagctcccgggggtcgcacgtgcgtccgagcccaagcccctcccctccactccccttcctgcgtgccccggagccgccaagcggctacgttcttctcggcccgccgagatggcgctcgaccccgcagaccagcatctcagacatgtcgaaaaagatgttttgatccctaaaataatgagagaaaaggccaaagagaggtgttctgaacaagttcaagattttaccaaatgttgcaagaactctggagttcttatggtagtaaaatgccggaaagaaaattctgcattgaaagaatgtctaactgcttactataatgatccagccttttatgaagaatgcaaaatggaatacctgaaggaaagggaagaattcagaaaaactggaattcctacaaagaaaaggctacagaagcttccaacaagcatgtaggcagatactcaaatgacattcaggaactctaatattcatggaagtcattttatagtccttaaataatggactcaagcatatatgtttgctttaccttaattatggaaatattaactttatctgaaataaatattttatttcaaagttt

SEQ ID NO: 130 - protein, 106 aa, Homo sapiens
MALDPADQHLRHVEKDVLIPKIMREKAKERCSEQVQDFTKCCKNSGVLMVVKCRKENSALKECLTAYYNDPAFYEECKMEYLKEREEFRKTGIPTKKRLQKLPTSM

SEQ ID NO: 131 - DNA, 247461 bp, Mus musculus
  misc_feature (1)...(247461): n = A,T,C or G
ggctgaggagatagtaaaatcccccaactaaaagagctttagggtcctaatggatttactgtccaattctaccaaaactctagagaacttaaaccaatacttcttaaattattcctcaaaataggaaatgaagaaatgtttttaaactctttttataaaaccaatattaccctgataccaaacttagataaaaacacaacaaaaagaaaattataggccagtatttctgataaaaacagatacaaagattctcaaccaagtactacagattttgtccaagaatatatatatataaagaaagaaagaaagaaagaaagaaagaaagaaagaaagaaagaaagaaagaaagaaaagggaagggaagggaagggaagggaagggaagggaagggaagggaagggaagggaaggaagggaaggaaaggaaaggaaagaaaaggtcaccattcactatgttctaattggcttcattccagaatgatttcagagatgatgggataattcaacatacaccaatcagtaaccagattcaaggacaacaaccacgtgattatctcaataaatgtagaaaaagccacgaacaaaaatctaagatccctcatggtaaaagtaccccaaacattaggagctgaaggaacatatctcaatgtaatatgaggttttatatataacaaatctagagtcaacatcacactagatagaccaaaacagggtaaagggatcacggtgttgcacgtctataatcgcagcactcgaaaaacggaagtagatggatcaggagctgtccagggtgaggacacctttcctgcctcagccaacagccttggcaaaacaggaggctaagcaggaggagcaacacctcctctccaacctccctcagtagctccacagaaatggtggcaagagccagctgctgccgggaaggaccttccaccctaacccctgggttcgatggagggtgcgtggataggaaaaaaaaaaaaaagaccccacgaatccctgagttccccaagcccgaaacttgaaatctcaccaattcttagtctggaagtttctaccctgaaaagacccgcccccgaaatcctatataagccttgctctttgtacaattccctgctttccactcccgggagcagagaacagccatccctggattcatccctccacaccctggacaccccctccaatacatctcttgcatgagatttgctgcctgatgtgactctagtccaaaaaagccaaggagaaaagaagcaatgaagagaagaagcaaggaaagagtgggtctgatgctcctgagctcctcagcccagctggggatagccttccctgggagttgcagtgatctgccgaggaggcttcctctcagagctgtgtggttcctgggttcctgtgtctcaggatggccttcccttgggacactgtcccacctcaaagctgtaaggttcctaaatccccatgtatcaggatgcccttccactgggatactttctcccctcaaagctggatggctcctggcttccaaatcccaagatatccttccatttgcattgctataccagaactgtactaaataaacttgtttgttttaatggatgttaagtcatgagctaaccaagaataatgtttgaaaacccatcttggggatgagagatgaaggattctaagttttgggggtggctagaaaaaaggagctactgccagtaagtagctaaagaagttgccatcaagaagaggacagattcctcgattgtggagttgtatgtaggactggaaaaaaccatgcagggctgggtgaggaaggaaggctgtgagcaggaggtgtctggagaagccgcagcttctgagtagtcagcagtagaagggcaatcatgaagaggggctgtgtgtgctagaaatgaattgatgtataggagcagcttggctgcaggaagatcttgaagggacctgaaatgggtgagcaagtgcttggatggagaagatgaggtggggcagacatattctgcagaaaatggaagccatcacccacccacctccaccttccccatccctggtaagacctgactcggtcctggggaggaacacaaggaacgggctgatgaagatggggccactgagggtggtgcagagactgaagcagagaaggagctgggctgggatccagatgccagggcatcacttgatctgtcgggatgaggcaggggcaacccagccctcccctacacagttgcctctgggtgactctcaaggtttccagttctcaggcttggccctcagctcctgcctccccaaacaggattttcctgggtcttttcattggtcatggccttggtgctgttcccaccccgctagtatcccctccctcttgctccaacacaatttcctttctcttactcttgggatatattgatgtgaatgcttagtaagtagtaatgtgctgctctagcagatgtaggtgtagatgtaggtattggttgagttgcttgaaggaagaaagggcaagaggtcaaagccatccttgtccacatgtcgaatttaaggccagcccgacataatgagaccctatctttaaaaaaacaagggaccagagagctggctcagtggttaaaagcattcactggtttgcagaggactcaggttaagttcccagaacccacaactatttgtgacttcagttccagaggatccaaccccttttctgaccttacatacaaacacacaaacaggcaaacattcacacacagaaaaataaaataaatctttttaaaaacagcaacacaacttattgtttatatactttgtgtcttttttttttttttgagacatgacagccttgtgttctcagactctttaaactgtattcttcctgcctactctccacagtgcttggaattaaggaggaagctgccacatccagcaaattcctcttacttcaggcttacctttttatctctgtctctagttttgtttctaggagctgtaaactccagaactgggaatcaagggtttaatttaaaattcttgtcgtgtgtgtgtgtgtgtgtgtgtgtgtgtgtgtgtgtggctggggaataggacccagtgtctctcacacacttggctccataacccgggtcgaattaggggcacgacttgcctcacttctatagtgttcagatggacatgggcgatctgtggcaaaaagaaaagaacaaaataggagcctcacaacctaagacggcccctccccattccagtgctggccctgcccatgcagcaccccaccctcactgcaatccttggaggatatgggagactgagccacaaacagaagactccaacctcatctggctttcctcggcaagctccaactccatgccaagccctgccactcaggttggagtcccaggactaaggagcactgtccttcccctctccagttcctggctccgctactttagaactatgtgagtcacctctgttacctggtaccgatctggctggtcagtattttctttacctgcaacctggacacgttcactgggggcatggacatgctgactggtcttgtagcagactctgatgatgctggaccacagttttaaggcctggcaagtgaatagcatttcctcgaggtgccacgcctgctcagtggtttcctcaatcaatgtattccggtcctggcaaagtacaggttggccaacagctttgagaagatgaaatctttggtcggtgagagggcaaagcagaagaggctgagacctgacgcctgtgtcacctagttgagaaccagagcctgctgagactgagtgcacaactgagaaccagaggtttagcaattaacacctgtggccatgtggtgcctaaactctcagatctcgctatgcctccttttctcaggtgaggtcacagatctgaagaggaaatcacgggcatgatggaagtgctaagaatgtgctacgtccttcctgttgctcttacagaaacaggccccttcctagacctccctagagcaagtatcagaccttctgtggttctgttttctactttcttttcccgtctgtgtcctctcggggtcctcaggagactttctgggacagaaaccccaactggaaccccctggtaaccttctgagatgaagggaaaccagactccaagttaataactccaggctcatctttctgacaaggaacctcgaagaagagcaggagaagtaggtgctgatggctggaaatggttactagagagggggcaggattgtctgggctcctagagactctcccagaaagggtccatggcctcaggacagaaagcagtgccatggcatcccaaattgactgcactttcccaagcataatcctaggatgagtgaaccttgaaaaggctgagtcgttgtggggggcagttaggaggagatggagtcctgtgtgggctagaagtctgggaggttcctgaagagtcactgctcagtccaagtcagaaggctaaagatgctgggtgctggttgtcagtgaaggatggtggccaggaggtgtcggctgtagcatgcaccaaggtggagaaggaagcaggcaaaaccaaaccttttctctggtgccttcttatattccagcttcctggtagagagtgtggccagcattcagcgtggctcttcccactctaattaaactaatcaagataattccttacagatgctcccagaggcatccttcttggtgatgctagatctgattttagagatcatcaagtagagtctacctagtggaccattaattaaccatcacaatgagtgtggacttcctgtttgcctcatacttcatccttctggaaaagaaacctgacgggtcagcctcacttaaaaccctctcggtgacatcaataccgtgcagaggggcttgtttggagcctggctgcaagcctcaccagtccttaccatcccccactcaccccacccgccccccccaaactctcttccatccctattcaacacctggggacttcttgaccctattgtttctgacaggctttccagcttttatctctatcccctccccaggagccttcctcctatcaaagctcacaggattcagggataggaagagccatgatgaaggtcccaccgttgtggacttttgcattgctcattctcacatcaagtagatagtggacagcgtgggtccttaaaatgtgacttcgtttaaattttgctttattttaaacattatgtcaggtgtcctaagaagaagagcttttatatctgggccttaacgagcttttaactaagtctggaatttaaggtgcttaacaaaatagatgtgttaatacagcgaagggggtgggtgtaccaggcggaagatcacaaattgcaaaagtctagcttgtgtgcttttgtgcagggacagactgttcagtgtacaggttactgtgcccgccttctccgtccatacaaagtcgagagtcgaacgccacctggtggcagatcttgacaataacaggaaaaaaagtagctcccatgcctcctccctagacaacttcttcctggtttcctccagaaatggatctgctgttacaggtccctgatataacaatagtcaagtttacctaaaaattgattttccagttagcaaaggaatttcatgcttgttgcaaaaaaaataaattggaaaacagaaaagaataaagaagaaatatgactcacttaatggtcacagcccagaataatcactattaggatttggaaatattaacttccggtgttttttctcttattacgttcttttcatagataagaataacaataactcgtgttcttacatcttctatatacacatttcaggtgctgcaagccaacccggagttagaatcgtatcattgccgttactgtcttgagttctctgagcagcgatttctttcaccatctgtgaaacatggctcccagaactgtccccaggatgaccaggcatctgcagcgatcagttcagtccttgtcatagatctgttactagccaataacaggttataatgtgaagctttgtcttttctgattcctcaaagcaatctgtagaagtagaattgacttgggggtgggttcaggggcacggagagccacaagatggctacaggtttccagaacggaaaggaaagattcaagcaagattttgtgtttccagcgctgcagctgttcccatttctctctaaattctttcagtccctctttatgttgggcagtttttaaacacggtaattacagtgctctcgccggttcctatgatgttacatcactggcatttttctctagggctaaagctgtcacagacagcatttaccaaattaacttagctgcttcctcagtgtggaataactgaaccatgtagaatttcattcattcattcattcattcattcattcactcatccatccatccatccatccatccaaccatacatacatacatacatacatacatacatacatacatacatacaatagttactgagtacatcctctctgccaggtcactgtacccctcatttctggctccaagactggcaagacagacatgaaaacagacaagcaaagctcccaccttggagtcatgaggtcccttaccctgacctgctctttgctctcagcagtcacagtggacgctgctcctggatgcacttcctatggggctggaatgttcatttacatattctgggggcttccagagaagtgagaggtatttccagtgctgtccaaagcccaattgggccctttgtgccctgttcttttttccccccatgcttgggtttcatctggtccagtcagcttccctgctcccttgcatgcacagcactgcatctcttccttatccttttcctcggtgagttcctgcagcatctgcagcaggggcaggggtgtcctcggctggtggacagagcctctgtgactgtgtctcagtgggcagagcctgtgcttggtttcttcctcactggctctggccatggcttatgccatggccacgccatctaactatgcctgccccattctcaagattcagcgtatagttcatgtctgatgtagagcctggcttttaattctcaggaaactcatttggtctcatgcttcatctttatttttctctcttccataattatctcaccgggtgaggtcggctttaaattgaaggaccagagccatctcagcggactgaaagctgaagatgtgggcagagctggaaggacacgtgggaagccccagaggcagaagagattacgactgtataagcaagcggctatcgctatgtgggccgctcttttcagatgtgataagctgtaaataatttgttactgcatccacagtgctctttgtggatcacattttctggtcttttctagagagaaatcagttcaaatctgtccttgcctagactgatggggaggctgagatgatttctctgtgaagtggcagtcaggatgtggtagagggttatcatgcacaccatcagtacagactgtagctacttctgccggagggcactgagtaaagttccccaaaagacagctaccaagatgactctgagtttcctaggcagagacactaaggaagggtacatctaggcagagggaacagtgtgtacaaagtcacagaagcaaagagaggatgtgattccagaaaagagggtagaaagagacaactaatgtttgaaatttatcaagagaggttgtgcaagtagaggatgtttctatgcttggagagcgcagctccagctgcggtatgaatggacaggagtgtaatggagacagatggtactcattgggaggctgctgcagcagctcggagaaaaggcagaggctgacctgacacaacggtgacagggaaggcaagagaaatgctatctcaatgtaaaagtcacaactgtagggatggattaagagaggagggaggtggggtatgataattttaagcattaatgaatgagagacatcaggtgggacaggatttggggtgtcctactattcatctccagaactttccttactgaaagcataaccctgaactaattcctgagggagagtgaatggctgggcagggaaggccccacggacagctccagaactctccgaaggcctcaggcaagtctctggttcttgatattggggccttagaatcaacggggcaactttaacaatcccgcccacccccaaccagtcacacccacaggctcaaccagatgttctgggccacagggtaagcacctcaagcacctacaggttcttgacgcctccacacctgggtgggcctcgaggcagcttgttcacacactgaaattcccggccaaggaaacaagacttttggagaaatgcaggaggggccattttcccccaggacccttaaaactaaatgtggcagaactcactgaagtgcaaccacggccactggtcagtccaggctgctgttacgactttctaaccccattttctgaaactttcaagttaacccaaatgtggctccctcaggcaggagaggaccctcttctagatcaactctacatttttatgcctaccttagttgggtataggagttcatcactcaggaggcagaggcaggcagaactttgtgagtttgataccaagtggtctatatagtgagtttcaggacagccaggcctgctaaagagaccatcttaacaacaacaaagtatggcagccatgaaaaactgaaaggaggggctcaaagaaatacttgtacatgaatgttaatggcactattagtcacaagagtcaagggattaaaataaccaaaaagtccgcagaaaggtctatggaagaataattgtgcacgcacacatagaatatttgtaagctttatgatggagtaaaattctgacacccactatgatgaaaaacaaaaacaaaaaccttgtgaagccaaataagataaaaacaagaggtaccccagtagttagattcaagggggaaatagacttgtggtgaccagggctgtggggtgggaatcccaggagttagtttatgggtatgctttcaatatgaaaagttctgaagatgaatggtagagatggtttgcaccacagtatgaatgcactgaatgccactgaagagtgaattaaaaatagattaaatgagggctggagatgaaggctcatctgccattcatttcctggaaccacgcagcaggtcacatcagggaatctgatgctctcttctggcctccttctccaccaggaacatgcatagtacacatacatacatgtaggcaaaattatacacaccacacacataataaatttaaaaataattagtacgttttgttatatgtttttattgtaataaaaagtgttgccctctacaagtctaggaatctgaagggcttctccatctcatgggagagacctgaaaaccgacaaaggtggcctccagcctcagtctgaggctcacagaaaaggagtcgatgaatgtagtaggactggggaaactaagtctcgtgtttgaggaagatgccgctcttcccaagtccttccctttccaagctcgggagcgagacaggagcgcaacctcttttaccctcagccccactataaatcattcctagccagtccctgagtgctcagaaactctgcatgtgtgacaagctgccctcttccaagatggctatcgccacctctgtgacaggcctggtcacgtggacgcgctcgcttgtgaggtcgccgggcccggcaggcgattgtcccttgcggggccccgtcccgaggcggcgactatccctgtcaaccggggcctgagagatcatggcaacgggctcgggcggggagcgcgtggcggcggcggcggcggcgacggcggcggcagtttggtcgcgggccgggacggcggagcagcggcggcggcggtggctgtggcgccggcaccggcnnnnnnnnnnnnnnnnnnnnnnnnnnnnnnnnnnnnnnnnnnnnnnnnnnnnnnnnnnnnnnnnnnnnnnnnnnnnnnnnnnnnnnnnnnnnnnnnnnnnnnnngcgaccgagtcgctaccggcggagactgagaagcagcagggcgtggacgctggcgcggccggggatccagagcgcctggagctggaggagcagcccaaggacgtgggccggatcccgaccccgacgcgacgccacgcgcccgaggaaggagaggcccgcgtcgtccggcggctgccaccagcgctgcccctggcccagccgaggccggcggcgcgggccctgagccagctcgtgaaggcacggggccggagccggagccgggtctaccggcggagcgcaggctcgatgcggccggtcaccgtggacagctccaaggcccgcacctccctggacgcgctcaagatcagtcttcgccagctcaggtggaaggaggtgaggcccgccggcccggcgcgtgggcacaggggggtcgtcccgaggcctggcccccggagccacttcccaggtcaggtcagcccgtctctgctctgctcccctacagcttttcttatgtctgcagccctggcctcgtcaagctgtagatcctggtttatccgtcctgtcttctcctctgttggccccggggccaggggccacctttcactttctgcatttcagtgatatttaaagtttagtaaactttcatgcttagagtgccactcttgggccaggtttgtgctcgccagcgcctcactacactcttcaacttagctgtgcgaccttgagcaagctacttttcttcttttggtcccgtttacctcggtaaagggaagccggttcgttccggtttggagcatagtgcctagtgcttgcacaaggtttcagcaaatgacaacctactttcatcacgatcttttaccaccaccaccatcaccaccaccgcagacactgattgggggatgtagcaggtgacagtaagtgggggtgaaagcatgtgtgagcagatgaatcacccttgaattcatttcagaccttttaagggacggggtgggacaaaagcaccaacgaatccgagaggtttctattttcattggctgagtaaataaagccagctgactttatttacagcatagaaaccattggtccactaaagattccgtgcgcagagagcatgagggctcaggctctgaactttgtgctaagtgtggtacaagtggtttaatgaagttggagactggggagagatggccacaggtccactatggtcagaatgttgatgtcccagtggaagagtttggtttggagagaaaccaagaatcaggtggggtggtggaggtggggtctggcaatcccaggtgtcagagccctctcagtcttgattttcacaccttggaaactggatgaagattggtgagactcggttctacagtgtctaaactgtagataaagtcccatgtccagcccaaagataggcaggccaggaaggtaaacttggacttgtcagagccacccaaagataggcgggccaggaaggtacacgtagacttgtcaatgctgctgacctactgaagagagtccagggatagaaagtagctaagaactcaagctggctagcaagtgcctgtgttctcagctcagccctgagaagagacaggaagcagcctttatcttgctcacccaatccagcacaggttcattctcttaatttgtagatatcctctatggtgataccaagttctatgctgggcctagagaatcacactttaaatgtactcttgtcttcaagcgttcctagttcagtagggaatgaaatccagtaagtagtcctggtatctgcaggcccattgctgctgctgctgctgctgttgctgctgctgctgctgctgctgctgctttaaatgctcctttcccagctagctatgtgcatggctttctctgtcacctcttgggactgctgatcaaggtcctgagagaggtttcccaggcaatgttcgcagccatctctagccctggctgtttgcttcatagcatgaacctctacctgacatcgtgttgtatttgtttattgactgtttttctcaccagaatgtaagctcttcgagggcaggcattttgttttgttactgctgtactcaaagttgtctggcatctggaagttgctcaataaatatttgttgaatgcatgaacatattatgtgatgagtgtctctatatgctgtgggagacagaggcggtcaactctagtacatcttcctcagggaagtgaagcccaaatgagtcttgagtgttgaccaaagttatttagtggtgtggactttgggtccctggtagagggagtggtgtgggccaagcagaatgcatgcagtgctttgcagtagagctggctggctggatcacagagaggggtgtagcatggtgagagataaggcggtataagtgagccggggtcagatcgtgtcacaggacttgggcccattcttgaaaggaaaccttgtaggccgttgcagaaacccaagggtcttcaacctatcagctctactattgtggacaggtgagtggacttcttcagacctgtttgctcagctgaacaatgaggtttagcaaattcaggctcccagcctactgccctaaccacaaaataacaatgttaaattcttgcaccagtgagcccagaaggataggtagttcctaggaccctaccttgactgcccctcccattttaggctgtctttctatcacttgtaaaacatgttggcatataggtaaagatgctcattctagtgtatttgaacataattgactcccaacaaaaagccttcactgtgacataatgccacccttcctaaagacagggtagtatgactggtgttgctggtgtccctgtcaagagatacccagcaaatgtacagtaggacatttgaagcaaaacacatatgtcatcagatgcactagggtttgtttgaaagcaccattctccagaaaacttccgatccttctgactttatccttgattgttgtagtcttagcatctaagacaaaacaaatgtatggggagtaacagatgaacttagtactaacaaagcacaaatgaacaacctttgtaggctgtctcccatcccttacatcccttttgggagtggtgttggacaagattctttctaacttagggccaatggaggtgactgctcatcaggctgccttgaatgtttagctgggctcctcaagagtgcgggagttcctgctggatgcctttggtggtgagtgggaagcctagaaaagaataaggtcatgactaggagtggtggcacgtgcctctgatcccaggacttgagaagccaaggcaggaggattataagctcaaggctgggctgggctacttattcttagcaagaccttgtttctaaaaacgaaaacataaaggaaggaaggccatgactgacaattggtatgagtgctcccactctctgcaggtgtgtaggaagaaccttcccaccgtggttcacttcccaggggccgtgggcaagtccttgaatccagaaatgtgcccagctactgggtgctcgagttcccttctcctcttggcttctttttagttcctcatatatctagaacccacagtgatggtggaaataatgaacccttatgcagctccttctctataccagacaagtatttaaacctaaccacccactacagtaagtgcattagtgtagccatttagtagatggggaaactgaaatacacagaggctaacttacacagggtcatatagtgacttagagacagagggagaatttgcaataaacactccgcctgagtccaggcttcaggtctctgctcacctgcaaactgcagcagtgggtgtgaagaaaataggctccttgttgtgcaaacgctcccactgaagaggcacagagctgcaaacagatggccatggtcctgtctgggatctgggtgggcaaaggaaatcccacaccatgggacaaggcagggagtggggaccaggtcccagatataaaagtgacatgctggtggcttagggagtatgtggggagcagagagatgcagaaaggaccagctcagagagccagctgtagaccatgccaagaggcctacacccctatctgcactgccctgcagcttgtggctgccatagacccagcttcccatgtccactgtccctcatgctaagtctgatggttgagttttcagtcactctgttctggggaggcctaattcacctgagtccatggagggtttttaatttgtttctgcaagagcaaattcacagatggtagccctgtaaacttgtagatgtgaatatagttatttcaggttagcaaaggaaagccacaatgtccaaaaatcacgacagacaaagtcaatggctcctgctcacatttggagacactatagaaaatcctctccccatctcctatgtgtctttgtttgcttgcttttttacttgtcaccgtcattaaaggaaaccttggagaaaagaacagatattgagtatgtgagctgccctccttggagacagtgattgtgaatgggtgccacaattccacaaacatgacatgacatgaatgggggctcaggaagatttgattgaaggacatttgttggcagtggtttgcatagttcctgtcctgggagatcttacagtgtgagctctgtttcagacattcagtatgtctttgaaaggtccctgcctatcttcagcatatgcacatgactgtcttaacacttgtaatatgtgaagtactttttattaggtgtatctactaggtatggtaccaagtacttagtgctcattaagagtggattgaagccaaaacatagtggcacacgactttaatcccagtccctgggaggcagaggtaggcagatctctgagttcaagaccagcctggtctacagagtgagttccagaacagcaccaaaagtaaacaaacaaagtggattaaggagctggagagatggcgcagtagtttagagcactggctgttcttccagagggttgttcttccagaggacctaggttcaagtcccagcatagatatggaagctcacaactgtaactccagtcctagtagatctgatgccctcttctggcccctatcagcattgtttgaccattgtgcacagacatacatgcagacaaaacactcatgcacataaaaataagaaagaaaggaagaaagaaagaaagaaagaaagaaagaaagaaagaagaaagaaagagagagaaagaaagagagagaaagaaagaaaaagagaggggggagagagaagagagagagagagaaagaaagaaagaaagaaagagagagagagagagagagagagagaaagagagagagagagagagagagagaaagaaaagaaaagaaaagaaagtggattgaagggctggcataatggctcagtgggtagaagagcttgcctccaggcctgatgacctggagttagattcctgggacccacatggtggaagatgagaactgactactgattcctgtaagttgtcctctgtcttttacacaaacaccctgacatacctctacatggacatatagacacacagagacacacacagagacacacagagacacacagacacacagacacacacagacagacagacacacacacacacacatacacacacacacacacacacacacacacactgaatgaatggtgggctggagagatggctcagcagttaagagaactgattgattttccagaggacctgggtttgattcccaggatccacatggtggctcacaactgcaactccagttccagggggtctggcttccatgggcaccaggcactcttctggtgcacagacatacatgtgggcaaagcgcccatacacacagagtaataagaaattttaagatggatataattgtagtaaaacatttttaaaaacaagaggtcggaacacttcctgtagatccttttatctcttccccacactaacctcaggcagattacctctcatcatctccagtttagatgactgagtttagagatgagacaatcaaggtttgagagagattggtacagggctagcccaactctacatttgctatttctttgctaaaagcaaggagttaggtcatcgccatgcccccactatcgttactcccaggtaaaggctggagaaatgaagcaggcccagcatctaagcaagaaaatcaggtttatcagcagtcagtagtattccaacgatccttttgtgagtgtttcctaagtctccactttctatccctccctttccccatccaacctgtaactctcaaatgacagcagacactcagagccgagagagccatattacaagcagcactcaaagtaaaacacgctgaaacacaccccacctggcagatgaacactccacacccactcctcccaagtcctgtctcgccaaggcacagaggtgaccccccggctatcagatggctcctcagtgaaatgttataatgccatcgatttgcatctctttctgagtccttctggaaaaaggcagagtacaaaatgaaaaccagggtgcctttgccctccctttccagtttcaacgatagtgcaatttatgtcgtatttttgaaaagaacattatacttgagagcagtttatgccccactccatcaaatgttctccttcagcagacatgttattttaacgtctaatccaccagaatttcccctttgctagttaaacttgtcatcacagagaaatcacaattcactgctgctggtgtttgaacaatacatgtaatagcttcggcatccagactaacttcttaaagagccccttcaagacagtaaattccagggttcatgttcagggtctgtaactattgcacattaattttttcttagcaggtgtggtattttctgaggctgtttttaaaggtacagaacacatactgtgtgcatcctcccttcattttgcctgcagttttggatcctggttttctgtcagctcgtgttgaatggaaaaatccacccatatactttatttccctttgaaatctgtttctgaagaagagcatattgtaaaaccaattggcctctttcaactgctccaaagggaaggaccaggtggccgagggttagagtgtggactctgtacaggctccctgagggtcagctccttcagctgtgatgacacttgccctgtcaagtgtgtctgtgagaggcatggaggaaggcgcaggcatcgccctggcccaatgctgggcatactgctgcttttcttttcttttcttttcttttcttttcttttcttttcttttctttccttttcttttcttttcttttcttttcttttcttttcttttctttcctttccttttcttttcttttcttttcttttcttttctttctctctttcttttctttctctttcttttctttctctctttctttctctttctctttctctttctctctctctctctctcttctttttgttttttgttttttttttccttttttggttttttttgaggcagggtttctctgtgtagtcctggctgtcctagaactcactctgtagaccaggtggccttgaactcagaaatccgcctgcctctgcctcccaagtgctgggattaaaagcgtgtgccaccatgcccggcgatgctgctggttttcaattggagttcctttccttctatggggctgtgaacacaatggtctgtatgtgtacttggtctttgatctgtttcattaactagaaggaaaaagaaatgtcaggctgctgattaaacttattccaagcacatatgaccgaccattcttcgtctcacagatatttgtgactcacatgtacccaatctacttgggctctagtggtgtgacaaatggcagatctggggtgctggtggctgtttgcagcactggggaaggagcccagggggtgctctctctctctctctctctctctctctctctctctctctctctcttctttttgttttttgttttttttttccttttttggttttttttgaggcagggtttctctgtgtagtnnnnnnnnnnnnnnnnnnnnnnnnnnnnnnnnnnnnnnnnnnnnnnnnnnnnnnnnnnnnnnnnnnnnnnnnnnnnnnnnnnnnnnnnnnnnnnnnnnnnnnnnnnnnnnnnnnnnnnnnnnnnnnnnnnnnnnnnnnnnnnnnnnnnnnnnnnnnnnnnnnnnnnnnnnnnnnncaggctgctgattaaacttattccaagcacatatgaccgaccatttttcgtctcacagatatttgtgactcacatgtacccaatctacttgggctctagtggtgtgacaaatggcagatctggggtgctggtggctgtttgcagcactggggaaggagcccagggtgctctctctctctctctctctctctctctctctctctctctctctctctctgtgtgtgtgtgtgtgtgtgtgttgctcaatccctgacctcaccctcagtaggtagcagaacactcagaggctgtggaaggagcacttattattacatttgggtaaaggtcaaggggatgatttaatgtgggattaattttttgtttgtttattatttattcacttaatatccctatcattcccaagtccctcctcacacagtccctccccctttattcctgtcctttcttctctgagagggtggaggttcccctgagtatccccccaccatggcacatcaaatctgcagagctaggggcatcctctcccacctaggccagacaaggcagctgagttaggggaacatatttcaatgttttaaaggagtgtagattttaatttaaaaaaaaaattaactgcattttttaggggtgtgacaaggtgttctcagcctggcctccaatttgggattctaccttcctaggccttcccaggactgggattggaagcatgagccaccattcccagcatcaattgtacttttgaagttccacgaactctgtaagaatcagcttttaaagactctactgtgaactgagtgtgggtctcggactttgtaaatcatgtcaatcaccataggaaactaattgtaacatctgtccagcatctgtccattgtctttgagttcacaaacaagtaggtggcttccctggggagagtggaggggcgttacacaaactggaagaaccgtgcacttcctgtgtgtgtgtgtgtgttgtttttatttctatttatttttattttttgctccctcctttaagacctcaaagggagtcttgaaaaaacacaaacatggatttgacagtggcctctgtcatgtggctttgcaacccagacaagctgcttctcctctctgaagaggttcctcatgactaaaaatgagctcaggtgtggaaactgtcatatagtcgtaagcacttggcactttgaacacatgagggtgggtttagcttctccagtgaatttctgacatctgaattacattttatagcaaatgtcgatgacgtgagcaggtgcttaggcttgctgttccttccatttattttggcctcccccactcctgtgactgctcccagagaccccacccaaaggccgtttctagggctggagagagcatgggctgtgtttctgtcccatggggctgaaggagcatctctgtgccttgtgtcctcagccgcttgggcacatgtgcttccctgggcttgggagctgccacctagtaacgtttaggagtgaatcccagcaggcagttccaccctcccccagcttctgccatctgaatacatcccatcatccttgaggaagctggggaatatggttgtttgtcccccgggctgcactgtctgtcctggagagaggcagttcatcattttcgataggaaagtaatgaagacagtaacttttataaatattccatgaacgcttgagaaaaatgtgtgctctttagttattgaatgtaatatttcacacatgacatttgattcattgggaattgcattatataaagtttatggctttagttttgaatttgacttattcatttattagagttatgctaatatcattccctgtaattgtggatttcctatctttttgtgatttttttttctttccccattttcttgctgcactagcctgggagttacacattctatttttattcctaaaaccttatgctagaaaatttggcatgcatgtaattttacataggttaaatttggcatgcatgtaattttacataggttatagttaggatcacgatgctctttttaatgcttaaaaagatttagtttcttatttttaaatttttatttatttattgttttgaatttaaatacagttgcatctcttttttcctttcccgcctctatgtcgtttcccaccaactcctcccatgaccctccctccaactcttcctgtgttccctccttccaaccccttctatgtccctctcctcaaatagatggcctctttttctttcattattatttacactcacacacacacacacacacacacacacgcgcgcgcataaatacacaaatataacctgagtcatttttgctgcttgtgtaatttcagggctcagatggtttcagggctggccgtagttgtattggttaaccaattagggctcatccctgggagagcctaattttccctccttctccctctctcagcagtcatagctgcctgtgattctttgtctggtggggcctgtgagatctccctcttctgtgttagtgtgtctattgctgctgtcattgtttaggtcagattgttgtggtgtcgtgcatacagcttccctgtcacgtctaggaggcagttgcacagcagacttccgtcctctgtctcctacctttctgcgccccacccccttctgctgtattccggagccttaggtgcagaagctgtgttgtaggcgcacccactgcggctgcgctccccgtggtctgttgatccatgcggtcttctgtgactgtctccattttctgtaaagagaagcttctttgacgagggtgtcattaatctatgggtgtaggataagttttagaatacttcaagaatcatgctagtttaataaagtggtggtaatatgctcgcttctaaatctgtcacctcactagccccgggcagttggctaggttactgttattatttttaattatgtgtatgcatttgtgtgtgggtttgtgcatgtaagtgcagtgctcactgagctagaagagggtgatgggtcccctggaatcagagttaggggcatttgttagatgtctaatgcgggtatggaagcagagctctggtaggtattctgctagatcagtgtatacttttaattgctgagccacctctccagttcctttacttgttgttgttttctgtcaaagtttctttgtgtagccttgactgtccatttctccgtgtagccctggctgttctggaactcactatgtagaccaggctggccttgaactcagagattctcacctgcttttgcctttcaggtactaaaaggtgtgtgccaccactacccgacttgtttgtttttaatggctgtgtctgtgtgcgtgctatgatgcacatgtggaggtcagcagcaggagtctgtcttctcctaccacgtgggtcctggggatcgagttcatggcatcaaggttggcaacaagaccactaactgctgagccttcttctcgtcccattactctcccggcaactaatggtctcgggggaaatcttcactcaggacataactttacatgcttcagtagcccatatttttgttatgttatcctttctccaacttcaaaagttaaatattattttacttagctttgatgtcttttggatttacccacagttgccattttctttatttattttgattaattttacgaagtactatttataataaattctattaggttttattgtgccaaaattccctttatctcccctcattcttgggggatagtgttgcggcaggcacatacagttcacagggctctgtcttgtcagtcacatgatcctgtccctttgaagatgcaccctttctctcacttttgctgttgggatgagctggcagaccctttccttttgctggttgggagcgcttttcctttgggtacttctaaagtctctgcttcagatgtctcctgagtcactgacgcccttccaggagagggggttttctttttgttctgctgaggatttggggagaatttcattttctgatgttcgccatcctatctattctagaaagttcttgcccattttctcttgcaatattctctctcatccagtctccctttgctatctttctcttttggggttttgatggaggtctctcaagtcttgtttgatggtatacttgtgcttaggacttaaatctatggctgttctttgaggtgtgggtcaaacgtgagaattttcattttgtgtgactcctgcagaggcttctatgaaccacaacatttaatattgtgtgtgtgtgtgtgcgcgcgcgcgcgcgcgcacgcatgtgcacgtgcatgcgcatatgactgtgtttgtctttgttgtacttttaaaactctagacacagtatgaatttatgaattttgtctccagcctcttctgcaggaaatgttgtggtaggcatcctggggaaacttttccctcttatttctccttgcattcaccaaagccgtgacatgtattttaggggcctggcttgtatgggagtctctgttctggttctcaccctgccagcaggcatttagaagccagagcacatgaggccaggccattgcttacgtgtccaggaaaagacagttagtcactcagttgactctgcggactgtggagaatggattacagggaagactcgaggcagagaagtaggctaggatgctatggcagactgagtcagggttaaaacacctggaatgggacggtgacaggtgagaagagttatcgatgaagactgttagccactctgtggaagggagcccatcctttgcatctgcagctgcccagcagaggcattggcggtcagagtggacttgaactgggcatcactctgcatctggtgctgcttcatgggttcccttcagagtcaccattttctctaaggcagatgatgtagagagacccaggcagtgtgctcatgcctgtgtctggcattgcaaagttcaggccagaaatagagagccagctgtttgagagccccggcagccttccgtccggcacggctggttttccattatgacatagtttctttagcttaagcacttgtcctttttacaggagtcccaggctgtctgagagtgctcacacaaagccttaccatcttcctggatttttatgacatttctcagaaacaactaaaccttatgagtctctcggcactctgcaaagctgttcctctaatggctgttatcgctcagaaaactcccttctcctaaggtgttctgcgtctggagatcaatgggagaggcaaacggtccctgccatgtgacacttcgatgagcctcacatggccatgaggactgctgctgtggcagtttatgcactagtgttccgttagaacaagcagagcatttctagaaagtgaggtgaaagaaagaacagctggggtcccttggcctgggaggtctttattatcactaagtaaatatggcttgaatatcagctgttctccaaggtctttaaaccagagccacagttgtcttataccttctttttgtgggaattagaatttctcttctaggaaaaaatatactagccaaaatactatttattgaccaatttattagggtagtacattattaataaactgatgttggttattaaataatctgttgtatcacaatgaagtatttgctgatttaaacttggaattcataagtaaacaaagggtgatcaagttgcgatataaaatctcaagtgtaactactgccctgattctaaagaggaatttcagatgattttcagtgtagccctgagccactgtaaaagcagacctgtgtttagaaaaacaggctgctgctagatcagcagagcagggtcttctgcttgtcaagcttgtcaaattggcttgttaaataagatacttgattgccatctgccagaaaagcctccttataaatatcaaatcacccaaatggaaaatcacctgtttgcttaccaagatggaatgtttctcgatgttagtttaaaacaacaaatcatcttattatgacagtatgtcaatactacataatagctattgctcataagccacacgctgtagagttaaacataaaatattgtgagctggcccttttggactgatcccttagacccaactcttctggatgttgaggcaggaggatcaattgagcctggaatttaagaccagcctaggaaatttagggagacccccttctccaaaatataacaagaaaattccaaacgtcaacagaaagcccgcacagaaacagcacgttgagaagagccacggggacagtgaacccatgcttggtgctgagatgtggcaggagccgggagggaggatgactcgtgttaaaattacggaggctcctgggtgagtgtggcgcacagtctttcccacagcttgcctgattcctgggttctggacaatcaagccacgggtctagactcctggtgtgttgctgttttcagtgtgctgctctttcctctggcccacaccccctccatcttcaggtgtcaatgaaaccctcactttccaaaggagacttacctgactgccttagatgctctctctctctgggctccccttccacagcatgcgttattgctgctttattgttattgcttgtattttctctttccccagcagactttaaattcacccagtgcgagaaccacgtgtgtctcagtcttccttattagtggctcctcgcactccatgcacagtgcctgccatagtctagaatcagattctgttaagtactggctggaataatttttccattccttcctcaaacatttcctcaggcttgacttagtgccgcagactctcctgagccccaggcaagcaaagcagtggctccctataggggctgtccttcagggggccagggtctattgtgagacccaataggaagggcagaggtaaagataagggtgaagaaagaatagaggaggcttcagctgggaggagcctctgagctgagcctgatgtggaaaagtgggctatcaggggctagggctgaggtgtgccaggttgatggaaccagtgactggggaggggactgctggcagttatctccatcgggagcagaggatgtgagagtaaagtgacatgagttggcccgagatacatgcagtagccaagccagaggcatctgaacttcagactgggtgctgggggagctgctggagggaggagtgtgaatggaggtgtgtgtgtgtgtgtgtgtgtgtgtgtgtgtgtgcgcctgaaaaatcagatccatagatttgcaggtgagaaagcctctctggctgtgcggtggaggtttgtctagcgggtgggatggtgaacagaataggtacatcctcctcagggactgggagagtggtctcctctggtctaacatctaaagagtgaaacgtggcgaggaagcactaaggtgacatctggtgaccgagccaactgtggagactagcaaagcaagctgtatgagtcctcagcccagagtagggactgcgtcacttggcactttatcgagcttttgtgaaagttaggcgtctgcccttgctccacgctccacagtagatgtctgaggtaagaccggccagaagccttgtccccggtctgtttaaatgaacaaaaggcagactctacacccaggtctttctcggtgcagggtcatgtactttctgtcctgccctgggctatgcctggggaatcagggagagaggtctcctttttttcagggacctctgaccttctttctgatgagtgggggccccaaagagggctctccaggcatcctgccactgaggggtgttcctgcatttgcatcaggccatgatgtcctctctcctgagtgtcctttcagagggagaggagaaggcccaggggggggcagctgagtgctgtctgccccagcgccatggggagaggtgtgtgcacagcttccatcctcagcgcctggtatttggctgctatttaataaaggcctcattgcagggagggtcattaagcaaccaatgatgtatttcatcttcattggggaagaagctgctgaattaaatcaaattcagaccatgtggaaataaaacaataaaaatgctgtctatccacatgcatgggcctttttctgaggggagaggatcaggaagcagccacccagagtccacgctgatggcagtgtcagggaccgtttcttactgggtacttgcagaaacgctgactcagactcagtgatctgtgatcttctccagtctcttcacaaaagtgcacgtgtgtgcatgtgcatgtgtgaaagcatgtgtaggtatgtgtgtgttttgctacatatgtttgtgaacacatacatgcaagtgtgtgagcattctgcagaccctctgggtccctgtgtctgcgtggaatgggtctctcgacgtgggtgggcaaaacatggatgaatgacaaacagacgcacacaggagggatcgtgtggaatctgagtataatttttcaaatcgaacatcagactttttatgcagaagacaataaggaagttgggtgacatacctgcaaggtacaaatgaggtaaccggatgcttaatgactcttacacagaacagacgaatgaaaacgcaaagactggcaggaactgggcaataaaataactgagacagagtcagccctatctaaggtcagctatagtcttagaagccaggtgtgagaacttttcactcctagggcaagggctttcacacccaagtcatggttctaactagggagttctgttctagctaaccatctcatgaataatgcaatactctaaaaccacagcccgatctacttcctaaaccattgtaaattcctgtatatgggagcaacttggcttttattgatagtgtaatatcagaggctattctgaatatcactgtctggttcaaggatgttctaggactgttggaacacttgcggaaggctttagctatgtcagaattcaatcttaaaagacacttataataagaaaatactgaaagagagcacgtggatccatacactagactaacgcggtaatggaacgcgggaatgaaaaattaatgtatgggtagagaacgctagactccaggaggagagcttctttgaaactcttttgcctttcagcttgtccagctgactcgaccggagagcgtagcatgtgcacatgtatatggcttcccaccttatcttttgttacctccctggagctagcttattaatttgactaggctggtaactagtaagctcccaggggtctgcctgtatccacccacccctgttaccttggttataggcacacataaccacaccctggttttatgtgggtgctgtagatccaaactcagccctcatggcaagttgtctctccatctgttcccacctctcccatcccctattgggaagccttatgttttcctgtcatctgaaaagggtcacttcaaacatttagagttctatgacaatgttagtaccctaacccggcctctccatagctctccaccttttcagctggtttcagcgaaatccaaggtctgtactcctctctgaagcttgtgatcagttcccacagctcccagaacaacctcttgtttaggaatacagtgcagcacattacaggccaccagccaacccttgtccctgtggtcccatctgctgtctcactggaaagggcctcattcttcacatgcatttcctctttaaaacagaacagagcatcttaattaactgttggtttcctattggcaccgacatcatctcttacttactaagttataaatttccttgtttcattatttgttggctgacatctgttaagggcccaactgtcaggccaccacctccattatcttgtgttcctaagaatattctgaaaagcagggctgattagcctcagagtgaggaccagagaggttcatgaagcagccgtgtttcatctgtaagtggtgggtctgggatttgaacttaggttgccttggctccagatccatggtctctccctgatggaagccagtggtttcttatgatctagatgctttggttactctgtcctgagccctctgtgtgggaatgggctctgttccgggaaggcatcacttaaaccagagggagagaggctaaggtccacaggaatggaaagacaggcgagcagccttttgttctgactggctggctgactcatctctataaggctctctctctctttttcttctcccatttgttttcttagaaggctgaatgactttaagggattccagtctgttcttaaaaatggcccagagactgctgctcagtaaactcctgtgctgggttttaggttttctgaactctccccaaacttgtctgatgtatgaatcacctgggggccttactaacatccagttctctagaaggtgagtcctgtgggatccttagtctttatttataacaatctccctaaggtagactgttagggtcagattaggttgggaaacgataagcgttaaacctgggaacttaataccattcatggtgtgtactctagatttgagacagaggtggtcatgttggactgtagggcgcatggatcctaaggtgagcatcgtattcagagccccagttctactgtctatacagtatcacctctgtcacctcactgaacatctttctctcaaggccttggtgctatttattctaattgaagcattctgaagtcttccctcatctcgtctcctctcttctgaactccagtccccctaaggtcattaacatttctatccgagtttgtctgttattccccaccagactccatgaacgcaagaaccatgactctcacatttgtcatactgtgcccaacattggacacagtagaatgtgagtgaactctgtcttcatttgttttgtttcttaatttgttaaatggatgaatgttgtctatcagtgggggtgggtgggaggtgaaagcagtgagcacagaagcagacggcgcacagtgagctccttctgccgtttgcccacttttgctcatgatcttgtgtcctcacactgagcagactagcttgtaaactacgcctcacagctgcctgctgaatccgacggtatacaagctttccagcgttctcaaagtcttataatatgccttcccccagcacgcgcacacacacatgtacatgcacacacagacactcaaagactcctccagtggtctttctactttgttctggttgatccattttgaggtctctagtgattccacctgatattgtggctagctaagttgaaggtttcctcattgagtagtgcagagaatgaaaacagtaggacggtaggctggacttaatggttaaaagtttacagatggtgggacaacttttgaagtaaattctggacatctctgcctgggattctttaggaagagagtaagagtgccgactgctgaaggcattctctaagcctttgtgaaacgcgggcagatgctgttaggtgatctgaattcaaaattgtgtcctccttacccagcgggacatggctactcagagcaaggactatcactcagaattcaggcttataagaggggcttggaaaagtggtccctgccctggtatgcaggtacccaacagtccttactggtttgacaccagggagactctgagtcttaagaccaggagagccctgggtaaactgaggcaaattatctggcagccctgcctggcgcacatggtagcgcgttcaggaaagagaggtaacagcaaagcaaccatcaggagacaggtcctgcaggcttctctctccttttatcaggcgggtcccggggcatggagcttgggttatcaggcttggtggctgttgtggtaaatctccaatcccaataagcccatgcaaggaaaatgcaactcagttgtacatttataaactgcacacctatattgggcagatatgcctatataccacatttttccacagctaagaaatccctgctacttagagtttctccaggccatacgcttctgcaccatcttccttccaacttctctccctctgccctcctctgtctgctgtttcctccaactcttcctcttcttgtcttgcctggaaaatctgcctcctcatcttcgcccaacgattggctattcgtcacctttattagccaatcagataactaagggaaattcctctataggtggcaagcacttttacccgttgagtcacctctccaacccataaggagtatgcttgacattttttaaaatgtatttttcctgcatatatgtctgtaccacatgtgtacctgatgctcttagaggctagaagagggtgttggatgccctgagactaaggctacagacagttatgagatgtgggtgctgggaattgaactagggtcccctggaagagcagacagtgctatagctccagcctcaagagtatgtttcaaattgcaatttttctatacacgtataagtaagaactcgtcagtctatgagacgttttccagcaggaacttgcactggtgtgttgtgaacagttcttttttttttttttttttgtaagaaactgtagcagcagaactgataatatatgcatcgtgcaagcaatttgggtctgatgggttttgttagcaaatattttatacaacaaggggctttgttatgacagtttcatgcatgaatataatgtcatctttacccctcttaccctctcttatccctcccacattcctgactatccccaacctctccccaattagcccctcctctactttcatctccctccctctctctctctctcttgcttccttctccctccctctccctccccccccccctctctctctctctctgtgtgtgtgtgtgtgtgtgtatgtgtgtgtgtctgtgtgtgtgtgtctgtgtgtgtgtgtctgtgtgtgtgtgtgtgtcccagtgcctagagcagcacaaggagagctatttccaggcatgtgtatgctttcccagtggctgcatcacggaagaaaatgtctttcctttcctttcaccagcagcaattgaatgcctttaaatccctgggagggggcttctccccatgctccatgactgtggacaggtctatgcagacagtctcggctgctgtgacatctggaaccttctgtaacactctactcctcacatggcctctctcattctctctgccctctcctctgcaacgttctctcagttccatggttggagctttgttttatatcccggcatttagcctagaagctaacatatcgtaggtacttgttaaatgtttcttgcatggataagttaattaggactggagtcttggtctgattcttaattctctgaagtttctactgatcatcatttgcagcgtgatacaggtttttcctcaagtgactttattggcccagtttctcgagactgtttcaggaacacaccacctctatgcagtgtgcaaacacagtggtgtacagattgcaacaggactgcttgcagacctgcaagctggggaagctgaaagcgctcctggcctggctttgtcttagtaggcccccaacccccactcccccgtgtcactgactgaggtgacacacacagtacaagcacctcattacctagtcatcagggaaataccagctgtcattgatgactgaaccgggccatttgtcaggttgtcccaagtttattaagtgaagtgaaggtattgcttaatgagagggagccagtgcaagggcaggtggtgctcctgcacacagctattggttgagctgcgctgtaaacagtgataaggtagggacctgaccatagggtgcatcatcagggacaaagtatggctccagacaccgacaccaatatcaaaactacccttctctttctgtcaggctgttatgccaagaattcccttaaaattcttagcagaatagtgggctctgtcctagctgggaccagcccagcacttatgatggcccgggttatggcaaaaatatttcctccttcacattggctttgtttgcctccaggagatggacatttcagttcttatcaactattagccggagagagcagtgaccagacctgcctgtgactgccatgtacccaagcagtttcactctaagctctctttcaaagataacttactcggatttcatgtgtgtgagtgtcttgtccatgtgtatgaatatgcaccacgtgtacacggtgccctcagaggccagaagagggcatcagatgttggggtgacctgttttactttgcatgaaggtgtgtttctgtgttttcaactgttaatcctgtactggcagagagctaagtcctggcagggttttggtattgtcatttccatgcccaacattgggtttcctatatttgtcctaaaggcgacccagaactgtagcagaggttgtctcttacttggttataataaagatctgatgaccaatagcttgggcaggaggaggggtgcagaacttccaggcagagagagtgccacagggagtagaaagagaagcaggagataacatggaggggaacagactgcagcagagaggccataggctagaccagtctggttaggttagatgagctagctagagactgtcccagcaaaaggcctaagctgtagactataatagaagcctctttgtcgttattgatagtactggaaggtcagagaaagtccccctatatataatcagatcccaggaaggaactgcagttacagaccgaggtggggatttaattacagaacaagagtggatagtgtgtgtgtgtgtgtgtgtgtgtgtgtgtgtgtgtgtgtgtgtgtgtgtgtgtttctgtattgagacagggttgctctgtgtagccctggctgtcctggaactcactctgtagaccaggatgacctcgaactcagagatccacctgcctctgcctcctgagtgctgggattaaaggtgtgccccaccacacagctaaaagtgctattcatatgcctctctcactgctgcggggagaggtggttcataaaggctccatagtgtagatggctgcataactttgctgtaacagggtcctcctgggtgacctctctgttcactggaaggtacttaacttccaagtgtgtcactgggattaacttgaatcatgtcatcctatagctcaacaatttcaatttttctcttggttgtaatttttctccagagggcatcaaattcagcccggagtctttacactgttagtagaagcacaaatttgtgcacccataatggaaaaaaatttgacatttcctccaaaactgaaagaaggggttgataagatgctgtccccatgggtggaggtgcccagcaccaaacatgacaacctgagttttgtctgcatgtccatagtggaggaatggatggataaaatgtggtggtgtacacaacgggatactatttgtctaaaaaagggagtcaaaatcctattatctgctgtactgtgggtggaactggagatgacttatactgagaaataacccaagcacagagaccaccaggtcttactcacatggcatctaaaaaccatctcatctcaccacacatgctgagagtaatatagcagttactggacactgttgtaggtgaggtgtgacttgggaaggctgacctgtgtgttacagttacagagggacaaggagtcaggagccttgtcgggcagtgtggtgaccttcgttagcaattaacgtgctggacattccaggaatctaacaaaggactttgaaaatcttcaccataaacagcgtttgggtgagagctatgtctagcctgattttaatattatgcagacagtacttggctccctcttagtaatgtatagcttctatatttgtatttctcagttgaaaatacataaaaagttggttctttctgaatcccttggaatgcaacaaggggccaagaactcagttatttgttccccacacccagcactctgatgactcgggagggatgcctttcttccgacatctctaggctcttctacccacccactcttcagcctctgctccgtggctgctgtttgctttggcttctgtctctccgaattcttgtgttccaatcctctggtggatggctccacccaggtgtacgttgtgcacttctgacagccatgaggagccatgcagagccagattcagttctgtttctagcactcagggactctgctgggcactgacagcaggggtgagagccaggccaggcagagccgcccagacagagatgcaggtgtgctattgatgctgaactctggaaagctgctgcaagttgacagttcccttcttggtccctctcctaccctcccacccctttagggtaggcactcaggataaggtcactagaattctatagtgatcgaaggaaccctgcctctttctcctgggcttagttatttagggactaaggatttaatgaggctgggtcctgtccttattctacccctgtggttcattacagaggcttgattgtttaactgctttgagttctgatttcttcatgtgtcaatcagaaataacatgtctacctatttcatagcattgccatgaaggtgagttaaatagcacataagaacacacagcaaattccatgacctcagtatgcagtggccactacttttagtatagaaatttctggcataagattcactttcttaacacatgacctatgacatcacagtggggtgtctctgtgcatgacttagggtcaggaggaggaaataaatttaggggagccctgagcacatctaccttagccaaatgagtcctctgggggaacctcttctcttggggacattattttgactgtactgtgtgcttcagaatgaagccaaaacatcctccattattggaaaggaaaggaaggccagggctttgcaggtctgagaatagtgacaacctacgtgtggcatgagggaagcagccaagatctagggagtgtcccaggtcactcagcagctcagtggccgcagaagacgacctgcaggtgttggaatccccttgcttagtctccactcagactttgtttctgccttggaaattttcccatctcagtttgtttgttgtttgtttttatgttgttgagttttttgtttgtttggcttgtttggttgttgttgtttccgagacagggtttctctgtgtggtcctggaggtcctagaactcactaagtagagattcacctgcctctgcctcttgagtgctgagattaaaggattgcaccaccacctcctggcctacctccgttttcttgaggacctctctccttctcattaggagacttgccctccacctcctcactccccagcggtctcttctgtgatgtggggagagggtgctatccctctggcattgtttactttttccttccaagaccgccctgaaattattaatccactaggctgaccagtgagccgaaccctaggagtccagctctgtctgcctcaccacagtgccgggatgacagatgagcatcgccatagtgacttttttgtttctttgtttcagtgggtaagtgtgtgagtgtgtgaatgtgtgtgagcgtgtgtatgtgattgtgtgtgtttgttactgtgtatgtgtgtatgtttgttacagtatatgcatacgtgtgtgagacagtcagtgtgtgagtgtgtgtatgtgtgtgagtgtgttacagtgtgtgtgagagtgtgtgttacagtgtgtgagtgtgtgtatgtgtgtgtgtctgttactctctctctttctctctctctgtgtaaatacagttggcagacacatttgcgagtcagttctttccttccaccttgggtaccaggaaccaaatgcaggccctcagtagcaaacatcattctttacttgatgacttatctcatcagccccggacttttttttttttttttaaacatcagttctgggacagaactcaggtctcatgcctgcaagacaagtgctttaccaccatgccatctctctgtcctacccagtcttcatacagagcagctttcctctgggagcctctgctgggagtcttgaaccaaccagcatgggttctggctgagcggtgtcaggcatgacttgagatgaggccgtttactgggtgggaaggaagtgcttctgaaaaggacggctccccagctttgcccccatcgcagttaataaacacatttaaagttctggtgaggacgagactcaggaatttgggacttagcagtgaactgacagttcaccactgtgagggagccaggagcagagggatgactgttgatggcttccagggtataatggagctttgctatagtttatcactggtattggatctatgatgcgacagacttggagacatttagcatggaggttttgctgtctctgtcacccgtatagattggaaagtggagaaaaacatagggctcagttggtatctaatcttccagagctatttgctaaggaaactggaatttttaattaaaactgcaagccaagaggtaaattgccgtggaagtttgtgggtgtttttctcctgcctaatataatcatcactaataagattcttcatgggtgggaaagtagatggcacagcgggtatcctgaggggaaggctgatgtcatgactgtgcacggccatctccccctctgagtgacacggttcctccctacgctcacactatttggcaacgatattgattgtattgaaagacttggaaccagaagcaaaggtgagggagatgacagatccccgccccctgaagctctgccagctgtggctcctaggagggagtgataacaaatgggcttggtataaatacactgggctttggtgtggacttggtgagcaacgaagggcacactagcccagagtgtcaaactatctacagcaacgaaggggtgaacaagaacaggagcaggaagccccgtagatcacaggaattgccactttccagtaaaaggttgttaatttaaccatcctcaggctgtatttattgactctattagagggtgagtaattgttgtgttcccgggaaacacactggagccagaaggcactgttattaaattggaaggctccgcagagcactagtcagccactgagagcctctccttgggagtctcagccgcttgcatcctgggggaggtgatacaggaacggtgagtggctcgtgggcacatgagaggagactcagagaagcctttacacactggccggggactgctttggaccctagctcctctgtatcctagctcctctgtgacttgcctatcccctttcccaggacgtgcctgtctatggcccagtcaccacgctggcccttctcttctcccagcgctggttggcttcctcatggccctacatctgccttagcccagctccaccttccctccagctatccggcacctgcagagccaagttcaatccttagccagcctcagagttgaagtgggccacaggggagccctgtgagtctcttcagccttgtccctgagaacccccagctccaggtatgtagggctccctgctttctgcctaacttctctgactcttacaaatgtcacctcacacctgtctcacactaactcctttggctaagttttcataaccagagccaccaggactcatttgcatccctgtcagcaggtggctttgcagtgtggtttcctcagaggactactggaggggcatcttctcctttgtctgtcagcaggcatggctagggaggctctgtctcagcctttctcaccaggggacttcattagtggaagaacagccagggaaccttgtcccctggcacatagtaggaactaaattaccccagttagagactctgtgccaggctcctgtgtcaggggcatcctttcttctctctagcagcccactccagggacactgtgccgttcatctttctcagatgatgaaatcacagcccatcacagtcggcagggctgagatttgaagccaggttctcagactccaggcgagggacttgtctgcaagtgcaggctccccagagacagggttgtgtgacctctcacccagctggaggtctttgcccatcagtggaagggagctgtattggctagttttgtgtcaacttgacacagctggggttatcacagagaaaggagcttcagttgaggaaatgcctccatgagatccaactctaaggcattttctcaattagtgatcaagggggaaaggccccttgtgggtgggaccatctctgggctggtagtcttgggttctataagagagcaggctgagcaagccaggggaggcaagccagtaaagaacatccctccatggcctctgcatcagctcctgcttcctgacctgcttgaattccagtcctgacttccttggtgatgaacagcagtatggaagtgtaagccgaataaaccctttcctccccaacttgcttcttggtcatgatgtttgtgcaggaatagagaccctgactaagacaggagcccagagtctcaaggtcctcagctggtggctagcacttctctgttgtctgggagggtgatagtgccattagatgtcatacaagtggcagagtagtagagtgggctggccatcctctaccagggcttgctttgatctgtttgtttggcagccacagctgtgtttaggatttgatagttactgtaggttggctctgaagcatttcccaagggccaggtgggaaaggcctggacctcagcccttggctttactgcagagtggtggaacctgtaggaagtgaggcctggcgagagcctaggtcatcaggaatacagccttgaagaggctgtagctaggtaccctggtctctcttgcttccttgctgagagacaaatggattaacttcagcatgcactccctgttgtgaagtgcctgtctcacctcaggtgcaaagcaagactgttagccaaccatgtcctgtgactgaaacctccacggtggtgaggcaaggtaaatactgcttctgtaagggacaccatttcagggacttgtcacagtgatggaaagagggctcagacccctcccagaccctcctcagcttccttcctgaaggtcaagggtgaagttttagtctgtttcctgactgtccttgtgctacattcttttggtatgacttttatggtttctttctagctggatcttggaacactctcatggggaatggccacagtggtgacggtgtctgggagagcagtggccaggtgaatgttgggttgagatgtgtgaatggaatgagcccaaggagggagtgaaaccaatcatacaaaacaaagacacttgtacaaagaggcaaggggtgctgctggggttcagtgggcagtctgaaagccgcaaagaactgtgggaggaagaaagcaaggaagagacagtgggactatgcatgtcttaaggtctgtggggtttatcctttgggctttctgtctcaggttgtagacgggcttgtttccagagagcagatgagaagggatcttaattatttatattactccgattttgaacaaggtttctgaccagtggttgaagatgtgctgggtttggatcaataaggggaacaacatgcatgttagatcacaaccaaccatgtagggaaggcaaggttcaactaagccaaaggtgactaggtactagtctttggatttcagatcatttatatcagatctaaaagttgatgccttccagttctgggtttgctacccctgggattataattcttgtgtagaatggagacagatgtgctagaaaattagcataaatagtaattgttacactcactataaagtatattcaattgaaaagatttatttatttttaatttatatgtggtgttgtctgtatgtgtgtgtgtgttcaccatgtgtgtgcagtgcctgtggaggccagaagaggggatttgatcccctggaaccagagttaaggggctgtgagcaaccttatgggtgctggaagtcaaacccaagtcttctacaaaaggagcacatgcctgtaaccattgagcaatctctccagcccctgggccatctgttcaaagcactggtttggatggtttctcctgtctatgtactgcaaatgtgcttgcccatatcaaagcgtatttcccacttctgtgtaaaactagttttaaaagtggcagtattcctctattcctggctagttcccaagtcaataagacagagactattagatttgtataatcaagctttactgcacaatacctgggcagtcattgatctattctattcctctaagctaatttgtgtacctcccagccaacatcccagtgatagttgcgttttagtattggtatggctctctgggcttcaagtgtgttttcccatgatgtctcctcttgccctccttgtggccgaatctcctcttcctctctctcctgtcccctcccctggctgggggaaagtccagctctattctttcccctgctcagtcattggctgatcagcttctttattgaatgagggaataactggggagcaatgtacacaacatcgaggcaggagattcttagaataaggattgtagccagatatgggaacatggaattcagcatttgaataatacaaggataatctttacacagtgcaccataacatacctacacttttattctcagtcagtaaacgagcttctgtttgcacagcagctttgtgaataaaaacattacaaagtgtagaaatgtgaattctgctttcaccagcaacagccatgaaatttcattctgtgaatctgtaggaggtggagtttaaatctaccttttgggccattaaaagggagaccctggcatcagttcctcaaacacaaatatattcagaggacatttaatggctccagctcttggttaagcctgctttagaactgttttcaggcctctggacaagagaggggaagatttggggtccaccctggtgtatcccctgccacagagacttctttgtgtcggagctgttatatagatgagggtaggtttgttatgatgctttacgctggtctgatacatgactatgatgtgttcagaatgtgctatgtagtggaccattagccagtttcatattgctataatgaaatactggagacactttgcttataaaagagaaagatttattgaatgcagatgcaggttgtctctgcaaccaccacagcctgcagagtgatagtccctgagagataacaaggcagctgggtccagcatgactagtcgacaatgttggttcagacttcaggagtctgacccaagtagtttattttaggctcacttaagcacagcacaatttcgtgaaaacttcctggtgataatttagtcaattgataaagcatccataaatgtctttgagaaccaaagaaagctaaataaaataaagtcaaacataactacagcaaaactatctgtaaaggacatgagacaccttccataaaaatgagttttgtagattgactgagcagaacgagctcatgctaatggtctgaaggaggatccagtgtgaggtctcccgctgggttgatctttctcgaggttgttttggccaattagagacgcttgtcattccatttaactataagattatcttttctatttcttacccaaaccaagtcatggctgttttggtagagacataaaacctatagcttgctttgggtaatattgtactgacattttaaataaaattgttttcaagtcgggtggtggtggctcacacctttaatcgcagcactcaggaggcagaggcaggtggatttctgagttcgaggccagcctggtctacaaagtgagttccaggacagccagggctatacagagaaaccctgtctggaaaaacaaacaaacaaacaaacaaacaatgttttcaaacttgtgacatgggttttcttccctttatttgaagtttcattaaattccttgagggacattttgtagttttcacattaactcccttcccaagttaattcttaagtactttattctttgggttttatgtcatggttctcttgattttctgtaagcttttcatgcaatcgctagggttttctacatgcaggatcctgtcatccacaaacaggtcttttatttctacctttctagtgagaatgtcattaatttcctttgcctggtgctctgtgttgttaaccctgtattgaaagaagggaaagcggacgccctccccttcttctcaatcttagaggctaagacttcagctctttactgttgaatatgttcaagccctgaacagatttaacattgtgttgttccgttttcctagcacctatgttagagtctggaacatgacaattactgaacaaatgtagccttttaaaacttagtgtgctcctggcggtggtggcacacgcctttgatcccagcacccgggtggcagatgcaggtggttattgatgagtttgattccagcctggtctacagaacaagttccaggacagccaaggctacacagagaaacactctctaaaaacaaaacaaaacaaaacaaaacaaaacacagcacttactgagctaaaagctattgttcttatcctttcttagttttgtgctgtcttttgtttttataaaaccaggttttactctgtagcccaggctagattggaactaactctgtagcccaggctgacctctcaagttcctgacagtcctgcatcaagttcctcaaatgtgttcatgagccaccatgactagtttcataaaagttagaggacaatggtatgggtagaaagtgtcatcaggcggcacactagcaaggagctggtgctggccactaatgacaggcatcaaagtcatgacagttaaggtccagttgcttggacagtctacattttagatcttccgtccagttgtcttttccttttctatattagcacttaacagccagaagaaggtagcatgtgttccaacataacttcatgttaatggctactgaataaataacttggcatccactggaagcaaagaaaatgaacaaaaagctataaattatagatagaagttattcacgcccatagtaacagcatctgcctcactgtggcccagctctgcagccacttaccgggtttgaatctgacagccttggttttaattgggacggttgaaagaaccccttcccatcatttcattagctgtgccgtgcaattccatcaggatgtgcgggatgtggcccctcagctcacagcagatagacgttctgaccaagtgtcatctcaaaatgagaacgtcaaggggctttatctaatgtacagccatctctctctatttggacttttaacaagcaggttctaaatatgagctagcaggtcttcaggcttccctttaatgaggccatcagagtcacatttaaagagcctcatctacagatgcagaacttgctaatgacgttgcagggtagctgaacagagcagaaagagtagacctttttgtctcagcaagagattttctccctgaaaataattgaaaccctggagcttctgccagagaggaacttagaacactgggaagatgcaggattatcttataggagtgaagccactggcacgccagacagtcaggctggggagaacaacaggcctgagcaacctctgtctcgccaccggtctctgggaaacatggccagatatctccacagctaccccctctctcagccgactgtctgtcccttcttcccacccagtcaactccagctgttcagctttgtctgtgcattgcccccggtccatgggccaacagaggttgcctggcatctctgactcccacattcccagaaggcagactcccgttagctcatcttgagtcaggtgatcacgcctagctctttcatttatgaattcaaacatctgcagtaaggcccaggaactgtctcagcgactgaggacacatcctgcgatgcgataagatatgtggggagcaggagggaggaaagaggaggagctgtgtgtgaggcagggggagggagagagggattgcctccaccattttataaggaccaggttgaaggttgccattttcagagaaagggaaggaactgctgtgggcctagaatttgggttgtcttatcctaggttcaaattctgaccaccacgaccaccatcatacctcccctcaccccacccactgcacacacaccagctatactggtacacattaagtgacttctttcagccctaagtttttagtcagtaaaatgaaaacaatcctttaaaaaccaagcatgaggcttattaaagcaaagcagtgcttgccaaaccaggagctcatccactactactctgatccctgctttatcctgtgtgggcgtggctttctgcttcatcctgggtgagcaagactctctgctttcacatgctagctttgaggattaaaatgtgggatgtttgccaggtgtcatttgtaaacccagaccccccagtgtggttgctgctgtacctcttttcttaccatgaatcacatttccccctctttttctagttcccatttggccggcgcttgccttgtgatatctactggcatggagtttcatttcgtgacagtgacatactctccggtcaagtgaacaaatttccaggtatctgaagttattgttggcctttagaagtatccctaggtccaaagtcagagtagagtctgctgcaagagcagggcactgttttcagatcaaacatgaggacccttaactgagattctctggccatgctctgctgggctgctgttgctatggggaagaaatcagggtggtgggtgggggggagtcctgagagctgacacttctgagggtctgaaggtataggctgggccttcaccggggagccctgagagctgacccttccgagggtctgaaggtgcaggctgggccctcactggttaaagttgtgctttctcagtgtagtttccactggtacnnnnnnnnnnnnnnnnnnnnnnnnnnnnnnnnnnnnnnncatggtggtccacccataatctcagctccctgggaatacaaaggacccttagggaaagctgctagcttgattagttaaactggtgagctctgggtccagttgggggaacctgcccaagaggaggaggagggtgatggaggaagataccagatgttaacctctgggcctctacatatgtgtgtaaacatctgcatgttcatcagcacacatgtgcaagtgcacacatgcataccacacacatatgtaaaaatatacaaaataaaagaacatgctttgaacttgtcaggttaaaatataatacagtgggcccagtgaaggaactctagtgtctagcaggaaccagagttctgtgactcgtcatcacagaaatgaagaccccatcggctttctcttcaggtatcacagttgaaggtaccatgagagtgagctctcctggtctccactaagcttcacaggctgtggacagcctcttccttttactatgggtctcatgatgagacttagcctgcaaggcctcggtggtaggacatggttacagtcatccccatggttgcttttcttttgtctttcagtctctgtattatctcctctacagtcaccattcctaatggctgtgtgacagacagcagagccacagggcagtgggactgcttagggaggagaaaacatttgactgaacttctagatacaggccccacacttattttgttaatggattgtatcacaatgttatattaaatacaaataatatatatttttaaattttatgtatgtgagtatactgtagctagccagatgtggtggctcatgcttgagaaactgagacaggaggattaccataagttggaggccagcctaggcaacataatgagttacaggctagcctaggccatggagtgagaccatgtcttaagaccaaaacaaacaaacaaaagcctaccgattctcagattacacattccatatgctgggtagttattttcccacacactatggggttttaactgaactactgagacatacaaagttctactataggcagtacacatggaagtactataggttcacatggaaagacgcagggtaggaagcatgacatggctgcggcagtatgaagcatttctctttagtagaatatttgcaaatgctccagggtctctggcccttagttaaagcaagatgagacgaggagacaaggctcacatctgacttggcatagatacacacagatgccagcatctttcgtaattctgctgacacggcatcccctcaaggcttatgctgagttacaagattgagtgctcaggaagtctggggcctcggcttcctgctggctgttcacttggcttacctatccaagttcgtgttaaccgggtgccctgctctttgacaacacagaagatatcccacctttcttggattttttttgaggggagcagagttagacgttatcccaaggtcaaatttatcctcagagaagagaaaaggttttgttatcgagagtgagccttacagtcagggtccttgcacaccgattttagtggccttgctactatttatttctgtcttgctgctcacaaaaaaggctaccaaaaacaaacaaaaaaaaaaaaccaaaaacaaaaaaaacttcttggggtcatgggagaaaacaatttgcacacaaccctctacatgggcagagttgttgagacacgattctgcaattcttcggatgaggttgcctatcactttcctttctgtcctgtctcccctgatggctgaggatgagaagtagctcagggtctatctacatcaggaatatgaagcccagaggaagcgactagcctcacacaagagcactcattccaaaggcgagcctgctccatcctctgctcagcatgccagtgactggaacatgtaattttccactttgcaaacagcagttaattaactgtaatgatacagcagcctttgaaacctccaggtagggaaaggcaccttggacagacagaaacccaccaaggccgggggttcctggtgggggggttcgggggagcaattccaggcagtactgactggcttttggcttctgttttgtctgggtttatctcctgcctcatatacacgcctttcccacacatggcggatgctctagagtaagttctgaaggatgctccaggagagagtgtgctagaaacacagcacacactgagagctttagggtactcatggcatttaccttctctgtgccactgtatgagatgtcatttgcttttctatgggcaatttccttagttcaaaatacattttgtattgtaagtgatatattaagattcttcatttaaatattctgatttaaattggtctgtgccagatgtggaagcgggttcttgtaaccccagttctggggaggtagagccttggggttccctggccagctcacctagtctagtcattgggctccagaccaatgagagaccctatttctcaaaaaacaaaaaacaaaaaaacaaaaaaaaccaagatgtaggactgaggaggtgtctcagcaagaaatgctcttgttgtgtaaacattaggctggacttcagatccccagagcccatgttaatgtctgctgggcatggtggcctgtgtataattcagatgcttggaagacagaagctccccagagcaagctgggtggctacaccaactgtatcactgagctctgagcagtgagagaccccgcctcagtgaataaaatggagaaccatgggggaagacttaaacaactgtctcaggctccacacacatgtacacacacacacacacacacagagagagagagagagagagagagagagagagagacagagagagagagagagagagaaagagagagagaggtggacagctcctgagcaatgacaccatacccaaggttgctttccaagtgtgcaaccatgtgtccacccactcacacaaacagaagcacacacacacacaccaacacacataaagatcaaaatatccacgtatttttaagagaagcatttttagagagccgggagacacccaagacaggacccagtcacacagtgcctccataagcagtgctgtaagttaacgctgtggacgtttccccactccctgcccttgattcaaggagagcgagcttttgctgaaaggtgtgtggctttctattttatgcctttaatagtcatgaaagattaaaacaaagcagcttaattacatttctcataatgtcaccagagtctactagattatctcccctggggaacaggatagaagggtccatgaaatagtgtgagctagctatgcattcaagagagggctcagttctaggtacatgatagaacttcagttcccacaaagatgacaaaggatatccttagacagaggctcagataggaggcgaagactcacccttacaccccctcaccccacccccgggattaaggagggagaatgaatccattgattctccttcctttaagatcctcctaatccgtcagtctctgctgcaggagaaagtggccatggtgtgtgtggggtgggggtgggnnnnnnnnnnnnnnnnnnnnnnnnnnnnnnnnnnnnnnnnnnnnnnnnnnnnnnnnnnnnnnnnnnnnnnnnnnnnnnnnnnnnnnnnnnncccaaaacactggctgccggttccctggtggcccagcctcacagcttctcccgtccccccaggcatgacggagatggtgcgtaaggtcaccttgagccgagcactgaggatcatgcagaacctgtttccagaggagtacaacttctaccctcgctcctggatcctgccagaagagttccagctctttgtgtctcaggtagatggcactccggcccttgaatgataatcatgtctgtgactgcagctgtgtcccgtcccgtgtgctgggagctaggccaaccggggcaccaggaagctaggtgacttgattgtacacagttgggcagccatccgggcagcttgtggagttgaaccggcagggcgacaggtgggctgactggagaagtggtggtgctagagctggatcctggagacagggagccagcgaaccaggaagatggaggaggtggggaacccacatgtggaatgggcgatccaggggaatctcccaagccaccagtgtagttgagggtgcttaaaggccgaatagcaggtctagcaaccagacatgggaagccttttatgtgtcctgctttaaacttgagcaagaatccactttcaaatgctctaatccttccacctagaaagcagtatgtttgaacacaacactctagagtcttggctaccagtttgaagaagtggtggtggtgtgcagggctcagaatcactgtttactttagttttatgtttttgacaagttaattcccagaccatgtcaaaagccttggcaagttctgcaaaccatgccataactatgaacttcagggtaagagcaacaaatgggccagctacttttactagttatatataatctgggcattgtgtttgcagcttaacatgaatccttgtaaccctagaatgattttatgacatcagttatatgaatatccccaatttacagatgagaaaactgaggctttgaaaaattatggagtctactcaagaagtatgatttaaatctagagctaacactgaggcttagactctgttcaaatgcctcattgttgtttggggacctaatataaaaatctagaactagaaataagattagaattgaccaaacacaaataaagcttgctcatttttcaagagaggcactggggctagaagctcatggctaggtaccttgccctgtgtgtgagagaccctgggtttagtctccagcactgcaatagatagatagatagatagatagatagatagatagatagatagatagatagataggtaggtagatagataggtaggtaggtagatagatagatagatagatagatagatagatagatagatagatagatagatagatgaacatgtggatctgtgtatttattaactcaggttcatttattctgtgtaaactttgcttcaataaagttaatttgaaagatagttatcagcgcttccattttcactcatggctctgctcacccttccctctagatctccacaggtatgttaaggattaaacagttaagtctaaatccagctgtatttaagatctagtaagagaagcacggccaccatcagttccccacagcccttgtgtgagtgaatccttgtggtcagtcctcacgtctctcactgaagataggaaagtaaataaaagcagtcaatagtgccttgagatccaaccagatgtgttgcatgctctgtcctctgtatttgtatggctgacaggtgttccatgctgtgaattctccacaatgtgccacccatcccgcattgggtggctatttgcctttatttccagctggggacaagcaaagctgccctgactgatatcctgtaggttactcggtagatgcatgggatcctgggaatcttaggatcatgttacctttgggaatctccaactttctcaccagcaactccaaagtagcagttcctcatctcccagcagctttgacagctgcagttgttacatacttgacactgtgagacctgatgctctgagggtataactgtgtttctttttagtaaccaccccctttcttcccctaagaaagggtcttgctgtgtaagtgctaaaaattcaagcatagccactatgctcagatttagttgtttccttttcttgttctttttgatatttaacacttgttcttttttctcctcctcctcctccnnnnnnnnnnnnnnnnnnnnnnnnnncctcctcctcctcctcctcctcctcctcctcctcctttccttcctccccctcctgagacagagaatcactatggagccctggctgtcctggaactctatatgtatgtagatcaggctggcattgagctcacagagatccacctgtctctgcttcccaagtgttgggattaaaggcgtgcaccaccgtgcctgtagtatatcaaatgtcaaaaacccattatgtgaatataactgtagtactaggctcataccatgtgttaccccacaccttgtgcctccagtcaagcctgtccacctctcctcaataagtcaattaaaagagccaaattaaacattgaaagcagaaaaaaaaatgaaaggaatttagtcagtgtggccccactggaggagggacagagatccagaaaagccctcaaatattcctcaggtgagatcagaatttaagtagagagtcaaggttgcacacaggtaagtagccccgcccaagtgtcgtcccactcacactgacctgtctcagtctgtgcttcctgtcattctgcatgctggtctataagctgttagagctatgtgagatctctttctgagaggcaggtttctcctctgcctggttcttttcctcccccccaggatacgacttccagggttcattgtgtcactagccagttagatggtgagagctgagcatctcttcagagtagctttatttctgccaagtctgtgacaatggctcacacgtgtcaaacagaatgctttctctcttcccaccatgctttgaggcagaccctcatttcctcccagctgaaaccatagcacaatacattttcctttctgctctgctttgaaggcatctcaggtagttttatgtttggcatttctagtaccatttagtattccctgctcttttttgagaattctcttttgctcatgggttatttataaatatattgtttaattttctaaatatttttacattttcaaatactttctgttgttgatttctattttattttgtaagagttggaaattaagtgagctccaggacagccagggctacacagagaaaccctgtctcaaaacaaaacaaaacaaaacaaaacaaaaaacaaaacgagttggaaattatatcaagctctttaatttttacatgctatatgtggtggtttgaatatgcttggctcaaggagtggctctatttgttggtgttgcattgtagaagtaggtgtggccttgttggaggaagtgtgtcactgtggggtttaaaaccctcatcctagctacctggaagccaggattctgctagcagccttcagatgaagatgtagaactctcattccttctgcaccatgcctgcctggacactgccatgctccctccttgatgataacggactgaacctctcaacctataagccaggttaaatgttgtcttggtcatagtgtctgttcataacagtaaaaggcagtatgattaatttttaaattaaatcttaatttgcttgtgtcattattggcgtggggtgctcacatgccatgctgtgtgtggaggtcagaggacaacactgtttggggacaagttttctcctccaaccttgtcagtcctcaaaatcgaactcaggctgccaggtttggcatcaggcaccttctcctactaagccatcttgctggtccctcaatcttttaaacgttattgaaattttcttttcatatcttgtttgtcttgatgaacattttgtgtactcttgaaatgatctgtataaatgtcagttaatgtgagttagttcttctaataatctgcccttctttacggatctatttcattcccctaattactaaagttttcagctatggttatacttaggtttcttctgtaaattctgtcagtgctctctgcatacattttgtaacttccttagtttaatggttagattcctttataagatgattcccatgtcctctctgtgaaaccgacaggtaccttccagtttttattggcttagtatttccatgatagacttttctatttttttgtttcaagctatccacatttaaaagagtgtgttttgttgaaagcatctgtataggtcttttatcctgcttgaaagtacttttaaattattgattgtaacccacttatacttagtgtgtaatattgtcgtgaatttgggtctggactcttgctagttgtcatctatttatcttgtttagtttagttgattttaaaaaatgttactttgtgtcttcttgagttttattaagtatatctatttaaaaatggctttagtttttaatcctaatctatgatatggccttttcaaaacatctcttaacttataatatttaccagttattattactgtattcctaagagccaagcaacttcaaacagcacaggcctgttccaaccctcagcctactacatgcttttgaaatgtatttactgctaatcctacaacattctattattattatcattattattatgcttcaaaaattaggttttgttttgattgtctcataaagtccaagctgttctcaaacatacaaccctgccccctgccgcaatgacaggtatgcgcccccaggcctgatgaaaagctgcttattttaaggacactgaaaactgaatatatttggctttgataattaccacgtatctttaacatccccagagctctgaatcctttccgtaggtctgagctccctctactattcttgttccaccagcaggatttgcatgaatgcattagttttggtagtgcaggcctgccagtggcaaagcccctcttcccctcttcttctctgaaagtgtatttgcctttagcttctaaagtatttcagattttaggctcataagatgttataaaggtgggatagaatttgttctcctgtccatttcctgtatcctcaccagtgtgcactgtacacagtcactgaaacgggggtgggggggcactggcatactgttaactgggggtggggacactggtgtactgtgggaggatcctggtgcactgtttaactgggggtgggagacactggagtactgtgggggacactggtgtactgtgagggacactggtgtactgttgggggcactggtgtgctgttagctgccatgccactgtcctcttctgctccgggttccctgtgagccctgagctgtttgagccaccatctcctgctttcctccttcgagctgttactgttcctcaggctctgtgtctctcatgcccttgactttctgagcgccattgccggcttcttgtttcagaaggatcttcaatttggttgtatctaatttctctcacaatccaattttgactacacattttttacaaactataacacaaaagatgctgtgacctcctcagttcagcacaccaggaagtgctaggataccgtgtcatattcctagtagtgctggtgaaattagttattacgacatctgctctatttctctactgcaaagtcgttcttttaatctttgcagtctctaagtgtcttgtggggaagtagatatttttggacagcacagatagcctgcttgcattgtaatcccctcccagttgagactgttggcaattcctgtatcccctcagaaaaaccccactgggaccgtcagtgaaactgagggtcaacctgtatatcatgtgagaatcactggacagggccacgcctcctttaaccaaggtcatctttaactttccggggtgtctttgagtgacccctgcaacagtgttgaacacacgatggattcagacatcctcctgatgcttgctaaagcatattttgtttgtattatttttggtgtgaaatctgttgtcatctctatcccctgtcctcactggggaacgcctcctttctgtctgctcacgttctttctctgtgcgactgactttgaacacttgattaaatgtgctctgggtataatttctcctcgtgtttctgattcattaagttatatgtggatttatattttccataaaatgtagaaaatgtctgacctgttacttcttcagatttatttttctgtctcttttctcatttggcacttggattccacatacattaaatcacatgaagttatcccacagttcactgatgttccatttacttaaaaatattctcggatggtgggctgagatggctcagcaggtaatggtgcttgccaccaaacctgtcaaatctgagtttgatctctgggacccacatggcagaaaaagaaaaacaactcttgaaagttgttctctaagccgggcgtggtgacgcacacctttaatcccagcactcgagaggcagaggcaggcagatttctgagttcgaggccagcctggtctacagagtgagttccaggacagccagggctacacagagaaatcctgtctcgaaaaaaacaaaacaaaaaccaacaacgtcaaaaaaagaacattgtcctctgacctccatatgtatactgtgtgtgttatacacacacacacacacacacacacacacacaaacacccccccacacacacacagacacacacacacagatacacacatacagacacacacagacacacacacacacacacacatacacgggtggggcataggaactctaatctgagtcttagagattgctgtatccacatacaaattcttgaactgggctctaggatacaaagtaagtgacttggaaacagattacatgtttattttctagagtaatacccagccagagtctaattatttcctttctaatcaaggcaagacttttactcttggtccatgtgatgttccatgaattcagatatgtctcatcctggctagtgagaacatactattcctggtactgtgcaggtaccgggcgggcatcgccacttccaatcctattggatggtgctttctttgatcttagtttcttcacatgggcacactgatctgttcttggctgaacatcaagggagttctcggtagaggagattctgatcagactttagagtgttgtgttaaccatcagtaaagtattagtcaaagcctgtattagctacgtttctgttgtgataaaacaaaacaaaacaaacaaacaaacaaaaaaacctatgatcaaaaagcaccttggaagagtttattttggtttgtcgctctgtggggacagaatccattgcgtgggggaaggcatgacaatggtcttgggaagcatggcggcaggcgtagggagcgatgtcccttccccaaacggcaccatcaactggggaccaagtgcccagatacatgagcctctgaggacagtctcattcagaacagcacagagtctaagtcgcacatacaaaagcacagattcatgaaacagtgtggcaggcacacaggaagcacaagcaggggagccacgcccatgaaatgatgagccgtcacgtgtaggtggagcttagagggagagccttagacagtaggacgaaccttgcgtactctccattcaagaccatggacaagtggagggcatgtggaagcttccagtaaaagacggggtgaggatggttagggtttagaacgggaagggtcacctgcagagtagatggatgagcgaggagaagtgaaatgagggagaggaggatggtgctgatggtggagctgaacggtggctcacgccaccacgtgattccagtacgcgaggtaagggcaggagggctgaaagtggaaggccagcctgcctacccagtactccctgggagccgcccacctcaccataaaactcagaactttaaactctgacacagagacaggagaggagggttagatgtgagaaagattcaccaggtggtgccaaaaagaccctggcatcgtggcgctggaggggcagaacacttgaggagactggtgaggtgccaaggtgggatgcccaagaaaagcaattgatttagtggagaaaatggaaaatggcctccctggggctgagaaggcgcctctggctttccctgttgctaatttgcacccatccagagagacgattttctgtgcagtaaaagtcagagattgggttaagagatggccccagtagcttcctgttttagcattttaagccctgttataccaatgcccatttgactgaagctgaatagtctctgatataatttgcagtctcctgactttgggcccgacattcgtaccatactcttttggggtctctgtcgtcttccttcggccccatcattgcatctctgtgtgttggcattccgtcactgtgataaagtgcataacctgcagagggaagaggttgtttggctcctagtttagggaattcaaggcccagtcagtggctattggctccattaccttgggctttttatgtgttagcacgctgtcgcaggaacacgggaaggacctgcctacctcacggcaatgggacccaggagagaagagactggcattctacaagctcccttgaaggcacacaataaataacacaataacctcccaggaggtctccccttctaccaccctgtaacagcgtcataggctgtcagtcaatcctgcaagccccgggccttcaagatccaacagtaacatctaaataggaaaatgctaactagagtgcagatgggcatccagtggaagtttaatgatggacattccttattagcttcaaacctgagttttaaatgtggcgttattatttctattgacttctctggtttgtcagaaaataacatcttcattttaaggattcaactaatatatgataatgtgaaataaaaagtgaataaagggaggctggagagatggctcagaggttaagagcactgactgttcttccagtggtcctgagttcatttcccagcgaccacatggtggctcacaaccatctgtaatgggatctgatgccctcttctggcctgcaggcgtacatgcagctgaacgctggatagtttacaaatggagaaagggagcctgcaggtggtgcctgcctttagttccagcacttggaaggctggggcaggatgtctctgtgagcttgaagccagctagtctggtgactgagttccaggacagccagagctatatattgagaccttgctttttgtttgtttgtttgtttgtttttgttttgttttttgttttttgtttttaaatccctacttattagctgaaacgaggtgtatttgggccacagaaaagtaccactgtttagaaagcaacagttcagtacgaattctttttatttatttatttatttatttatttatttatttatttatttatttattatatgtaagtacactgtagctgtcttcagacacaccagaagagggagtcagatctcgttacggatggttgtgagccaccatgtggttgctgggatttgaactctggaccttcggaagagcagtcaggtgctcttacccactgagccatctcaccagcccaaagcgaaccaccccagatgggacacgaacagtacgaattcttttcctgtgtacaagcaaatacacataacagatacagatttttcttaaaccctgagttatactaaacactgttcctcattagcttgcttctacccactccctgtactttcgacgtcttcttgggtcagtgctacatcgaatttcattatgaagagatcatagcttgtgttaggtagttctcatgcttcttgttgtttaacaaataacattataagacacaccttcatcatagggtgctggcattttctttaaataggtaggtcatgtacttcctggacaggcaagccaaacacaaagcttcatcagacgtgggaatgtgcctgtgtgtgtgtgtgtgtgtgtgtgtgtgtgtgtgtgtgtgtgtgtgtgtatgtgtgtgtgtgtgtgatagaggaggtgtgactcactgtaaaacaataaaggaatctggagctttgtgatttctttcatggattattagcgagtgcatttcatccagacaaggggagacccagttcctgttgtccacgcacagtctctacccacattcaaccagcaggtggcgccgggcggacgcaaataggcttctcggggggatttttataaaggctgcaggaagatgcaggcttgcttcccagttttagcagatggccaatcaaaaaattcctttggagttttatttcctttttctttctttcttctccttttaaaaaatttttttttgcatatggtcttccatctgggtatttgagaaaagtacagttttgttatcaaaacagcatttattatggtgaaagagtttgtatttctcagcaaagtttttttttttttttactttacttttagagaataaagccaaaacctgctcaataatgtcttgcagcttctcagagggctccatggagcttgagagcttccatttccccacagttagtcctaagttagctctgaggactcagcgcctcagggtggagacaagcactttgtttgagaagacaaaacagaaagaaagcagtgctctccactgggtcagagtaaaggcaggaaataaccaaatcctttctcttgtcctacaaccctttggtgacttatttgcacagctgcctgtgacggttggctttaactgtcaagttgacacaagactcacccaagaagaaagttttagtgaagaattgtctacctcaggttgacctgtgggcatgctggtggggaacaatcttggttgccttcactgatgtgggaagaccaagcccaccgtgggaggtaccattccctgggcctggggatcctgaactgaacaagagaagagaacaccaactgagcactagtaagcaagcaggcatgcattcagatatctctctgcttctgactttgaatgtgctgtgcccaggagacatccctgcagaggtagaatatggcctggaactgtagcccaaaacaccgtcgtctcccgacccccacccgccatgttgccaggggtgttttaccacagccatgagtgaagccagaacattttccttcatggagacagtattctgatctgcctggctgggaggccccactaggtagtaagtttaaacttgtcctaccgacccctgcagcctcacctccacagtcccaacccccgcttcttcagtactttgtggcctactgtgtgtgtatgtgctcacacacacccatgaacatacatgtataggtcagagggcaacctcagtgtcatcagtcaggcacatctgcctttgtggggtgcagtttctcactgaccaaccagggcaggctggctaacaagctccaaagaaacatctgcctctgcctccctggtgctgacatcacatgtcatgtgggccctctgtgcccatttttaaaaactgaattctaggggttgaattcaagtctccccgcttacaagtcaagcacttgaccgactgggtgatttctacagcaccgtgctggggttttaggtatcggctcctcgatcgctctttgtggcatgtttttgcctagacctgtggacttcatccttcatgtctccttcagtccccaacgctgtcttatttcacaggactgatgttaattcttgttttcctttctatcttcatgttgttttgaaacagggtctcatgaagaaggctggccttgaatttgttaggtagctgaagatggctttgaacttggccctcctaccttccaatggccaggcatgttcctctccacctggctcaactttgataattctttaaactccgggcaagccttttctttctctaccacgcctgctctgctgcccatgtctagggcattgagctgttttctttacgatacgtatgactacgtttccttctctctttgtcctactaggaggtctgatgggtctgactgatcatcagcacacagtagacagtcaagtacattggtctaattgaaaggttttatctcttgggaggttagccattgaagttggcctgtctggtcagcatgacttgacctgcctcccaagaatgtacaacacacttgggccagaggagacttaccaaaatacttccatccagcgagaggcccaggtagtcactcactggccaccctgcccaggtcttgtctcagcctctacctggtcacgtgcctctttcccttctacagcaggagggagtggacataaacaatgggatgtcatctgcttttggcacacaacatccttagaggctggggcccatggcggcagtgtccagtgagtaaaagactggagacagaagcgaggggaaccagatgtcagaagaatcagatgatccaaaggcatggcttcctctctctccatctgcttcaacttttctcttcttatttccaaaaatagattgccatcctcctcccagtgaaatggcgcatgctgtccctgtgtcccttgctcaccagctggtgcatttcctagggtgatgacatcatctccagctcaagttgctgctcctctctggacgtgagaaagtctgcctgtcccatgccttagcccaagcgtcagctggcaccggactcatgctgcctgcactgcctactttgggcttttcacacaggcctgtttttaatcttcatttggcgttggctgctcccatcacctgccacttgtaaaagcagagatgagaggttggagtggtcggcttgtgctcttgtatatgtaaacaggcatatgtaacttccactgtgcacatgtaccgagaccttgtggtaggcaggcatttcctgagacctacctagtaccaagtgctaaagctacaaaacaggttggaaatgtccttgctcttgggtttctaggctgggaggatgagcatccatccattcatatccatccatctacccactcatccctccatccttttgcttacccatccattcatctgtccatgcatccatctgtccatccacacattcatccatccatccatccatccatatgcttatccatccatccatccatccatccatccatccatccgcttatccatccatccatccatccatccatccatccatccatccatccatatgcttacccatctatccatccatctatccatccatccatccatccatccatccatccatccatatgcttacccatctatccatccatctatccatccatccatccatccatccatccatccatctttctttcacttgagaagttgaggttctgatctgtctttccatgaaatcatgttctcattctttacatgggaggaagctaaggttctgaatgttgagtaacttcccagcatcccttggcttctgatgacatgtagccaggacttggacacacactggactcaggcctgttttcccttagtcttagcagacatttactgggtgatttttttaatacccagtatccaaagaatgaatctttgctttcagtggagggcactgagtgtcctggttagttttatatgaacttgacacaagctagagtcatcaattgaggaaatgcccctgtgagattggcctgttagcaaatctgtagggcactatttgattattgattgatgtggtgctgcccctggacaggcgatcctgaggggcataataaagcaggctgtccaagccaggaggaggagatccataagtagtgttcctccatgccctctgcaccagcccttgcctctgggtttctgacctgacgtcccaggatgaatagactacaagctgtaagatcaaataaaccctttcctccccaagctgccgttggtcatggtgctttatcagcaatagaaaccctaactaagacactgctgatggatggtccaaaggagatagatggggcagtctgaaatgagctcaacacaggcactgtgcaaatcagggtaataaaggatgtgaagtatgggagacaggcaagtcaaggaaagctcttatggcctcatttaacctgaaatgaaacagtgagccagagtccaagggaccagggtgcaagtcccctctatgtcttcactgactgtgggatactgggcaagccacctcactgtgtttcactgttcctaaaggcttgagaagaccagaatatcacaaagtgcctgcattctgatctgcaactctgtggggttgggttttcataaaactcgcagctggaactaaacagctatgcaaatttctgttgtaaggtttcagtcgaagcacttgagaccttgggcactacctcatgctaatgctggagtcagtgtagtgaggagcttgcagagcctggctaggggagggctgcaagagagctgtagatgggaggtgtcctcaggcaggtggcagcacaccctgcagtgatctttcctcttgatccctgtcccacctcctccagggccagtgattggctgagaatagcaaacactggctaagccaactcatccacacatagctcctccaaaggccattcagaaagactgacacttccaaagctcacccccttctcacctgggcccctctcccagggttacccccgccaactaccctctccagatccaaatcatttttgtgttttgaatgatgtcatcaagctataaaggccttttgtggtcacacatcccatgtcatctctgagtctggtgctatcttggcccttgctaaactactctgtcctctgggtccctgtactcagtaagttgtcaggctaggactcggtttgctcctctatagaagggttgctgtgtgaatcaacattgagtgtctcacaggaaatgcttcccagtctgcagtccctgctaaactggggtctctaagaagctgagtccccaataaggggcataaagagaatgctcagaattgtatgaagtgaaggactactgaaaatggcttctcagagctagatggaaatctaagacaagaatgcttagcagggctggagagattgctcagtggttagagcacttggcagctcttctggaggacacaggatcaattcccagcaccagaatggctgcttgtggccttctccggcaccaggcatacaagtggtgatcatgagcatgtgagagacaacaacatccatacacattagataaatgaatgcagttttaaagcttaatgcttagcattctgggcatttgtggctttgggagagtatagaaatggatttatcaccttgagacgaattatctcattttgcccccatcacatgagatggaatgatagagagtaaggatttgattttgactaaactgcaccccaggttggcttagctgagatctccacctcatcctcagacagccccccaactccaactgccccttaacactcagaattgagggagctttattgtctcaggtttgaaactccaatctcccccagccacatttaacattttatgtcacaactgttataatcatgttactctgcagtactgatcgatcacaagaagtgtggggacaaactgctcactcaggcccctgctttagtgtgcctctctctaatgcaagctttcagaaaggaaaggagagggaggcaaagggttcttttccaggagagactgtcttaaaggccaaggaaaccctgcttgcacacccaagggtcatctgtcacccttccgtttttnnnnnnnnnnnnnnnnnnnnnnnnnnnnnnnnnnnnnnnnnnnnnnnnnnnnnnnnnnnnnnnnnnnnnnnnnnnnnnnnnnnnnnnnnnnnnnnnnnnnnnnnnnnnnnnnnnnnnnnnnnnnnnnnnnnnnnnnnnnnnnnnnnnnnnnnnnnnnnnnnnnnnnnnnnnnnnnnnnnnnnnnnnnnnnnnnnnnnnnnnnnnnnnnacatgttttctcaaggggtttggacagaatgcacttgtgaggtgctcctctgtgcttgaggtcttaatggctcctatccgttgtctctttaacttttctttatggaggcttgtgtgttgtgtgcatgtgtgtaggtgcatgtgttcacaagcagaggagacgttggtaccatgctccatcgctctccaccttaccccccatgaggcagggtctctcctgaagctggaactctgtttctggctagtctgtccatcagtgaacccgacaaccctcccatttcagtcccacctgagtgctggcattgtcggaacgtgaatgtgcatctatgctcaactccatatgggtgctggggatctgtaggcgggtcctcacactcacacagcaagttctcttatgtctggaatctccccagccctttaacatttcattttgatgtaacttcagactcacagaaaaactctaatagtataacaatttctataactcaataataccaaagctcctttttttagacttatttttcccccaagacagaatttctctgtgtagctctgcctgtcctggaactctcgctgtaagaacaggctggcctcaaactcagagatccacctgcctctgcctcctgagtgatgggattaaaggtgtgcaccaccaaacctaactgcattttttctttcatagttacagtgtagttatcaaaactgggaaattgacatgggcccaacactgtccacaatggagttgtggtcccagtttattccatttactataattagttttatccactttggttatcctaagcagcagaccacatatcctggttcatgcctgtaatctcagcctttgggaggcagaggcagcaggatcttgcatttcaggtcagcccaggctttagcaagatcctatcttaaataagtaaagtagacagcaccagttatttttgcatgcagagtactcactctggccatagcccatgcctgtactacatgcatgtttgctgttagttcttacattaaacctgtaaggtacataacacctatcaccaccatgctaaagatgatggtttcctataggaacttagcaaataatgaacagccaatgtgtggccgaccttactttttgaaccatgacctattagacaccagaagctatgtgttcttaaaaatacataaagtggtaattctgcaaaaggatagcaataagacgcatagttttgagaaaatcttagcagattccaggtctagagagaattaccttggaaacaattaaatggcatgggggctggagagatggcttgatgcttaagagcactggctgctcttccagaggacccgggttcaatttccagcattcacgtggcagttccagaggatctgatgccttcttctggtttccatgggtaccaggcaagctaatggtatgctggcatgcacacctataggtttactaaacctctaaacatatctgacagggatgttaaaaggcatattgaaaattgttccatgatggacacatttgttggcagagctgatgataatactatgttgacatgtttgtgttttggcagtagtatcaaggatacatacagcatgtttactctctttgcagaagttggccaacttgttccttcaagggtgttttccgattttcacatcacaatctttgtcacactcagctcagatgttgtgctgtataagagccatagatgatacatgagtaaatgagtgtggctatgagccagggaaacttcatcacacagccaggggtagactcacagcatggtccaaagtctgccatcccacacagccaactgatgtaaccttagttctacgattgcaagaaaaaaaggaaaaaatggttgtgctcaaattttaatcaatgccgaaccttgagttctacaggaggtgtagatgtggcttattttcttcactgtcagtcatgctggatgatgattaaacaaaaagggacatatgctgaatggcaaaaataattcatatgtaagcctatgctgtagattgacattgggaagtgctcccgagacacgttagtacataaagcagggcttaaagggggcagagttaacacacacacacacacacacatatacacacatcacgcacacacatacacatcatacacacacacatacacatcatacacacacacacacacacacacacacacacacacacacacacacacacacggcatgctgacaatcacacagtaggaaagagtctcactttctctctcaacccaccagctccccaataatgacacagagacctctatttatctatgaatgcttcggtcttacagattaggctggttcccaactagctcatataacttaataacccgtttatactagtccacatttgccatgtggcacattgcctcgaattcagtgcatacatctgacttcctccacatctggctgcaaatctcgagcctctcagttcttcccccagttccttcctctgcctggatgtcccgcctttcctatcccgcctcagctataggccgtcagctctttattaaactgatcagaggtaacagagaagaatgtttacaaaatacgatgcaggtgctgagtaaacagaataacaatctccaagtccaggcagagctcagctctctgctggtgcagaaatcaacatttgaatagtacaaagacaacctttgcacaatgtacaaggggttagaccaacaaacaaatattagagaattaaattcatgagattatgtcaagttatgtatggtttaaaattattttagtcaggtagccatctctagatgacaaagacagcagatcacatgcactgagtaagattttagcaatctaaagtcacagaatggaagcctgtgctatcttgaaataagatgcagttgtttgatttctcgagacagggtttgtttctgtgtgtagctctggctgtcctggaactcactctgtaaaccaggctgatctcagagatccaccttcctctgcctcctaagggctcagattaaaggtgtgtgccaccatgacctgacataaaagatgtagttttgatactacagtttgctaggaatcaggcaccagaatagctgtatatgtgtatgttcacacacatataaatggacacatatatacatacaacattgttcttataggtaagtatacagaaaatgtatactacatatgtatacctacataaatgtatatatagtatctatgtaagtatttctgtacatagattatatgtgtagagatataaacctataatttggtattcagaaaataaagaacaataagttgtgtatttttaatagatatcttcatttgattttattaaatcttacagcaaaagattaattataagacttggtgcagagtctggtggtagagcacttaactagcctatgccaggccctgagttgatccccagtactgaagaaagcacatgaataaaaaggtgaaacaaaaaatttcaggtttttttgcctgttactaatatttacattttatcaactgaaaaattaaaattatatgttatcatgtacagcatatgcataacttgaaatatgtataaattctagaccggtgaaatagagtggattacctcatatgtctatctcttttttgtggtgagaccacttgaaatctacctctcggggctagagagacaactcagcagtcaagagtgtagactgcttttacaggggaccagtgctcggttcccagcccccacatcaggtggctcataattaattgcctattactccatttctaggggacctgatgccttcttccatcttcaaaattcacatacagacacacacgtacaaatgcacaggatgaaaaaattactctcactttcaaaatcaacatactattcactgtagttatggtcttagttttctgttgctaagataagaaaaaaagaaagacaacttacaaggggggaagattgagtgtgctgctagttttatgagaacctgacacaagctaaagcatctgaaaggtggaacggcaaccaagaaaatgcttgcagaagatttggctgtaggcaagcctagagggtattttcttaaatagtggttgatgtgggagctcatcccattgtgggtgaggccgtccccagggtggaggtcctggatgctataaggaagagcaggctgagcaagttgtgatgagcagccccccctccatggtctctgcaccagctcctacctccaggctcccatccagtctgagttcctaccttggctttcctcagtggactgtgctgcaggacatgtaagccaaataaaccctttcctccccaggctgcttctggctgtgcctcatcacagcatctgtcacccaggacactggggtctggttacagtggctgaagtactggtctagctttggttagcttcattgctgtggggcggtggtaaggccagacatcttggcagaagtatgtgatgaaagaaattgttccttcactgtggccaggaaaggagagagagagagagagagagagagagagagagagggagggagagaggcagagaagggagaggggagagagggaaagagagagagagagagagagagagagagagagagagagagagagagaggannnnnnnnnnnnnnnnnnnnnnnnnnnnnnnnnnnnnnnnnnnnnnnnnnnnnnnnnnnnnnnnnnnnnnnnnnnnnnnnnnnnnnnnnnnnnnnnnnnagagagagagagagagaggagagttccagtgtcccctcaaaagtacaaccctaatgtccatgcctgataaaggtttgaccatctcccaatagcattacaagctgtgccaagccttcaacacacaagccattgtgtctggccatttaagacctggaacctatcaccatgttgtaaaatagaccttctgaatttactccccagtcacaaccatctatcccttactacccaccgagctgtcctttacttagagaccagcctgtctgtgtgcacatgagagcatatggttttatatccctacacttggctcatttcactgaatacagtctcctacatacttacccagattgctgttgagtggcaggatttgtttttctttttaaagactgaatagtatttcattatgaatgtatactacatttcatatccactcatctgtttataggcactggaataattccctatctagcctgttatgtgcagggctgcatcaaacagggaaatatgcaggtaaatcttcaatatattaatccatttccttttgctataacatagtaaatgaactgtagatcgtgtttctaatttttttgaggaactttacaaattacaataccgctgttttccacagcaaccatgcacaaaggtttcctcttctctgaagccccagtaatactgtaatacttgacctctgttgtttcggcaacagccattctgacagctagcgatgataaagactttagcttgcattctttgatgggtggtgatcaggagcattcccctgcatccctgataatactttgcacatcttctcctgagaaatgtctatgcaaatccttagccacattactctattttcattttgcatttgtgtgggtgtcattgtctttgtgcaggtacctactggattcgaggtctttcttaaccattacctggccttattttttgagataggatttctcactgaacctaaatgccatttcaagtagactggttcactagcagtccctggggtcatgtctctgcctccccagtacttggggtaagatgtgtgacatcacacctacctgttatgtgggtgctagggatccaaactcagattttcacgcttgcacgggcacatttgagttgtgtgtgtcccttcttatcccagacagtgatgtctattggatgtgtggcctgaaaatatttcctaaaattctattggttgtatctttacctgttgattattttcttcaggttttgtggtttttttttttcaactttgtcccaatagtgtacagataagaaagttctggatagtgggcatcactcacctgtgtgccatttactctccttctcttggaggaacttagtctgtgtccatcgtctggcattttgatgagcacaagttagtcatttaggtggctgcctctcagtctaggattgtcttggttaccttatcactggattcagactatgaatcattggccagaatatcacagaagccacactgtgtctttcctgggaatatcccatctgaaagtgcctcctgtctatgtatctgattattagggacattaacttgaatcatttggttaaggtgatgtgtgccaagctcccagtgcaaaaactatttctccatcctaatcagtaaacatcttgtggggaggtacttatgggaagccctgttgttctgccaacttctcctttctagctttagctttcattaataagccttgcttgactctgttatgatgatggtgatgatggtgatggttgcaaaatggggatcatctaatgccaccaacccttgttcagttgcctggtgatgttttgcttcgaaggagaactcgattttctcacttccttactgatgtgtgtatacatgcatgttagtgtgctcttgtggactattgtacatttggttgtaatgttttaatattatttaataggaggcttaaattatccaagatttggccataaggatcctgagtacttttagcagtccctgccattctttgtatcactgtgacagtgtatcactgtgacataagatgctctgggtcccttttgtgttttccagtcccagccatataatcagccaattctccaataagtcttaggggttctttggctgcttattgctacacaagtgctatgtcccatcttttattaacatgaactgtggctggggcatgatggtatgcacctatgatcccagcactgaaggggaggaagcagaaggaggtagagtttgagggcagcccaagttacacagtgagactcttatctcaagcaatagaaaagatgagccgtggcattctctttgctatcctagaataacggataggtaacctgcaccctgagtcaacacaaacaaacaaaacacagccctctaactgcactctagacaagtaaggcagcatgcttcataaacaaacggtcccgacttcagtgagttctcagttatgctatgtgacaagatgaaccacactccctggctggctcctgacctataatgagcaggtctggatataaggtaatatttgattaagcaagtctctccctctatttaatatttctctgtatttgactatattttctatatttaaaactatttccataaggaatcgctggatattgtactcatggcagatctaccatgatccacggcaccattagtaaggtggtgttcctgaaatagtaaatagatttgataaaatttcaggaatgaaaaaaggaaaaatgtaatttcccttctacgtacccagctctttgtgagtgtgtgtgtgtgtgccctttgtgagtgtnnnnnnnnnnnnnnnnnnnnnnnnnnnnnnnnnnnnnnnnnnnnnnnnnnnnnaaggaaggttatgggctgtcgttatctcatctataaaacagcctttcacattcatgaagcccatgataagatggctcaatacaatgaagtctttctggaatccttggaccctgccccgcccccaaatggctagtaatatgttctagtcactgtgacaatgacaaatgccaccagaaacttctaagacccttcctaggtggcagtgccagcttcctcaagactataggctaaccaacatgtaccagtaccttagaaatgcaaacgtcgtatattgctcagaggcactactttttaatacagcccagaattgtgtctaacgctatgcatttgcctggtccccactctactttctgaattaaaatgagtctggcctgtctccctgcttgagtgaggagacagctgagtttgctggtttaggtggcccaaactgatgtccagatgtcccaggaagacttgtggtatcatgggatggagctatcctgctggcataaccagtttgccagaaagtgtgaagaaccttggaagctctaagcagagtagttctcagaagggtcatcagacagaaccctccattgtccagatgaggaaactgaagcccagagaggggaagagacttggccaagatgcacagggaattgaaaatactaattaggcttagaatgtgagacattggcatcaaagaaatcccagagactggaaaggacccaagaatgtgaaagccactttcctttctgggtgggtccctgacaacctgggtaagtggtcagattctagccttttcatacatggacaactaaatgcgtttcaaggcaattcgcccatccgtgggacagttctaactgtaaagaaacctgaattgtatcctttgcccttctctattctttcgggtgtgatttggctctcttggtcccagagagcatacgtactctgtagactctatgacagccctttacagattctaaagtggtctctgtgtctgttgagtgttctaagctatagtctctgcatgtgctactgccattactgagatgaacaaacatgacatggttccttttgagaaacaaacatgacataagcagcaactcagcctctaacccccatgttccttagcactgtggtaacacacacacacacacacacacacacacacacaccaccaccaccaccaccaccaccaccaccaccaccaccaggctctggagcaacttgcattggatcagccacagctgatatcattgccttcagcttagtagaacttaataaggaccctctcagagggctgttggaaggatagcaagagagagttttaataagaatgaggtagtgccccccagcactgatgcttaataaatgttagtttatttctctctccttccctaactcgacatgcttgaagcaacctcctaatacttagcacagaaaatgggataaaaatgattcgcctctgtgtccttgttctccagcctttgcttagataaccatgcagtacttctaaaagtacaggaccaaaggctggaagatgtctccggataaagtgctcgctaggcgaacatgaagtcatgcatttgacatgtagtgtaggatgcatgtataaccatgtagtagaatgcatttgcaatcccaagggtcctaaggagagaggaaaggtgagatcaggagaatcctgagagcttacagccagtgaacctggtgtatgcagtaggaatagggagcagtgaacaatagggaccctgtttcaaataaggtgaaaggcaaggtcctctggactccacacacacactatggcacgcatacacccacaaccatatgtatgcatacatcatacatacgtacacatatatttaaactacatgggccaaacatacacaaggaactcatgcttatttggattaaaggctaaggaaaaaatggaaacagttccctgattgtggaaatgtcacatacttactacccgatccactaatgccaccatcttgctacgtgtcatattttgagatgagaatcaatctacttttattaatctaaagagatgtgagtgcctattgttctccaagcactctatggccatgcaagcctgggagatgcagaacctgggaaggtcattgtgaccccacttggcaggtgaagacatcaacacgatgtgtaacagactgcctcactttaacacgtgtttcttctgtgtgtggctcacctggggtactgtatcttggaggcctgtggtgcctgtcctactgagagtgacactgctgctctgtcctgtgggctctaggggaggcctaaggaaagcaggttagccagggcttgctgctcatccttgtaatcccaggaccccaaggtacgggaggaggatcgggagtttcaaggtcaccagcctggctacatggactccttctgtgtcagttgacagggatcttgaggacccgagccttgcggggtctgaatatggcactggggtctagggaacattgccctctgccatcaagggaaaaattgagagctaccacactgaggttagggtctcctgtgaataagagtacgtagctgtgcacccttttgctgttcccccttgctctccttgagttattgattagtccatttatattggggaataagagttagagcataggtgtggttctgagccaagtagcgatccagctgcccctctttgtcctcagctccctgttactgtggcaattgtggcttgtgagatgctcccaaaagaaaaatgcattgagaggaatagtgggcaagtcagctgtcactcagaaagcttcttctgtagctcttcttggggtcatcaagggtgatccaaggtgaagattcctatcagagatgagtggggaaggagagctttcctgtgagccctctactggcagattagccccaatctggttgtccagtgtccacctgccacccttcaatgaagagagacacaaaataacattcatcctctattgcctttgtgcccagctcagtttccagctttccaggtgatcaaaggcacacttgagcagtttcctttcatgtcagtccctacaggcttcccttgaaccccacactcacctgtgtgggaaccagatgcttgccagggcatcctgaccccactctgctggtggagaccatctggggagacagtccccatgctgggtgtcgagacacttgtcagctggctcaggcactcgctcacacagtctacccaggccgtctctgtgcagggtcctgactgttctgctgtccctgaccacttacttgaggacctgggacagccacacccacccacatgccatgccactgaagctctggacatccaggaataggattcccagcccagtctacaaagtggtcttgattttgttatccacaacctcctgacctctggctctgtcattcaaggctcccttgacttctccaggcctcattgctctctcttataacattactaggaacagtctcctgccacctctcaacacgcagcatggtgtgatatgaggattaagtgaaataacaaacgtaaggcacattgtaggtgctcaggagatgctgttctccatatgtattgatgcattttaaagcataaagctgtgagcaggaactagtgccacagattctcaaagctgatgcagctctgcagaagtatggctttggaactctgaacacacacctatgtttagatcctggttctatggaatgcaaaatatgtgaccttggagaaatacattttcttctaagactcagttttacagccaggtatggtggttcatccttgtaatttatcccagcacttggaaggcagaggcaggaggattagaagttcaaagctaggcacatatgcacacacacacagacacagaacagtatctggcttataaaaatggcactttcatacagttcgccccttggtgcctactttatactgttgtttataagaacagaccatactgcgtgagaactgctcacactacctgcattgcagtcttcaagatgacttgggaagctagtgatggatgccacaggagccattaggtgtataaagatgtagaatgatgaggtgtgtatgtgtgtgtgtgtgtgtgtgtgtgtgtgtgtgtgtgtgtgtgtgtgtgtgtgtgtgtgtgtgtgaagggagaaggtaggtgaccccagatctctggcatggggacgtgagtgggtagtggcggtgttcactgaaaaagcacacacagaggaataggtttaaagggaaagatgagttctctgctcggagtgtatgctgtgatgagtctggggcccaggacagcaccactccagacagagcgagagtcacctgcacagggcagactttgactgaggtcatgagcgtggtaggattcacctaggcctggcattcacagaatgttagtgttgggacacaatgtgacagaactgaacaaaggagatgctgggtggcttcaggcatcagccaagtcctgctcttgtctcatgtaaagttgtagaaggcgggacagaccggcaggagaatcttggcatgtcctctggagttagcagttacccaatgtctcaagagtgtaggagaatctcagctacaaagcacccaggtagaatttctccctcacccgtagggtcagatttcagctatacacgtggatagcttagtcttgtgactaagactgccattttgtctggcagagcattgagataaagggcacctgggttacaaatgttacaaaatatgtcattgatcagtttaatgtgtggattactgcaggaatatgagagacatgggcatgcagtgttgggcgggacgaagacacgagccagtgatctgaagtgctcttgactgtaatgaagttgtatatacttggaagtgaactaaagattatttagccagttcattagtaggaaatcctcacaattggaaaaacggctttagctggagggggaactcactcggcagttgaatggtgtgttcagggtgggtgcagctgtgaggttttctgttatctcacaggaaactctggggcccatgagaccaggatccaggctgggagcttgaaccctggagggagtggacctaggacagagtggatcgagggaacatgagtttgacatcactgggacccagctgagggtcagtaaacaagttccagtcaatgattggatagcccaggcgtgtacttagaccctagccaaggaggttggggtgtacctctaaagggaacccaaggaatattggggaaaaccaaggcaggctctagttgaaatcagaagattaagtgaaatgctagctaatactggattagtctctcactgttgggaacaagcatcactcttctgttggacaaggtattgacaagtagaagataaacagcttggtcagggtccagcagtcagtgtggcaggttgaatgtcatttcagcctgtcccccaagggctcatgtgttgggatcttggtcccagtgtcccagtgctgggagatgctggacctggtgggaagtccttagatcactcagagattaaggcagttctctgggaccttgtgttctcaaaagaccacgttaacacagagtgagctcctgagtcactctttggattcctgtccattttgaatatgatgtcatttgccatgagacctttaccagagctgataggagatacccttgaacctcccagtctatgagctaaataaaccagttttcttcacaaacttcccagcctataggaacagaagcagacaaattttcctagaaagtgattacagagatttaaatcaacatctgtctgtctccaaagccttataacctgtagtcctactgtccccagtgggcacgcagacacatagtaagaaatggaaacagcagcttgaggcccttcacgtactctgagatcacctagggcctcggaatgacatgctccaggccaccctggtcaggcttggtaccactttaaaaaagaatgggtagagagctcgctagggctggaaccatggggaagagtcccaggaaagccagctagggctcaccacagggctggtgtcctccatgctctgagctgcagtatgagggggctggtgttgaggagggccttggaaaaatggacaaacacaaaatgactagttccttccgattagatgaggtttatggccctagatgcgatctcaaatggcgttttgattgctccctaatgatggatagattctgccccacataaagtcgcactcaccaagagtgacatccattaaattgatgacagacatttgagctaaagcgggtggagaactcttggctctagcttctctgagcagtttgtgtggtgctgtgcctgcttcccaggtaaaacccaaagcatcttctaaagaaaaggccagcccagctggagcacccgttccacctgctgtctggacaactgtcggctccgagtgccttaccaggcccgtttctttgtttcctgtggaatggtaacgtgaaacccacagattactaggcatagctcagaagtatttgctgtcactcaccagatgttgcatgttgttcggaatgagacggctgctcccaaaaaacattgagagcccccacttcattctggtagagagaaatttagggcaggactctgaagattttgtgttttaattccctgtctgctgctagttatatgcagccttgggcaagtctctgggcctctcggtcttggtttctctgtttatgaaggacatgcatgtgcacaaatacacacaggtgcagtgacatttccttcctgtaccttaaagggctgagtgtggagagacagtagatgcagggaagcagcatggtgggaagcgaaagatccgcttggagaattgaatgccaggccagcacacccataagtgggtgtgcatgctgggtaggaattctgcaagtgaagaggggcagaggggccagtggaggcctcaggcaaacacacatgaaggcaagaaagagggacagggcaaggatggagacaggctgctggggtgggtgaatcagggctgtcaccaaggaggacatctccctgaaggctgtatcacacatgggtgaccagcaacagatgcaagggaatacttagcactatttcttttaaaccaatagtctgtgataaagctgcagggtgttgtttgggttttttgtcttcttcttcttttttttttttttttcaatttaaaaattacaatttagcttttcttaactgggatcctttcaaagccagttacagtggcaggcgccctcctttccacatggtccatggctctcattaannnnnnnnnnnnnnnnnnnnnnnnnnnnnnnnnnnnnnnnnnnnnnnnnnnnnnnnnnnnnnnnnnnnnnnnnnnnnnnnnnnnnnnnnnnnnnnnnnnnnnnnnnnnnaaggtgtcaggacctatccccacccccactctcacccccctccacgagctatcctgcatcccagcttaaaatccaggtggcaagagctggtggtcagttcagggtgactcagcggaaggactccttccccccaccccctgccttagctctttgccctgttccctcagtctgtacctggcatagcacccctctgtgaatactgaggccctaaaacctgcgaccttccgtcccccacctccttatatccatctagttactagtacgttcctagcaacctagttctctgtgtcgctactctgcctccgcgcagctatcgatgcccctgttccaggccatcaggactcttgtggccatgacactgtcttttgtcagtctcagcctcccatgtggcagtctccagatgaagatcatcagttgcctgcaggtcaagttctgataggacatgcctctgcggcaggcgtcatcacctgctgactttgcaataagtatgtcttctataggcatgagagagtatttgaacacttggtctccagttggtggcagtgttggggaggttcaggaggtacagccttgttgggggaggtatatctctagaggtaggtttggagagtgtaaagaagccatttctagtgtgtgctctctgcttcctgtctgtcactcaagatgtgagctgtcagcttgttcttcagccatcactctcttccataagtcgccttggtcatggcgtttagcacagcaacagaaaagtaacaaagacatgaagtgacagtaagcacttcccagctgtttcctttttgtcccaatatctggatcatctcctcccctgctcctgctaaatctcccttcctcttagctccctaacaggacgttggaagtcatcggcccacgaggccctggtttcttctcactgcgatgagatgcttgatctaaataacggaaaggaggaggaaggacctggtgaggtttaggtacacagctgtgtattttgcctccagaatgttgctcaagcatttcctctctgtccttggacatctgcctcctccaggacattttctatctcgcagctgaaggatcttcctgtaatcatacacatcaattagtttcttccttctcgaaagcacaaagttgccacctttgcagagtatcatcatcctgactccccaaagggatattcatcaagattctttccaatcaggcttgcttctcatactcgggcatgagcttttccctttggacatggattctagaatctgactgcctggattcaaaccctggcttcacaccctattggctgtgttacttttggaaggttaatagacatctctggccctctattttctggtctataaaataagatggttgtgaggattaaatgagatgcagtgtgcagaacagggcctgaaccatagtgtcttgagtggctcctatttagctcgtgagtgggagtcttgtgtgacccccatgagtgtgagtcttgtgtgatatcttgagtgggagtctgtgtgatcataagtggaagtcttgtatgatctcatgagtgggagtcttgtgtagcctcataagtgtgaatcttgtgtgatctcccgagtgggactcttgtgtgatatcatgagtgggagtcttgtgtgatctcttgagtgggagtcttgtgtgatctcttgaatgggagtcttgtgtgacctcatgagtgggagtcttgtgtgatctcttgagtgggagtcttgtgtgatctcatgagtggaggcttatgtctattcctgacattagtggtcattctcttgctgttctccaccattggcagtctcctgaatgtcttctgttctctcctgctttgccatctactcaagttgttctttgcaaccaccctcatcacctcccactttgcctctcagatggcccgtgttgcccttcttgtttggcctgggtcacctacatgacagcagcttcagtcttagctggcctcaggaattgttgtgtacatcaagagttggaatttcccttgagtctcagacctcacagctgttggactggtcccttgtgtcctgcccagtacacactttgtctatcagagtcttgtttgtcctgaagatccacagcccgttcccatgacaccaatggcctgcattgttagaatgaaacgtaggtcttccaatgtgacaaaacatggctctaactatctttgacatctctggtgtcatcataattcagaacttgtccccatgctttccccttgttgctaataacgctctgtggctttctagtctggctgctgaacttcctccctccaggtgctctgccttgcttctcacacaggccttgcctgcttgatgcaaactcgtcataaatctcccgtgcaaatccctgagctcacaggtcaccctgtgtgctgatggtaacgcacagcatgatctctctggtggttccatgaatgtttgtgatacagcctccaatagagaatcccctgcttagcactagttagctggttgagccccaggaccttctagtaaaccctcaattttataggtgaacatggcagagcacagaagaaagtccagtgaccttccatggtcacatgacaggcagaaatatcctagcaacactggagccaaaatccagatttttctggtttacacttctttcaactcagcgaaggctaattggtgcaaacacacataacaaaagtttaccagctttgcctattttttcttttgtgtggcagggagggtacacgtatgttttcacatagatgtacgcacacgtatgtgtgtacacaggagaccagagannnnnnnnnnnnnnnnnnnnnnnnnnnnnnnnnnnnnnnnnnnnnnnnnnnnnnnnnnnnnnnnnnnnnnnnnnnnnnnnnnnnnnnnnnnnnnnnnnnnnnnnnnnnnnnnnnnnnnnnnnnnnnnaccccaccccgattctggcattataggcacatgccacatgcccagctttttatctggttgctggggctagaacctaggcccacatgcttgggtgcagggactctatcagcttcataatttttggagggtaaagttcagtggtacaaatattgcccaatccaactgtagaatttttaaaaccttaagtaactgaaattctgtccttattaaattgctaactctactaaccaccccaccccacccccaaccccaaccccttctatttctgtattcttgccacttcaaattcttaagaatttgacttcttggggaccttgcacagtgggatcctaaagtccttttggttttgtgtttggcttgtttctctgcacagagtgctcaaggttttggtcttatcattcccttccgttttcaggctaataatatcccacttaagtaatgttggaaagccaggctttctcagacgcctttccagaataccactagggggcagtaaaggtgcagaaaattttcaataagcctcctgagtgccaggcaagccagccggcatcccctatgtatctctttcagccatccgagtatacagttacaagataatggatttcacatccgacagcagagttggataaaccaaagataccatcagctgtagtttaagagccgtcttcctcacattccggccaacactaaggcatagaacttcatttcagacagtggcttcagatgctattttggcttaattaattcactttagtccggtggttctcagtgcacacgacagaatcacatattcaggcttcagccagaatcgtcagagtttcagtggaaggtgagggtgaggttgggcccagagacagaagctatatttagcttcagtcgttgagtggaaagatgtctgttaagcaaaaccagaaaggttcagaagataggaattctgttttttttttttttttttttttggctaaagtaatggctgaggggactggaaatatagcaacctcatttcctagacccagcacttgtatgtgcatatgtgtggaggtcagaggtcagaggtcaaatgtcaaagccaacggtccttctcaattgctctttacccgttttaagacaaggtctctcattgtgcctggagcccagtgggcagccagccctgggttcctcctgtctctgcctccctagatctggaatcacagtgttacaccaccatgtctagctttcttatgtgggtgctgggggtcacacttaggtcctgcctgcagagcagttagtgagccaggctgtggcacttttgaacacattaggaacccagactgaagatttggggttggggtatcccagacagctcaggattcaaagacacagttccaagacagccatgttcagggtgaggtcagagcccagatattagtaatggctgagatattaaagtctttggctgattagtagtggcgcacgcctttaattccagcacttgggaggcagaagcaggcgggatttctgagttcaaggccagcctgatctacacagagaaactctctcttgaaacaaaacaaaacaaaacaaatcaaaacaaaacaaaacaaaaagtctttgctataggaatcagaaaaacgggtctttcattttatcttatcaaaaataaaattgtcacagggaacctgaggtgggatcaaagacctaggctctcaccccacctgcctcgctagccaatcatgggaccccaggcgggccccgccccttccctcagcctcagcctcccctctgcattatgagcagatgggatgatgtcggtctccgaggatccttttggttcagaaaattcaacgattctcttagaattaataatcttgatttgtaatgactctggcacagagaggaagaaatatttaacactgtaatgaatgacagagactattgaccatgtagtttaatttatttaaggcacataccctgaattcaaaggagaaaatatcactctgataatatattgaactgttagtatcatcggcctagcaaaagctttctagagggaaaaattacccaccagtgcaaacttgacatttttcacttgctgatccacggctgtcgttcgtccatagcagccatgtttgctgtaaaggctgtgcgtgtggatgcttcggatgaatattaaataatgacataagcgtcaaggtcactgttgcaggaaaggctgtgaggaggttgggcctgagagggagcccgcattgatctcttgtgaagttctgttctggaatcctgctgacgtggaggacacaattgatgggagccattatcaaggctgtaagtgtccctccattgttaaggatcttttacaagacccaggaatcggcaaaagcttcagctagaaatataggccagtcaaagagataagtgcattctagagagtgggtggcctgggtcaggcttgcacagcgaaggcaaaggctgacgggaggccagcgccagaccatcatcgacttctcctgcaagtcgggcactgctcctggggatggctcagaagagagcttccatgccaggagctacagagagcaaggtgtctgtcttcacatgtcttctctgagcatttcagcccaccttcttccatagcttcccaaagcaccccaacaaagatgtctggatggctcaggccttctgagtttgtaaagtatagaaatgtatgtctttcagctccagaggctaagaagtccagtatcaagatgctgatagctggtgaggggccttctatgggacaagacacatccaatgtgctagccagcacacaggagggctggtctctccctttcttatgaaactaccagtgctgtcatatcgctctatgcttaggcttcttcaactttacctgccaagtttctacattaagataccatcaacatgtgcatattagaggttaagtttccaacatgtgagcttcagggggaataccttgaagccatagcctggaggaatcaggtacccataaattatacacaaccacaggtccagatctgggctggccaagtgcctagatggtcttgggcatgtcctgctagcccagatctgggaaagagcagctgctgcagatgacagaacctagttcctgaaaggtccagacaggtagagggattggccaagtctgtgagatacacataataaagcagaaagcctgtttctcgtgtgctagctcagggtttgttactgtgcctggtcctttgtacatctcggctggtcacttctttgtattgttccattgagggttgaaaagaatatggaggaaggcacagggctctagggtaatcaatccaggatttagcctcaacgctgctgcctcccccagttaaactcacaagtttattttctctttgagtccttagcctgctcaggtggtcggatgtttgcctagcatgcacagagcccagcaccacacaagccagctgtgatacttgcttatctgtaatcctagcacttgggaggtgaagatggttgggtgacaagttcaaggttcaaggccaggctggacaagatgctctgtctcaaaacaaacaagatccagaaaggggggaaaagcccttaattctatttgacaagtattgaaggtagagagaaataatttgctctgtaaatgacaccaccagagcttgaatccaggcaggctgactctttcctctcatatgtaacaatggctgcatccctccataacaaccgtgttttctgggagggtttgatgaggtgactagtgtaaaagagcccagtgcaatgcctggcatgtcacaggtaatcacaaattgtattaagctgttgccgttgttatagttacatgacttgttaagaatacaactaagaactggtgaagtgacttgaactcaggtcaacttttctaatccactttccacctcactcttgaatacaagactgaggacaagtctcatgtcactggacccccaggcagtgtcatctctgtggaagggggatctctgccacatccctaacagtccggtgttttccctcccttccaggtccaaacggtgaaagaaggtgacccctcctggaagcccacttttattgtgaaaccggatagtggttgtcagggtgatggaatctacctcattaaggatccctgtgatggtcgcctgactgggaccctccataacaggccggcagtggtccaggagtacatccgcaagcccctcctcatcgacaaactcaagttcgacatccgtctgtatgtcttgctgaagtccttggatcccttagagatttatattgccaaagatggactctctaggttttgtacagagccatatcaagaacctaacccccagaatctgcaccatgtctttatgcacctgaccaactactccctgaatatccacagcggcaagtttgtccactctgacagcgccagcacgggcagcaagaggactttctctagcattctttgtagactgtcttccaaaggtgtggacatcaagaaggtctggtctgatatcatctccttagttattaagactgtcatcgccctgaccccagagctcaaagttttctaccagtcagacatcccaacagggaggccggggcccacctgcttccaggtaaccatgccaaccgccaccctgagttttagccttgactgggctggggaaaggctccttggctatgtgatgaaggatgggtaggattgcattgtcagaggtggggatacacaggtgatggccactctgggattttgtgttaacccccccagaccaactttgaactttctgtttcctaggtgacttggggcaggctactttccttcatttaactataaatctgtaagattcttgtgagagcacatatgtcatgcatacattctttgttcactggacagctgttactgcttacttggggggggggtcgggcattgttgtagaatcctgctgcccaatgccaagaatccacagtggggaaaagccattaaagaagccattgacacagagggttacatgtcgtagaatcaagtaggaaatggaccaagtgcaatggggttgtggaccaagccaccattcctggctcagtgcaagaagtcatggtagtcccactgaaagttgaagagagagatggagcaggaaagaatggatagggatcaccacaggctattctaggtgaagacatgctgctctggaggtaagagggaaatctgatgtgtttggaacacccaaacaagttcagtgtggttagggcacgttttgaggcccaaaggagggatatgagaaaagatgaggtgggggtgagtagatcaagcccacgttgtggagagccttgggggcagtggcaaccatcatcagaggattataaatgggacagatcatggtcagctcagaagtacacagttccatgatcagtgggttatgtattgagccaaggctggctgccaggtgattgctaatgtatgtttctgtacatgcaagagcagatgctggctctgaataggaagatcttgatagacatgaagagaaaagctgagttccatctgaggatgttggatggctagactcggtgactgcggggctctggggaaagagaagagatggtagcagagaggagaagagttcctggggtggagttcttgggctcttggaaagatggatagagactacttgtagaggatcgggctaacaggtaagggccaggatctgaaggcaaatgcctgcatggcagttgaaagaagaggttagtatacaggtggatatttgggctggcatttgggaaagactggtgggttggagaaagaactgggaagttatccactgccgtgattgaaggcatgaggtggtatggacaagacccccatgacacccccagttaacaggaggatggaaagaggcaggcaaccaacaaaggagactgagaagatggatcaaggggtaatgtgttggaaatgccaaagaagagatgctcagaaaatacctgagcatgggcctgtagcctcaaacattgccaggatgtcaggcaagactattcctggaactgtccattatgttcactgacacttgtcctggggactctagcaaaagctgtcttgggcagccagccagtttgtgagagggaaggaaatggagtatggtgtaaaacagctttttaaaacatagctctcaggggtaagacaggggcatggagactaggcacttatgaggcacacccttcctgtcaccagatctgtcagaccaggcaagagaagatacgatggacttctgggatcctctcctcataatctttcatattgttgcatagcatgacgagagtggggtggagggtggggtgtgtgtgtgtgtgtgtgtgtgtgtgtgtgtgtgtgtgatnnnnnnnnnnnnnnnnnnnngaatagaacaacacagaacatatttgtaatgatcacacccagctcactgcccagctccgatgtgtgttcttccatattctcttccccaacccatcctctacataaccactattctgaatggtatgttgaccatttcctcgactttcagaactacatgtggtcatgcatatatgtccccccagacaggacactgccttatctgactcgcttccgagcttcatatcagccccagtgtgactcccaccttctgaagcgcctgctccttcacaggcaatggcccaaaggtctggcccattgctggggctagtggcatgggttggcttgcactggtgcacaccacataagtacacacagtttatcactttttctgtcaaaggagatctgggtgtttcctgactcagctagaagggttgaaggcagtaagggatgagagtgaagagaggggtcagagcaatgtctctctcatagatagacacctactgaccagcccacaaacacactgggttgctccagatccagagactcagggattttgcccccatcagcaggatcatcaggtgaaagcctctggccagggattgagacagtgtgagaagtagtaattgtcccatcgagtcccatccatggtcctatgccaatcctgctctctgagcctgcagctcttaagcaggtatttgcaatagccgtgaggagatggttagaaagggctactgaggaggacttcaggacagtgctagaacaaagaagtcccaacccaggccaccacaaagtgagggtcacaccctgggttcatccctgaggacaagtgtggccatgcctgtttggctattctaagagcatcccatggggccaggcaagcatgaccaaaccacagaggcccagcaaggaggaccgggtggtcattatgtgtgtgtcctgcagtagacaggcaacaacagccaccaaggttggggtagggccagctgtaggggctgaaagtccagatcaggagccactgctttggttagggtcacagctagcaaatgggctcagaacctcatggccatttgccactatttgaccacacgctaaacgcttccagggtgatgagacaggctaggaatgaagccctttctggtatagtaagtactggagactttctcaccacctagtgtgtcttaggttccctctgcacactcacacctgtgtgtgtgtgtgtgtgtgtgtgtgtgtgtgtgcgcgcgcgcgcgcgcgtgcgtgcatgtgtgtgtgtgcgcgtgcatgtgtgtgtgcacacgtgcacgtgtgcacactgggaagtgatgtaggtgaagaggctttaagaaggtgtcaagtggtatctgttgctctgagtgccttggatacgcagtaagggagaggatttggaacctactcagagccaagtccactcctgcttgctctgtctgaatcacctttcaggatgctgttagctgggctctagacacacgggcagaccttgaggtttccatggtatggttctgatgtccatttgccacgtgacctgtcctaagtcacttaactcttcaggaacttagcttcctcccctgccttacagggtcagcacccaactcctgtgagacatggatgacacaggaaacactttgcatactgttgagactcggcacaagtgcaggaagttatttcttagctgggcaggtctttcttgcttgtagcaagacctggccagatggcagcgttacagagcgtaaaccctggccaaccaaattacactcatctggggcatgtgactgtgaccctgttccagccatgaccacagtaatgacttggaaaacatggtggccaagcaacagctggcacggctctgctgtggtcagatttcctgtaatctgctgctgaggaacacagctgccctgtcatttcagcctctgccttgtcattgcccaggcagccccagccacagagcctcacatctgctgtcttgagggcagcagtgtgaccctggcttaaatatcaaggtcagcctgggtgtagacagtcatgtggcagaaacacacacagagggaacacactttgtggcttgaactgtatagttttcttgttctccgtgtctaattttgtctttagccatgaccctcctgttggatgtctagagatagagctttcctaaggcctagtataattctcctcttcctgtgtcctctaccctctctcttaccccacagcctatacacatcaccaggcagaagctgagaatcagtgtattggggtgggggatggaggggctgtcaagggctggggtttccctctcagatggactgggttgagcttcttccagctcctgcttacagcaactgtagctggcgagctcgacaagtcaaccttttctagtctggatttttttagctataagtagcaagcttgtttgtagccataccccagagttgttgcacactccagcaagagggagctgtgtaaaacagcccccaatacacagcagtcacttaataagtgagaatatgggtgtttattactctgacaacagttatcacacctacccacctacagtaaccttgaagttactgtaaatcggcaactatcctcattttgatgttaactaggacattggtgataaaagtttggaatcaagtttggaaaccaagaccttagcctggtgtttgtcgcatcccaatccagctgcctagctcccctgtgcctcaaccttggttcttccacaccagatctgcttcctctccagaggttgtcaccagtgcctccctggttggaccattggtcctctgtctctgccagcctggcctgctcactcctattcactagtttcaatattcagtaccttccaaagtacagctcaagactttctttctctgtaaagcattccttgtccactctgactatgttattttcttcctttgcaatatatcacattccctgggtacccactgagatgagacctgagataggtgtgggccatgtagctaaggacaaggcgaggccagggcctctaaggggtgctccggttagtgtgaaagactcacagagataatccctgctctgtatacatcatgctgtccaagtgctcacatgagatgaggggagagagttaactgtccaactgaaggctcccagaggggatgcccaagtgagttcaaggcatgattgagggttttcccagcaaacaccgaagggtctcacattctcctgtttccctgctaccttactggttgttcttccctggcctcttcctctggacctgtcattaatggaaatatattggaggtccctggatatcaattcttggaaacttgtctttgtacatctaccatctcttcctaaatgatctcatcctgccctgtggctttagggatcagttaagtgctgttgagccctaaatttatattgctaatcttgacctctgctggagctccaggctgatatataccattgctcccttgctcttcccactgggatagctagtgggcaccaaacaccagagtcaaaagcaaacccgcgccttccctcctaaagcctgccacccacagctcttcctgtttctgtaagcaagcagcattcacatagacagaagctggaatcatcctttgctctttcatccccttcttgccacatgcaactcacaaagaaccctgcagtagccaacaagaagcttcagaagcacaagtcaggtgacattgccttgccttgctcaaacccggcaagggcgccttcattgcactcacaaccctggctgctatgcgatttataagatgctgtctaatccatcctctctgttctatcagagctcagctcctaccatgttccttttggccacctactttgtttcagtactcgtttctagaatgctcttgccagcccttcaaacaggactcactcttttactttagttgctgttgacacgtcacttcctgaaatccacagttctggtcatgatggagccacaaagactcacccttaacagcttggctgccagaaatatgtaaaaatatgtatgtgagtaagtgttttgagctttggatggtagaggtggcctactgtgagcccaagaaaaggatagcatcaaagcaaatcctgccgatgtccctgctttctgttagaggcagtgtctggagtatgggacaaggctggcgtgccacacagacctggtgacctcaaggaaagagactggtgatgtgggccagattctggaaagctggttaagtcaagaatgagccccagaaatctatcccaggatcccagcaagtcttagtggagtcctaggccatttgtgtgtgtgttagggtgggcgtggggtgttcatctaccaagctggaaaagaatgacctgaaactgataatgtgaccttctggagctcacacatgacagggaggagttctagccttgaacagagagtccatatctaagctacagtccagaggccttgctggttactcggggtgtttaatgaagacgtcaaagatgttctgtctccatgaattggcacatggattcttcctcagttgacacagcccatctgaccataaacaagattttcaggtatcagaataacccacaaagactgattgcagcacaaagcccagagtcttgagatggattctagatatctgtcatagtgctgccattggtgcccaatatccaactgaagaaatcactaacggtgcacacaggaaggagagctggggacaagtgttcactagattcaaggtcttaatgatgagagaaccagcaagaaaagaataacagaataattatagtgatgcacaagagctcaaggaaaatactatcttaataaagagagagctagaagtccttaaaaagagcaagtggaacttgtaaagagtctgaaatccaagccaagcatgctggtccatatctgtaatcctagcactgaggaggctgaggctgaaggatggaggccaacgggagctgtgccgtgaaatagagaagcagcaagaaaacaaccaaaacggaatcttgttaatgatgtgaagtttcactgcctgggatcaactgaagaaagcagcagtgacctttgaaggcagcagcagagctatgcaaaactacacaggtacaggacaggacaaatcatggaacagacaaggagacctaacccacgttcatctgggtcccaggacaacagagaaaaggcaagcatagaaaacatatgaagatctggtagtgggagctttccaaacctcgttaaacataatggaagttcacaatctaagaagctaaaacaaaacaaaagatgacaaactaaaaacaaaacgaaaaacacaccaacaaactccaaacaggacacatgtcatacacccccactcatacacctccactcatacacccccacctccactaccccaccaccccaaccctacccacaccccaccataagacttacaataaaactgtgaaaaaccagtaatgataagaacagctttacagcagccatggaaaaaagactgattcattgaaaggaagaatggcatgtgtatacacacacacacacacacactcacacacaccctgtgagaggctgtgtgagtcagaagacagtggctccttacctggcctctgccccctgtgccaggcttcgagttcttaccttgctcatggccctctcccctcagatatgtgagccctggagacagcagagcttgattttgagctgctttgttcctaatgacaaagaaatggtgccatccaggaagaagagaagagttgggggtaggagagacacagttaactaaagcaacctggagctgtgtggtgagaacccacagtgagcgccagtgagggaggcggctgtgtgagacagggtccagccaacccttagctgaggccacgccacagggcttgaacctctatgggcagaggtgaggcaaggggttggtcatattctatttgcattctagaagttaccctgacatctaatgccaataatttaatttaaaaagtctgagtttgaaatcagggaaagctaagagctgagagctgagagctgagagaaggttccagaagagagactgggccatatctagaaagcttgtgaaggagctggcaagcagccataaggggtgaagggagaagttttggcttgattgatggttgggtaagggatacggaacctgttatctaccactgtggacaagcagatcggctcaaaacaacctaccttcattatctcagcattcctggtgatcaataagctaggggcaggacctagagagttgaccaggcagttaagagcatttgttgctcttgcagaggacttgggtttgattcctagcacctacatgctggctcacaagtcctttaactcctgacctcagcaggcaccaggcaccaggcacacactgtgcacaaaggtacaagcaagcaaaatgctaatgtgcagaatataataacataaataaatataaaaaccaacataataaacttttaaagatctaggggtataattctaactctctggagaattccaggttagtcagaaaagctaacacagtgagacccctcccctttctcaaaaaagaaagaaagaaagaaagaaagaaagagagaaagaaagaaagaaagaaagaaagaagaaaggaaagaaagaagaaaggaaagaaagaagaaagacaaaagaaatctgggagtaactgatgtgtctttggctccaatctccaggctggccagggcctcagtcctcgaagagcctccctgagggaggtggtcctccaagttcactcacaatgttgacaggcctcaggccctgcctggcaggtgactagataaatcaggtcagctctctacagggcagctcacttgcattcctggtggcttccttcagagtggagaagagcaccccaagacagagccactatccatttttaacttaaagttgaaagaggcacgccatcatttctgcctctttctgtcagaaacaggtactaaatgtagctttcactcaagagggttgagatggctggggagttgcacaaactcttgaatcctgggagatgagactccttggtacattagagaccataagccatgggtagttgtatgtataatttgaggtcccagacctccttgttgagaacagttgattttgggtggtctgtagctcacttggaagagaacattctctctgtagaatgtagcttgaagcctttgtgtgggtctagtcagtcactcaggaccttctcctactcggtctgaagcttctagaggtcaacagcgaagctcaggtggttttaaatgccagggcatccttcaggtgggggccccactctacataagtgttggttgaaaggctccataagacaggagattacacgactgaaaagccacctctccatttgacaacacttgctgtgacaaaactgtgagagagacttggagggagctccttcccttcccaagctgcaggctttcagggtctcccaagagaagggactagacaagattagtgatttttcaaagaagacaaaaaaaggggcctagagagatggctcagcggttaaagacactggctgttcttccagaggtcctgaattcaattcccagcaaccacatggtgactcacaaccatctgtaatgggatctgacaccctctcccggtgctgtcttgaagacagctacttatatccataaaataaatataaatcttttttaaaaagacaaaaatacataaatgtctcttcctggaagtaacatattaaaaataagtcaaagttgacctgatctggccggcttcctccttcctaaagaacactgtctcgggaaattgtggaccaagaaaattctagctttttagtggcaagatccaagttgaagttcttcccagttctttgagtctgagatagttcatcagcaaactggttgagaggaaaataattcagatgtgcttaaacttacaaaaactataatgtgcttgagcttccttagacacacagtccatcaaatgtggattctattgcagaatgggttctattgtgagtcccacttgatggtgcgtggttgtagaaaccatttagtaactatagcactaatgagtgctaatgaatcacactaatatcacactatgaatgagtgaaagctcttgttttacaggtaaagacagtggggcctaaagccacaaagaagcttgccttcattctaaaggcaaagctagaacacgagtcgtcccttgtgactctatggtatgcccatgccacttccatttcttgctgatgtcttagttggaaactggaaagggggctaacatagatcaccttctatatggcgagcacattcctaggtaccacttttcttagccatgattcatgaccctgtagggcttccattttatgcccatttctctacgagctaatgtgctcagagaggctaaatgcctcccctaaagcctgttaaagagctactgagggaagctgagctgagactggagcccagggctttctgattccaaagcatataagattcagtacattcaaaaccaggcacccatgtttagattcttgaatagttgacattgttagatgccaagcaacttattggaggttttgctgccccctcctacagctctcaacacccctccccattcaccagtccactgggcctgggacagagaagagtctaccaggtttgaaaagtataaacccatatttctaagatacaacagaaagccagggcagacacttaaggatgaccagaacgagcatcagtccctgtcctcagcctcatcatctgcagcacatggctcgggccaggtccaaagttacaccgctgatgtcaccagatctcttaaaggcctcatcactcatacccacttgtcatttattattaagcaggcctgtaatacacgcagcatgtctactgatttccaccccttcctttcatgaccatgggaagaaaaatagaccaagggtgatttttcccagctcctcatcctgattgcccttcaccaagacagaagttcattttgaatcattcccaaaaatggccatccagactttgatttcattaatatagatgaagctacagtttgataattatcatttaactaatgcatattctctatggatgagcaaatgggttcccctcatctctccctctcaagtctatagatgaagaggtgtctgcactgtacctctttcttttctgtccgcgtatcctccgcattatttcttttgagaccctggggttgtgtcaacgctgttggaaatgttctaatgttcttccctctctagagatctagaaaccccaaaatctgaggtccatgtagctgaagtctgaacctcatgaggaggatgcaaagttatccaggtggaggactgtgtgagggggagagcaagatgcccgtggcacttggtctgatagacttgtaaaggagccgttcagaggcaagggcggctggatggcagatcacctggggccggtcagtgctgaactcaagcacaggcatccagcagttggtgctggaatgaacgttgagtgcaggcctggcctgtggtggggatgtgtggagtcgctgcatagggtcccatgtttggaatggctctccagcctagttttatgttctgttttctctgtcaggaaagtgttaatgctttttgagcaaaaagatacacattcataatactggaggcacaggtgattggtttagatatgaaagccaacgctctcacacactaggtaggcagttctgaggaaacccacagtgcttcccgaggcccaaactctgcttctgtcaaagaatgtttccataggatctaatgagattctgaatctttggtgtgtcatatagttactgtgtgtgtgtgtgtgtgtgtgtgtgtgaaccaaaaaaaggccgcgttgctggcgtttttccataggctccgcccccctgacgagcatcacaaaaatcgacgctcaagtcagaggtggcgaaacccgacaggactataaagataccaggcgtttccccctggaagctccctcgtgcgctctcctgttccgaccctgccgcttaccggatacctgtccgcctttctccnnnnnnnnnnnnnnnnnnnnttatatcagggtcactcagaggatggtgactgccccattctacactaattcagcgggtgtggcctgtagaatgagctactttgaacccttactcatacacgctccaggttaagaaaggtggcctcaggtttccagaaatgcagccaagaagtaagttcacagaggaaagtggaacaaaggccaagagagaactcaatggactcctaatagtccttgacacaataaaaagcctgttacaaaggaaaggggtcgtcattttatggcacttgaggtgacactgagagagccactatgggaacgcatcccattaccaaggtttctataaaaaaaaagatctgctatccatttggtccaacaagtacacccagaggggcaagggctgtggaggacagagatcagggtcaagtccaagaccggagaccgagtttgaatttattttccccttaatgtccctaataccatactcaattcctgagaagaaattgtggcccgagggaataatgccgagttatgtttgttctgcccagattctaggctttgacattcttctgatgaaaaacttgaagcctatgctacttgaagtgaatgcaaaccccagcatgcgaattgagcatgaatacgaagtaagtgattgccgcacaccccctgggccgcaaggctgcagcgcacatacccctgattgcagggtatccccttggctgcccaagacttgccacccttgaaatttcacagcaaagtttggttcaagtcaaatacttttagttctgtcaaactccaaatagagtctattaatatgagacctttccgacccttggtaatttcccagcatgccattcttctcattttttaaggtgggaaacttagaagcagctgagcctttccatcagttttgacatgaactaattagttagcctcaggagatgaactaattgaaattctatgactatgagttagccacatcgacattcttgagccactaagataaacagtacatttaacagtgcctgtgctgcccaaccctcaccacatatttaaagagctagaggaaatacccctaaaattactactgggtttggagggattatccagattcttttaatttttttcagccctcttcacattctcagctcttacaaaaataatccaagaagtacagtgccaagaataggcatgtggtgcacacctatagtcccaggagtccagagggcagaatcatgagttcaagaccaccctcagctacatatcaagtcagtggctagccttggctaacaaaataaaaccataccaatagcaccaaaacaatagcactattgtttctctgtgtgagttttgtgaatttataaaaggtaatttgcatgctaatatggaggggcggtgtaaaagttctcttctatggatttgtataggccacacatataaactgcacaaccatttgaactagttggaggcagtcagggataagcatcaggactggctcacagttcggctctaactcggcatccttaccttccaagctctctccaggagtgtttgaaaatatccccagcctggtggatgaagaggtaaaggtggctgtgatcagagacacgctgcgcctcatggacccgctgaagaagaaaaaggagatccagtaagtctctagtgtgtcagcttcctgctgattccttcatgtctcttcatgtctctgctctgggtcccaagtgggtgaagtaacttcttgagagctaaatgaatagtccacacatttcataaatagtcccacataagcagcagctcaaaatcaggaatggttggggatatagctcagtggtagagcatgtgccaagcaagcatgtgtgagaccctaagtccttggccatccaaatcctaatctcccatttcttcagtgacaggttctgcacttgcccaggactgtttgactggcaagagagtggtagcatgcaggagagaccccaaagggacacggagagagaggggcttcagaggcctctgccctccctctcggtgctttacactcttgtggcatgagctctgaggtttgtagagtagacaccatcgccttctgacacctctagcacaggtccaaattaaactctccccatggggaccctagggggacaataaacgtccctgcttcacttttcatgaaagtatccttgatatgaagaacatgtcccttggccagttggttctgtttgtcccccaccacacgcacatcaggttcccacaaagtgtttgttgttgactgagtcttggcagaaacccgaaagcaggtgtttcaagtagttcttcccatattcgtgatgtactggactgacccaaaagctccaagacctagcctcgtggctcgaggcaaggaggagtgctgacttccccagcaagtggtggttgttaggttcctctgctgagactcctcatccatgggactcaagccccgatcttgcttgagtagccttacagccatgcttctcaccttcaactgcacctgagagcctcccagagcagctttttaaatgccagcatgatggcctccaccttcagccacgctgtttcttaggagtatggcttggaggtttgtccacacatttgcaggttccctgggtgctgcctcgtggcaaaccatggtcgagcaaacattccttgcagaaaatgtgagtctataagattggtcatattatcttcaggcaggctgggtgctaactgttcccctgatctgtcctgagaacaatgtcaccacaaacattcacttctgtggtttgcatagccagttctgtctgtgtggcctccatggaatcctgcttcggagatgaggtccttgggccaccagatccttagagctggacatccatggctggacagtgggcaaatgatagggccactgactagacacacacggctactctctctactcaccctcagaaaaaacaccggttagagttgcaatttagtcagatgaattgccataaagcacactccttaaaaatctttcctgcaatggttattgatctcagcagtcaagatgagatcccaagagactttgtgttccacacggagagaattaggtggctttctgcagcatggtagtgcagattattttagaatgaccttgacacattggaattctgacttcttctatgtaaacaagaagttcaaaatccattgtgtggcctgagcatacttttaaattaaaagttttttcttttgcaaatttcctacatgggcgctatgtttacacattttccactcactctctgcagctcctcctgtgcccttcccatctctccatctcaatagtcactaccacctcctttagtaattatacacacacacacacacacacacacacacacacacacacacacacacacacgtgtgtgtgtgtgtgtgtatgtgtatgtgtgcgcttagacctgatcacttgggattggataacctatcagagggctcttctacggccatactaccctgaatgcaccctctctcctctgagctcagaggttaaacaatgctcagataggaggcctgagcgttctttaacctttgctaccgagcacagagaagcagaggttccccccttcacagtaaagcagcacagggaaacgagttttcttctcctcctgtcttgtttcgagttacctatacaatccataagagctgaagatctgaaatttaattaccaagaagcccaggatcattgattgggaaggatgaaagaggcattttataacttatcaagtcataagcagcagcagcagctcatttttaatttacaaagcattgacgttcgtatcgatatccaaggacagaattatcagggctctggcttcattcctaatctagaaaccctttcatctctctctccttcttacctggagcataaggaggtgtgtgactagctaaacaccattttttgtgatttttcccttaatttcacctttttactttatttttagtcagcatccacgagagtacattgcagtccgcaaagtgcataaatatataacacatgttattgtggtaactttaccagggttgtggctgaaattattctcagttcctatgactcaaggtaatgggacaaagcacaaggtgggggccatagaaaatgtgcagggctgtggggccgaaacctgtaggtgcagttctgagaccactccattacatctgtattgagcgacgtcacagtagaattcagggccagaattaacctgcagtagcagagttttccatttctttttgctgttgtttgtctgttatttgagttgggtctcactgtgaagtctaggcaggccttgaactcacagtccttctgtctctgtctccctagaggcagagggattacaggtgtgtgttgccatgcccagctctagagcctgtggcacggtccttattagttcctgcttggggtgtttgttatcaagacagctgggggtaggggggattttattggccccacacaatcttaattaagcagatgtccctcaaccctcaaccccaaggcttccctggaaaggtgccgaagaactataagaaaggtgccagcacgtgcctgtacaccctgcacctccatacaacctgggtcctgtaacccctggggcctttcctggtgaggctgagaacagtctagatgttgtgtgtgcagaggagcctgaccccagtgactgccttctgaacatagctaatagcactttctttgctggttcatgagggtttctgcctgtaatctcagccctcagaggctgacaggattgccacagattcaaggaaaacctgtactgcttagtgaatttttgcctaggtcagggctataatatcagacgatgtctcaaaaaatttttttttcttttgtggctaagagacagcattcagtcttcactctgtagaagctactactaagggcttcagcaagtcacatagctgtcttgagcctccaggagtcttttctacataatatataatgacatgtaaataaaacaacagtaactacattcaaatgaaacaatttagtgggcacttttttatttggtttggtactgttttttgagaggcagtctccctttgtgggccatgctagcctggaacttgcattcattcagtccttgtggctcggttccctgaggcttggagtcctaggtcaagtgccaccacactgttgacagaagactctttctaatgtgcattttactgatcggcgagaaaacaagccaaatcaaggactgactgctacttttcttcttgcagcattttgagtttaaaactagtgatggatcctaagtctgaggtggagagattaccatggacttccacagacaccagagagggtgcctggtggacttgtttccaggcaccaagatatcactgggacttgtgtgtttgggaggttaggagaaattgcctttggagtaaagcagggagacaaccatcacagcaaacgaaggtgactggaaactttttagtagctagaaactattgatttccctcctggggctcagtggaggagccctaagaatgtggaactaaggaggctggcacttaagagtctggaaacctcatctttgtgaaagtaaaattcatatgctgtaaattttaaacgtatacaccttgagggcctgggttatagctcagtgataaacagttgtcgagcatgtgtgaggccttatatttgatccatagcaacccctccccgaaaaagcagaccatagcaacccctccccccaaaatcagacaatccagtgatatttagggacatttggtacatgtccagtgttacagggctatcagtctatctagctccaagcatgtctgtcactccgtgagaaacccatccctctaaacacccctgcatccccagtcctcctcccgccccccctccccgccacccgctgctggccattcccacccttgagggctgcctatctgccacttcctgtacttggtgattttgtttttttaaaacagaatttcacaataagtagtcttctgtaattggcttctttcatttgtataatgtccctgaggtttagcaatgctacagcaggtgttagagctttatatagattataatctgttatatagattagatacactgcagtttggtacctgtttgtcagttgatgggcagttgggctacgtctgctgctagggttaacttctgatttgggtctcctatattagaggtcactttcacagaaggaattttttttttctgccttacggagccactagaacctctgatgtgatcagaccctcacttcattggcagaggctcagagatcactaccctagtcatctgcctgtctcaagatgctttctcccagacatctaaagaacattgacttggcagcggtgaacttggcagccagggctgggcgaggtccttaacatctcatcgtgctctgggctcagccgtgtcacttccttccctgagggcactgaaaaatgctggctcctgggtcaccaaggggtcagtcagtcaggctacactttcaaactacccgatggtgacagccagttcctaagcctcggtgacagttgatccaagtgatggatgaaggcattccacacccatgcctccccctgagtaacctcttcccacccagaaactatgctggagaaggttcatgagttgttccaagtcacaagactcattagaggtgaggtagaaatgaccagagttccttactttgagatgggttctgctgcacattgaaagttcagcatcaaagagaaagggaaaatgagaaaaaccccttttctcaaggtattttggttgcccaagtctttgttttgaaacctatcagacatcgtccccagctattctcagaggaggtcctagtttgggggaggtacgtctaagtccagaggggccactttacttgctttcctgtcctgaatgtctgtctttctggtaactggactttccttgggaattatagccttctggaatcccagaatttataaagtgtgccagggaggcaggcgcggaggaatctgggggagattttatggagcctgtgatacctcttagtgcctgggttatactctgcttgcctttgattcaactacagctgtttgatacatgacttatggaagcccagaaggcccccttcccacagtaacttggcacagtctactcccatttcatttaccccttctcaccataatagccctgctgtaaagaatggagggagcctgcctcggtgcgactgattgagatgtccactcttcttaccttggcaagcatttctctgggctcctttaccatcagaaccaacaggtgaacctccaaagcaggtagattctacatagaacccaggacaaaggggaggcattctgagagcaactgagaagaggaacctcccaggcacacagttggcatagctgggattctgagtgtgaccaaggagtgtggctttgtcctgtcctcgagaagagggaggaagcacatgaatcagaacgctcataagctcagactcctcccgcttgcattggcagtactgagtaataatagaaatgatgaattcatttattaaaaggcttactatttttattttatgtatatggacgctttgccctgcatgtctatgatgcagtcagtgcccactgaggccaggagagggtgtcagattcccctgaaactggagttagaaatggttgctagctacatgtgagtgctaggaattgaaccccagttgtctgaaaaagtagccagcactcttaactcttgagccacctttccagaactatgtgcactaagcgtgccatcctaacaaaaggggcagcatcctcctgctggtgatcatgcttctgggaacagactcttccagaggaaccatctccctctccaacagactggtccatctgtgtgtatacacagctgacctttggttgaaatcctgaagttcagctgatgccaaagaattctttatgctgaaccccaaggaccagcatacacagatccatgtgtcatcgaattaaaaaagtcggggtcaaagtaaggtgactgttcatatgttcatttgcatttcatttgcatcaggggtgcattagagaaacaagattcctttatcttgagtgtttgttgagcacttactgtgtgtcaagaggaggactccagaagcaaattagctcacaggccagaaggggaggtgagacccatacataacgatctgcaaggtggagcaggctaagtacagtggatgcaaggagaaatcgtcaagaaggaagagcctatggaggcagcatttcctggcaggaagaacttctaaagcaggtgaagaggcagcgctgcagctgaggtgtaagtgagtagggcttgaaatacaaagacaagaggaaggatgtccctgggggaggaagcagccgcaggaggctccgcggggagttctgaagagttcaaggaggctggagaggcaggtgcaggaagtagggtgaagagaggagggaggtagaaggagagaagggccatggaagcccagagcccagagggggcagcctggtgtcagaagaaagaatccagagcttgttttccgagtggaatgtgtggggctttgaaggagcccagaggtgacacaggaccttgtgtatgcgtgtgccattcctggaaagaaggccagaattttattatctaaggccaaagttggatgctccatcgcccaaccctccgaaggttggggaccttgtggtttgcatctacgccgcctgcctggtcctcgaaggtctcaggctccggtgggttgtcagtaatctagaaacatgtgggtgcatttccatgggaaaccagacaggacgtgactaatgatacgcacatttctctgtgtgaaacacgccaagtcatttccatctcaaaatgtggaaatgctgagtgaggagtgagcctctcctgtgtggagtctgctgagggagccacttctgaggctgtcaggaaaagtgcatttcctgaagagagtcattcaagagggccatcaggcagcaactgggtctctctaccacaggtatgcaagtgccccaccccctatctgagtagagatgggaaactggatggacataaagccagtcagttaacattatggataaagtgcttgccatgcaagccccagggatgggagttgagactcgaggacccacacagaaaccagtgtagtgtgggatggccggccccctgtatggtagagaatatggtagaggccacctgtattcccagaatttgggaggagggttctcagtgagacagctagctggtctgggtttagaggaagaccctgccccagtgaataaagtggagacctgtctgtttcttcactgtaagctagagcagggacttgtctctcaatttatgtgggctaagcaaatgagcaggtgattctgtgtgtaaaaaacctcagccaaccaggaagtttcttgcttttccgtaatgttccaaaccagaacggctgaagtgtaagctgcggtgtagagagaagttagatctttggtaggcaggattatcatcaaaagtcagacaggggtttgtctccctctacagataatgaccacatcgtctgagggaagagagagccactgaggtcagagagagatccactcgtggcttgtgtgtagatggaaagcagagtgggtaagcacagggctcggcagtcagatgcttcaggggtaaatcctggctctgtcatttatagccataaaaggttttgtctccccactctgcttccttcatccataaaagggagttttgcaattggattttttttttttttaatctgcaaagcaatgaaaagttcttgctttggagggagggagaatcttgcttattcctgggagagcccttgctatgggaaatgttcaatctgaatagttttaaataagtggaccactgtgtgtgtgtgtgtgtgtgtgtgtgtgtgtgtgtgtgtgtgtgtgtggtgtgtgtgtgtgtgtgtgtgtgtgtgtgtgtgtgtgtgtggtgttcaggggaaagtatggaagaagaggcggtgcagtaggaagagctacggccatgacaggttaatctttggctgtggggagggatttgatttccctctaattatctgctagattaaaagaaatggaagacgagaaggaaggtctgcttccatgtccccagagccctgggttatcacaccaaatggtcggcaatttctccagctgctttctttcctcttttcatgcaatttccatttcttccttcactttcagcaactctcaaggcagaggctaatgtgtggggcgtgggagagggcaggatctgagcagttcagagcagtaggatctggcctcatgctcgcttgtctactacccctgcacccttgcaagtcagggctgcctgtgagcagagcactactccacagcccctcgggctgcagagcccgctctccctggccggtggatggcttccttaacgttgagtggatcccctcttcctccagactgtgctatcccctgcagcatggaagctgctagcatgtcagtgggtgcacaggggaaagctggtctgcatgtggacctgaccagaggctgggtcagtaatgcacctgaacctggtgaggaacagaatgcagtgggagtgccaacaaggagaccagctgggcctgccccagggaatgtgaggcagggtgaggtggcggagagcctcagcagaagctccagcacagtcctaatgaagcttcttgggtaccagaaaatgggtaggtactattgcatccatagcgatgtcactcatgaaactggaagctagaaacgcagctatgccccgccccagacagctatgcctcccatggaggcatggactgcttttactcctaactcttagtttctgccccacccacagtgccacagcagcatgttcagaggcctccttgctggctcagtccctggacccagggacatcttgtctttgaggttcctgtggtgactaatattgacttgccaagatctaggatcacccaaaaggcaagcctctgggactgtctctggatgtctagactaggttaactaggttaggaagatccatcctgaatgtaggctggggttctggactaaataaaagatggggggcggggaaactgaatcccagcattcatctctctctgcttcccgactgtggcgaaatgaccagccccctcacactccccgctgtgccacagtgaactgcaagctcatgtgttgagccttactaaaccctgccctcctcaagctttcctctgtcaggtgctttattccagcaacccacagtggttgcctgtaacgcactgtagtctctcagagcctcacagcagctttggcatacttagggggcacttggctccagctgtgcgttgccccgtgtctgccagggctgggggtggcgaaggagctgaactctggtgcaggggtggagggcttctccaaagcacttcaccatcactatcatttcccatacacctgcaaggcgctctgctgtctcacagtcattccagaccggttactattaagcaccctccgcagtgtgcaggaggcatcccgagagtccgttctttaggccaaaagtccaaggtgcaggaaggctgtcttcttcagctctgggtcttaggaccccatctcttgctgcaaggaagaataagcctgtatatgaaatcagctgaggtgggacttctacacacaatgaaccctgtaaaatgccgtaggggacagagactagactctgtcctccaaggcctgattaagtagaggatctggaaatcctctcttaggaaggaaaagggatgcactgaggatgtctcagcttagaggagagagagccaagagcagaagccatgtgtagcttcaaagatcatagggggagatggaataatgtctctgcaggtgccagtggcggaacaaggagctgaggctgaagttggaggtggagacagtaaaactcaggtgaaagaaaggaaaagcaaaaggctttcctttgtctgcaatgctaccaacagactcaaaggagtcacgagttccatgcagcctgcagctggaagtaaccaagccaaggtcaaataaggtggagtaaaggaaaggcagccctgggatgactacacatgggttcagagtctgggcatacaatccagccaatcacttaacctccctaaatgccagcttccatgctatacagtgggataatggtggaccggtgtctgagttgcacatttaactggagtattactcaatgctgaaggagaacaactcaaagcagccagggctttattagtcagcttcagaggaatcacacccactagactccactgtgatgatgcagagcctcatggtcagcatgtgctatagcaaagccaccctccttataacagcagaaggaagggcacacaatatcacctcaagagcgggccctcagtaaccggcctctgcccaccagcctctactttctacagtttcccccacatcccaggagcccaggaagtatgcacccacctatgaatgagcccgttgatgagaccaggaccttcatggtctggttagctgggccctacttctgaatattgcaacactggggggccaagccttccattcataagctttgggggacacattgtagacccaaaccataatagttattaggagaaaataggggatcagaacagctctcagggtacatcctctccagaagtttctatcgggttcttcctaggcgtgtggctcatgttacctgcatgctccttgtccttgtgataacatagaaagagtacaattgagatcccagccgtctgccagcctctcttgtctcttcccactcctgattccaccacttcaggatgagggtggatactccacacacacacgcacacacacacacacacacacacacctccaaccacagagtctctaccccacctatccctggctttaggtctgtcccaccatcagacaccctctgggaagcgatccttcagcccctcctccggggttcggtgctgagataatcaggatgcctcataactatatgtaagaggtggacagtaagcctggggaaggacaccctggacacagcttcccaatgactccaagagcaaggatgccccagttcataacgcttgccaccagagcactgagaacaatatggagctgcaccataaactcacattttgttcatccgccttctttccctgcctttctgtgtgggtttcttaagacaatcaaagtattaatgattgtcaaacctaacctttaaggcaccgtcacatccatttaaaacacttcttctaataagggagaggttgcagccccctcccccaccctttccattctcccgcagctggtttgcaggcaaagtcctagatgcattcttaattttgactcagcctttctctccagcagaacaattgggggcgggggaccggggggggggttctctaggcaacagcaacaattctgtctcatttgtttgtttggttgtttttttttttccttcactgtaacacagcagcttgcaaggctgctgatttgaacctcggtccttctaggaacatgtccttcctttatgatcagtaaatataacttgcagattttagccatcaaattattgaatgtggaagtgcctccctttgcttcatgactattttaaaacagaacagtagacaaatcctaccttgctcccatatttcgctggagctctggcctcctcgtgtttctgttttatccaattgccctgaccagtgagctctcctttcctctgctccctgccaggacaaggccaagatggccatggaggacaagtcatcctccaaccccttagtttacccttggatctccaaatgtccttgctggaaatagaatttgaagcaatccctttttttacagactgggatgttgtagtctgtgctgccagaggcagaaggtttaagagtcctctgggcctggatttgagaacagcttttccccttgctctctgtgaaatctggggcagttgacttccctgagccttggtttctccatcagtaaaatgtctgtaatggtaaaaagctgcttagcaggaatgttgcaatggtaaagtgagccactgcgtctaacccacggcacacactgcctggatatgggaagcatttcatgagtggtaattgtttgataattagcctgtttgctaatctcatttactaccacagtgctgaacacataaggctaatatcactagcattaacgttattacaatcctcacaaatagatacatacagttgtccttcccagcattccccatggtaccaaaacctgtggatgctcaagtcccttacatagaagagcagagtgtctgcgtgtaacccacatacctccccccatagactttagatgagctgcagattccttgtaatacctaatacaatgtaagtgttgcctatgcagttgctatgctgtattgttcaggaaaggactctttgaaaataggatattcacagtcagtaaaaatgtggcttctttcccgaggatcgcccatccttggttgaatccttggacacagacctcacagatgcagagggcaaactgtatacaagtttcctccattcaagtcatgtgtattttattttctgaagacaggaatttatctaaacaaatggatagtttaacaagagttcagcaagactgaaggaagtcaacagtgcccatgttcctagtttaattaacatgctccccgatgcaaagtattcggtctgttcgtgcctcacattgaaaatgcatccctctaatttccatgaagtttttgtcacactgcatgggcagggacccttaacacaggcagtctcctggggaaggtagctctgactcagctaggaggcaaggtcctgggctttgagggtcccaggcactctgaagctgaccttggccaaatctctaccctttcccggcgtgaggtttgctcgtctctactctctgccgtgtccccaaacccgcagcttttataagcacgatgatttatcatttggaagagagagataaaaataagaaggaagatttcatcttttaaaaacccttggactctgcaaatttcgctggttgcttttaaaccattagatatgaggtgccggatattggaggccagcctaattgggagctgtagctcctgtctactgtagctgtgctttcgagaagtgtttctgacagtctctcaccaccctgccacttgcttccaactgcagggatctgcttctcctgtggcagtcacaagaaacacttcagtcctgcttataaacgttaattagtttgaagaagagaaataggatttgtggttcttaaaatagttgcagatatagaaggccacttcccggtgttgttgtaatctggatgcttcataaagataccactgtgaggctttgcgcggatcctctgcccaagtttatgactagcatcttccaaattttcgagctagtgtgtgcatttagggaagagattggtcctggtccctacacttagctattttagatgtgatctctgtgtctcccatggtctggctacaggttgtaccagctgtctatgaggcatctttccgttgatgttggaagcctgttcagttgacctttgattacagtactacgaatacgtagtgttggtgaagaccagacaacagtgtctctatgagtaatattccagatatgatgctcatacatgaaatcccagcctttcctttggaaggcagaagaactatgatgagttcaggcccaacctgagctatgttgtgagtttgagatcaggagggagatcttgagtctccctggctctaccactggcttgctctttgatgcatgctatgagccaggtgctatattgggcctgtggatgcaaagataatattgtgtgtgcagctctctgcatctcctcagctccactgctgtgctgttgttttattttttatgtgtagggatgttttgcttgtgtgcatgccttgcatcaaatgtgtgccatgcccacagaggtcagaagggagctttgggtccttggaactggagtaacaggcatttgtgaacagctgtatgggtcctctcctgggtccatcccctggttagttttaactgttaacttgacatcacctgagaggggtgtctcaactgagggattccctagaacagattagtctgtgggggattgtcttgactattattaactgagattggtagatctaatcctacgtgaaggtgatcccacttcatggactaaagcctgaactgtctgagagcgatgagtcgtagccgagcacgcagcaagccagcatgggtgtgtgttctgtctctgctcttggctgtggatgcatagggagctagctgcctaagccctgccttgactcctctcagtgatggatggaactgggacatgtaagctgaacaaacccctccctcccctagtcgcttttgtccagatatttcgtcatagccatagatgttaaaccagaacagctgctgagggtccttcctgttcccaaaatccatcaacgctgttattggggcattgcagtcagtcttgggctgtcacccagggcctcgctccagcaacaggtagttcctggacagggtccagataatagaagccccagtaacacttggcttgtgagtgtagtcacaccccacatgaggtctgttgggtttgggagtttgtgtattatgaggactttcttgtgtccaaataaactggttttagctcctgcttggtggttggaaaatatcggttcttggcacttgttggtattcaggttaccttatactgcaccttagattctggcctctaaattggggaaagtttagtaccctctttacggtcagtgcattcatttggatttatgtttcctcttctggtttgtttcacacttaagacatttttgtaatattactcatccccccttttcccattaaactatgtggattaatcagagttaagaaaatcaccctcatacagcttaatatttatttatcacacacctgaccatgcgtaagcctcttgtaaattggaactcatatggcactgtaagtgaactataccattccagctagcctatataaaagacacacagtccaggtattttatttattttatcacaagccataagcctaggtctggagctattctaactcatttcccagccatttgtcccttgttacttgttgtttccctggtccatctcctctcatactgccgtcctccattcgacacatcctctcttctttcctcttccctctctctccctgcaaccccccaccccaactcgatcctcaagccccacctttctccctctaaagcccaatcacaggctctggcattttattgatcagttaaattggggaacaaggtttatatagcatcactcggtgtgcatgagggtctgctcatcagtgaggacgctggggggtgggggcagatcttgagagccagtgattagcatcagaatacaaatagcatcagaccagcgcaccacctgggagcatggagggaagccagaggagccctcgcttccacctagcttcagaattatttgagaataagataaaaaaaaaataaagaaaagagaacctgcatttcaccctcattatggaagaggtaacggggtggggggggcgcttcagaaaaatgactcttccgatgttgaatctgagtgaggttttctctgtaacccatgtgcaggactgtggggaaccagagtcaggcctgtagtcagtaggaatggggaggcagtgggtgtctgggcccccctgcacactgtcttcctcgaccccaatcctgggctgaaatgaggctcagagaacagcacccctgacaaacagaagcagacttaggttccaattctagtctcccatgttcagccatgggatccccttgcccacactgcaccccatccacagaaggagccataatggtgggttgctgtgaaaatggagagggctgatagatggatgtgccacccttgtgtgctcaatatataacaataaggcagatgacacagcagcacacagacttcctcggtaaatggtatagatttacataaattgtttccatataagtataaagaaatactgttatgttttatgacagtttttcttttttttagctaatctggaattctttttgctgtttgttagcactacttatttcaatagccgggcacctggtgcttgctcccaccttcctcctcgttagctcgtacaaagaaggatcacaagccagaaggaaaggagaaattaaattaatgagaaacctctgtgcatctcgaatagccattctctgattctatttttatatgttctcctggaagctgtcacataattctgtagcagccatttcaaagcatttgtgccagttaatttatgctgagaaatcattggtgggaatttgacacaggcctggcatgtccgtaagccatcaggcttcaaaggacagtgccggtgttagaggcagcccatgaggaacactcgggaatgaaaagaagtggacacccgtggcttcttgctggctcctctgtcctccctgtcatcatggccactggattcactgagggttactttagtcaggaactttctggtttaatttagaccctaaccctaccaagtatcgtgatgccatttgactgtttctgtgtttgccccaggacttgggcaaagtcagggtttgaaccaggcttggctcatgccagatccctcgttagtctcactggagctgagctgagactgatgcatgcccagagaaggccctgtaaaggcccctgtggcatttgtgctatagttgcttggtattaatcaacagcttccctcttcccccaaaacatcactgctaatgtgttgctccagcctccttgccctttaaaaatagtatttctcttcctcccttgatcagtgtgatgtgggaactgaccctacgatccaccccaccttgtgtcttagggagggttctgtctccgctctccagacaggctagtcagctctcatagttagaaggaatccttaagtcaccttattttggctcatgattttggaagtttcagtacaaaatgggttgtctctggtgtttatggacctgtgatgaggcagcacatgtggtaaggccacatggaggaatctgctcttcttacaggggctggggttctgcctctgtggttaaaagcacaagctgctcttgtggaggacccaagtttggttcccaacacccatgcagggcggctcatgaccacctgtaactccagctccaacagatctggcaccctcttctggctgccagagggtggtgacatgcaaaaactgcattgctggaccacttgagcaactggcaagtagcttcaccagagtctcctctccctgcaactgcacactgctcacataattgtggggatggggctggtacccttcttatgagtcttgggaaacaccgcctcctctctccacgagggtgcttcagtctggaagaaacagctctacaataggagtattatttaatatgaccatgtagaccaaaatgaggagtaacagaagacaggactgtttgtttgtttgtttgtttgtgaccagcaccagaaaaagctttgtatagtcaaatatcttctgaaaatgggacctgcctgtgaggaccctgcaggcttgttctgtcactggcagatccaagcagatggcagattttggaatggtggctttgataccacagaccctgtgtaggtcatctgagctgtctgaatgcccagctctctctgtgtgtgcatgtgtatgatgtatgtatgtgtgtacatatgtgtctgagtgcgcacacacatgtgtatgtgcacatctgtggaggtcagaggttaatcctgagagtactccacatcagtctccacactagtttttgagacaggtcctttattgaacctgggactcagcagttccaaagccttaaggaccctctgctccccctagtcaggtgcagaataccactgcgcccagctttccatgtgggcaccagggatgcaagcataggtcctcatgcttgggcagcaagcactttgcccactgagccatctcccccacccctggatccaccactactgtgaacgtgcttcataactactatgctcattgtggtttcactgtagttaccagtaaacacgtcatccaaccagtctcggagtccctagagtttttacttaatactagcatgtgagagtaaatgcttatccaaggaaataattagcaaatcattaatttcctccaaaactgaccctgcagcttaaacttgggtcttatcccaagcttggtacacagtagtccccaacttaaaatgctctgagagaatggaggagggaagactcagtgctcactgctgctgcctaaggtgatagtcactgggatactcagcatgctaattagagttcatttaatgttacacaatcaggacgcagacaaggatgccagcattagactcgggagatcggcccggctggcccgtacatcactcccactgcaagacgccacatttctgggcagatgctcttggtgagaaatgctgagagtgggcgtgtccaggggttaggtcctgagcttgaatcacgtggcatttctgtctgtactcccatcacaggggcgggctatggggtactaagaaaacccacttccgggttgcttctctgtgttgtccattcagcagtggtgtcgggcactcgctagcaccatgaaaggccacatgtttggcaggtagactaagggaatgcagggtggagctccagatccctaaatccagcctgctctgtcacttccagctctgtgaccttgggcaaggttggcctttgtgcctcagcttctgtgtgtatgtataaatcaggagaagacccaccacatccactgactgcaaagatccagattccatgtttgtgagtccagagactggcaggtggaagggcacagagtaaagcaggcatcaacatccaatacttttagagcccttagacatgggagagattatccaaccaacggtagacactgtgtataattgctatcatttgctaattataaaaatgttcataaagtttccatttttccatctttgtaatattgaggccattttatcttttgataactattgactaagtgatggtcagggttccagtcaatgacaatccttcctttactgttagctccacgggtcaggacggggagctgacccacagtcattgctctggctctttcttggcattgctgcgttctcactggttaagtgtgggggagatgtaaaatgggggagacttgtcactacttcagggtcattgagagggttaagttagtccatctaagggcttggggtatgtctgggtgtgttgtagctatggaacaaagggcagttgtgtggcacacagctaaggacatcaaggtctgtgcttggtggtaaagcaggtgctcattaaatacaagttctttcattcctttgcaattctctctcccctctgccttccactagcacctgccactgtgactgggcttcccagctgtggagctctgctaactggcagaaccatgttggggacagaggagaaatgcctgagtaacttctgttactgacacctgccactctccaccaggaggctcccaccaggactcctcacagacagctaaggcagggactggctgccaggcgctcttttcctggcaacaatttccactgggaccttgcccaccaccgtttccttttttattgtcataaagtaattgagtcaaattcctccagccaatagcagcacacaaaatgcatctgtgtctgtgtggcagcctcattaaaattgcagaattatatttttcctactctgggggcttctctttctgaattaaaaaaaaaagcaacaaaaaccctttctgttttatttagctatttggaattggaatctttctcttgatacaaccttttctctgtttattcatttgttgggagtcaggtgagagctgagccatagcgcatgtgtagtggtcagaagagatcttgtgggagtcacccttctccttccatcatgtgggttcaggagcccaggctcagcagcaggcgtctgctggctcagtcctctcaccagccccctcagaatcttcccgagtgtgttatacacctgcttccagaaatcaaagaaagcaatttgacatttgttttctctttccttgttgccttggaatgaagagatgtgctaataaactggctttcaaaatacaaaacaaaacactccacactcctccggttgtgtttgcatttcccccacggtgtaaatactcttccactgtggttcttaacaacaagcttagaaagggtcttgaatattcataggctgcttgtaaaggaatggaagcgcacagccatctctgtagccaagtgggaagaacaggctaccaaactctggtaggcctggctttgggactcatttaacacttaagaactggcttctacatgataaccgccagttgtgccagcaccatttgttgaaaatgctgtcttttttccactggatggttttagctcccttgtcaaagatcaagtgaccataggtgagtgggttcattctgggtcttcaattctattccattggtctacttgtctgtcgctataccagtaccatgcagtttttatcacaattgctctgtagtacagctttaggtcaggcatggtgattccaccagaggttcttttatccttgagaagagtttttactatcctaggttttttgttattctagattaatttgcagattgctctttctaattcgttgaagaattgagttggaattttgatggggattgcattgaatctgtagattgcttttggcaagatagccatttttacaatgttgatcctaccaatccatgagcatgggagatctttccatcttctgagatctttaatttttttcttcagagacttgaagttcttaacatacagagctttcacttccttagttagagtcatgtcaaggtattttatattatttgtgactatggataagggtgttgtttccctaatttctttcttagcctgtttatcctttgtatagagaaaggccattgacttgtttgagttaattttatatccagctacttcattgaagctgtttatcaggtttaggagttctctggtggaatttttagggtcagttatatatactatcatctgcaaaaagtgatattttgacttcttcctttccaatttgtatccccttgatttccttttgttgtcgaattgctctggctaggacttcaagtacaatgttgaataggtagggagaaagtgggcagccttgtctagtccctgattttagtgggattgcttccaacttctcaccatttactttgatgttggctactgctttgctgtagatagcttttatcatgtttaggtatgggccttgaattcctgatctttccaagacttttatcatgaatggatgttggatttttgtcaaatgctttcttagcatctaatgagatgatcatgtggtttttgtctttgagtttgtttatataatgaattacgttgatggatttctgtatattaaaccacccctgcatccctggaatgaaacctagttggtcaggatagaagaatgcgaattgatccattcctatctccttgtactaaggtcaaatctaaagtggatcaaggaactccacataaaaccagagacagtgaaacttaaagtggggaaaagcctcgaagatatgggcacaggggaaatattcctgaatagaacagcaatggcctgtgctgtaagattgagaattgacaaataggacctcatgaaattgcacagcttctataaggcaaaagacaccgtcaataagacaaaaaggccaccaacagattgggaaaggatctttacctatcctaaatcagatagggaactaatatccaatatatataaagaactcaagaaggtggactccagaaaatcaaataaccccgttaaaaatggggctcaaagctaaacaaagaattctcacctgaggaatactgaatagctgagaagcacctgaaaaaatgttcagcatccttaatcatcagggaaatgcaaatcaaaacaaccttgagattccacctcacaccagtcaggatggctaagatcaaaaattcaggtgacagcagatgctggcgaggatgtggggaaagaggaacactcctccattgttggtgggattgcaagcttgtacaaccactctgaaaatcagtctgacggttcctcagaaaactggacatattactaccagaggatcctgcaatacctcttctgggcatatatccagaagatgttccaaccagtaagaaggacacatgctccactatgttcatagcagccttatttataatagctagaagctggaaagaacccatatgcccctcaacagaggaatggattcagaaaatgtggtacatttaacaatggagtactactcagctattaaaaagaatgaatttatgaaattcctaggcaaatggatggacctggagggcatcgtcctgagtgaggtaacccaatcacaaaagaactcacatgatatgtactcactgataagtggatattagcccagaaacttagaatacccaagatataagatacaatttgtaaaacacatgaaactcaagaagaatgaagaccaaagtgtggacactttgccccttcttagaattaggaacaaaacacccatggaaggagttacagagacaaaggttggagctgagacaaaaggatggactatctagagactgccatacccggggatccatcccataatcagtctccaaatgctgacaccattgcatacactagcaagattttgctgaaagaaccctgatatagctctcttgtgaggctattcttgggcctagcaaacacagaagtggatgctcacagtcagctattggatgaaacacggggctcccaatgaagcagctagagaaagtacccaaggagctaaagggatctacaaccctatagatggaacaacaatatgaactaaccagtacccccctgagctcgtgtctctagctgcatatgtatcagaagatggcctagtcagccatcagtggaaagagaggcccattggtcttgcaaacttaatatgcctcagtacaggggaatgccagggccaagaattggggggggggggcatgggggacttttgggatagcattggaaatgcaaatgaagaaaatacctaattaaaaaaaaggaaaaaaaaaaagaactggcttacctgaagcagggggattcctggagcttcctttattggggtgacagtgacctcatgagatagatgacagatgcaagggagagtgacacatgtcaggagcctcaaactcaaaggccatatctatcggccaaagcctaggttgagtctcagacaggcacctgaatctgccaccatagcttggctgcaggtggggaccgacagagaacttcactggtgcctacagcagctaaaccagaatttccgaagatgttgggcagctgtggatggctggcatgtctgtcccctcctacctgttgtacacatggcagcccctacagaacagcttccctgccccctatagcctggcactgtgtgataacctggttactgttctttgatcgggcttttttgttggtgttgttttcaatctttctcaaccctaatggcttggtctctaggtaccacttcttcagccagagcccttccctctgtaggcacgacccacccctggttttgtcttgctctggggggctgcgagtgtgttttgttccacttttgtctctttagtgaggatggctcagctgggggttcatgaattctgagattttacccctggccccatttttccctatgtcactctctagccatgggaagcttgttggagatcctaaatgtgccgtgtcctctcacacctttggcaatgctctttcctctatccatgatgctcctctgtttccactgagtggcctttcacctcccaaaactcagcttgagcttgtctcctgaagccctctttgcctacctaggaaatagagcacacgcgtgctccttgagggtttagagacacccaggagacaagcccctgagaatgtccgcaaggggtgtgtagattatgttaattggggtgggaaggaccgcgccactccacaaagggtagtcctaaactgaataaaagagaggttagtcgaaggcgaatgtgggtgctcacctctctctgtctccagattatggatgcagtacacagatgcctctcgtttctgacgccatggccccttcgccatgatggactgcacccttgaactgtgaaccaaggttgatctcttctttctgtcttaggtcagatattttgtctcagcagcacataaggtaaagcaagacttctgcacccaccctcggtacgatgctgcccttagctgcttagctgcttcgcttgattaggcaaggattcatttggtgatttttctggtgaacaaaaaaatgacggagctgggtttatggattggagagtccagattgtgccttccagggtcagaaccgcatgggagtcatctgtacccctggcgctctgcaaggggccatgcatgcagggtttggttgtgtttggttgttttgttttttgttctcctattggaaaggcaggtggaaggatgggtggctctgtgtgtgttcagggctaaaggacggcaagaatgacttcctgactgactgatttccaaaagcttcatagggagttcagttcctaccgcagttctcattcgtgggcattacaccacgggccgctctctttaaaggacttgacattaactttgaaataaaacattttctctcaaagtgtccagggtggaagcaataaactgaggtgagggtaggggggttgaagtacttagggtcatctagggttattgtcagttgtgggttttttgggggaaaggggagggagaaactggcttgcaatgtttcctgactttgctcagtgtgtgtgtgtgtgtgtgttcccgcacacgtatacatgtgcactttggtacaaagtatggcacccaggaccttgcactggccaatgctggaccactgagctctctgctcaggcccacttgtgcacttggtaaagtaggtatcacacaaaacttaggaatgaatgagctgctaaaagcaaatctcattcagccaagaaactctgatgttctgtccccagctcctgaaaactaactgggacgcttttggcaatgcttcattgtcccaggatacaacatatcatttttactgattactgttagctacgcatgtggttgtcttgttgaaatttgaaagatctttgtgaacgctccttttgaaagaaggagactcagcctcagagactagatcactgcctgaggtcccacagtccagtaaagaccaagccacgcccatgttcagcttcttttttttgttgtttgtttttcccactgtgctgggcttgctcagtgcttgcccagagctcaggatcctgtgtgtgctgggcaaaggctgaactccaagccacaccccagatgcctatggctaattgatactgttttatgccacaggcgtttgtattttaatgaaacagcacatggaaaataatgaaaataatttaaagatatgcataagaacagtatagatttgtattaagtgccaataatacttctcttatattatatagcctttccacttgagttcacttgaaaaaataaatttaatatttccctgctctactggtgaagccctaaattctaaaatttccccaagggcaggagctgagctctccagcgatcactcctggtgtaaccagctttcctgggctatatttatcacttagttaatttggtcataggttttcttccttctaggaagatagtaattgtatggaatcgctttggttagggatttataaacgtcacattaatttggtcttttttgttctctcacgattagctatttataaactgaagatggattttttattctttgagcagacatgaagaaagaaatggctgggattatagaatcattcatgtaacaagcacttcccaagcctctcctatgtgtgggacaaatttccaggggagctttagagccagtgtcggtctgtgtggtcttacaggctaaagaatgggttagacctttgacaaacatggaggagaagatttacgggaagccactgggatgtgccccagcaggtgcttgctgttctgggatatggaatgctccagaggctcgtgtataagcttagctctaagcctgtcagatggaggaagctccaagaagtagggaccagtgggaggtcttgggccaccgagggcaagctctcaagggggaattctagggttccagccctgtcttctcgttctttacttcctagttgctgcggagtgaacagcttcctccaccacaatgtgctgcctcccacagtcccagaagcagtgcatccccatcatgatctgtaacctctagaaccattaccccaaatagacttttaagcacattatctcaggcattcattgcagtgaaggaaagctgaccaaacacagccacatagccagatgtggcttatgtccataatcctaggacttaggaggctgaggagggaggattgcctagagttcaaggtgagcctgggccatagacaaggccctgcttcaaaacataaacaaacatgaaaaaactttaagctttttaagctcacaatttggagtattcaaaggcacagcaatggtaacagctgtgctctggtgagggtcctcttaaggaaagtggaaatggtgggagaaagtggtcaggcctagatacacagtgtatgtagggtgcggccaggttcaggttagcatcacactctcctgagaatagccctaatcactgccaagggcatcccgcaaccagccaacggccctgccactagatcctacccctcaaaggcttcttactacttcccaggccactaacctggggccaagtccccatcacataggcactcagggaacaaacatgtccagaccatagcaagacaggacagcgatgggagccagtacacatcctcttttctatgaagtaatcctagtacaggaggagacagacagattcgtactgtcttctgagcctctgtaggtctaatctgacctattttgaccattcttggaaaccaagaagatctttgaaacagcaaattttcatatgctaatctatgataaaatatcattacaaagtaaaaggcttttgttttctgctagaatgacttgagcatcagtgagcagatgaggtgagagtctgggaaagcgacgagcctttcctgtgtccatcaggatcagccacaaagatctagtccatcagttaatccagatggtcttgaatagtgtccgtgaggctctgtgcacccaaggagagctgggccactctatcccagccttgaaggagggaagtaaacaattgtgtcactgttgggccctgacagtcgcaggacacacaccctctgggcatctttgagatagccgttggcactgttctgtggatactccctcaaagactcatgggccaaggtcatgcaagatgtgttacaattaccgtttctcagctcatactgctgagtgccctgtgaccttcagcactgccaaggttgagggactagtctgctgggcaccattccaaattctgtagctgtagcctaagtaattgtagggacggtgacagctcactcgcttaagggccatcgaactcccatccttagctgtggaccaagtcatggaggcacagctctaagttcagtagaagccccgatagagtaaaatggtttttagttgcactggaaccagctggttagagataggtgtgacatctgaagagtccttcctgtagagagcaggagnnnnnnnnnnnnnnnnnnnnnnnnnnnnnnnnnnnnnnnnnnnnnnnnnnnnnnnnnnnnnnnnnnnnnnnnnnnnnnnnnnnnnnnnnnnnnnnnnnnnnnnnnnnnnnnnnnnnnnnnnnnnnnnnnnnnnnnnnnnnnnnnnnnnnnnnnnnnnnnnnnnnnnnnnnnnnnnnnnnnnnnnnnnnnnnnnnnaaaaaggtgacagtccccccaagatgggcaaaatcaatgtgaggcaaggtgcctgcaggaatggttgttagaaaggagcacttagaacaaaagtcctgagccccatccctgctctcgtcaactggctggcatggagctaggacccaccagtaaagaggccaggagctcagaacgaaggcttgagagcagaaccgtttttatgagggtgacagcaggaagagcagcgccacaggaagggaatcagccctgttctggacaggtcagctgtaaagcacgcgtcagcgctcaggaaatgtcaccattatcaccgtggtcatcatcaccgctttcacagctgtcagctcatccgtcagcagcacacactgctaaaggtgaggtcttgtggggaaagcggagcagtagagaggaaagggagagagcagcccttcctccacctctcttagaagccaacacagaggcatttgtgggtacccagctctcacatttgtgacaatgtgtcgacttgaaggtttcctaaaattaactgcaatttcagaagtgaggtgcaagcgccagttatgcctggcaaccctgaggtccctacttgagagctctcacacacactaagacaatgacaggcactgcaccgttaaaatgttttaatggagaaaaatggatgtgaacagcagcatcttaaatgcattagttttcgacattgtgaaattaattggctcccaaatatagccctctcctgtagtaagtggagctccggagagcctccagttttctcactgcctgtagccaacatctctgggttccatggtgaataaaggcctctttgtttaattagagttgaatagtgtttgaataagttggtaatccaattaaaattatatttgcagtttatgcaaaatttaaaaaaaaagtgacttgttcagcaaatgtcttataaagcttgctctgtatgtagcctgcagtgagctggaggcggggtctcagtgtggcctaggaaacaggctgggctctcagagagccctggcctccagcatgacaccagcacacagcatggggagagatggttcaaggtgctctcagggctcagaggaaagtgtttgctgtgcctcaagaaggggacacttcagtgcgctctgaggagaagaggaagatgccactctaaaagggatagagaagatctgaagtgctgacgttgggggcaggggtgataggcaccttggcagtccccatgtctgatcaggtgcagactaatagaggcaacaggagacaaagattccaggaactaaaagagagatgaagcaaaaaagagggctgggactacggcttagaggtagagcctttgccttgcatgtcccagggcctgggttcaatcctcagggagaggtgagggaggggtggagaaaaataggtcagaaacacatcactcagatggggagatggggcattaaataagagggctagggaagagtgaggggctctattagtacacaattatatataataataaaaaggtctatgattatcaatcacaaactcaacaaacaacttttgtccatagctgtgctttctgagactgagtagccatctgagccagtccccagacaagctccatgctaggaccctcgaggaagggaactgccaagaaggggctggcccttccgcacagatcaccattccatggagtataaaagtctctcttgccttcagtgccccccaaggcaccccctagcccccagctatcttacctgctttgcctctccctccagctgatgctcctgcttcctctccttgctggcagccaggctaggcctcaactgatgagatgcctttcagggcctcggttgcacctgctgacctgcagtcctcaggctgggctcggctcagggagcaccagagatttcctccatgcactttttgtctgttttctgcttttacaaaatggagcatctatgttattaatcatgaaacattttaactctccagacaatacaatggataactatgtaatctccatatctaatctccatatctccaatgccttatctatttcagatttctgttttttcaattttgaaaagttaattatatgcatactttgatagtttgcatgcatataatttttattataactatcattcaaaagtcaccatgttccataaagaatcataactctctcttctttttgccaacgacacatacattcatagacagtacacgtgattattttatacaccggtttttaaaatctaaatgacacaacactgcgctgttttaaccagcctttccccccagcactgtgttttgatgtttactgcatgtgacatatttagacctctgccgggtgtccattgttcatgctgctggctacacagtatttcatctgataaaccagtttctctgttcctcattagcttgctcttagcaaagaggggtcaagcggctcccctccccttcattgtgacaagcagagccactctaagtgaccttctgtgtgtccctggtacccatgtgtaagaggttctctttactggggctacagtagaaataggctcggtactgatgaatgctgcttatttattatgttattttatgttgtgttattatgctacttaaaatgttattttctcacaccaagactttagggacctggttatctgctccattccttgaacctaaaacaatacctcagatatctgttcaaagaatggacacactcacatgacacctcagggtgactgtactaactcacactcccaccagtttgtgtaaacacccccatttctgacattcttgccaatacctggctatggtataggttaatgtttgcctgtctgacagcatcattgtcacctcatttacattcctgggattacaaatgagcctggctgtcttcaagtagagttttcgaccacttagatttccccctctgagttaccctgtctgccttctctgtagtttctgttttcttacagttttgtagacatgttctcttcatcctgactaaaaagcacctgatggtgtcttgggccatgtacagctgaggctggactttatagtttgcctattgacaagtacaggttctcaatttatttatgcattttaactcctttttggtttgctttttacaataattttttgaaataaatattctagctttttaaaataaattaaaatttttttttattttatgtgctctggtgtgagggtgtcagatcctctggaactgtagttacagacagttgtgagctgtcatggtaggtgctgggaattgaacccaggttctctggaagagcagccagtgatcttaactgttgaaccatctctccagtccctttttagttttgatacaggcagttcaaactgaccttgaattcaatttgtaatccaggtggtcccaaatatacaatcctcctgcctctacttccaagttctggggtcacagctgtacacaaccgctcccagctttctaattttgtagccttaccacatgtttgctaagattgacagttttacctttcctttcttttttatatttatttattattttttgtttttacgagacagggtttctctatgtagccctggctgtcctggaaatcactctgtagaccagactggcctcaaactcagagatccatctgcctctgccttctaagtgctgctaaaagcatgtgccaccaccatgcctggctctcccttcttcttttaaaaatactactttattctcatgttcactatgttcataatttgggatcttctagtatttgctgttcctaactgtgccagtgtgacgtcagccgtgggttctggcaggaatctgttgtcaggttatcatttttgcaatactaggataaacattcacaagtatagattttttttcatactctactggatctgtttctagatagcacatctttggttctcaaatgtacccattcccttagggtttggtttattctcttgaaaactctgtgttttaaaaatattcttaggttagaattttatgtttcactttgtcattttctcagggagaggcatctctcttcatggtttgtactgtactcttcagctgccattggtttgcacagccaaggagtcaccaagcatttcaatgccactgttagatgccaatacagtggagtagagacagaagaggtttaggagtctgaaaagtcattgtttgacaaacacttgtcacacaattagtgctaatgtcttgaaagcccttgaagacagtgctatggggattggtgggaacacagggcttacaactctggctctatcggttactgaccacgtcactatgagggagtttaaggccccagtttatcccttaaagcagcacattgattgtgtgcttcacacagcgtatcagactatatgtggtataaaatgcttagctcagtacccagcatagagtgggcatcaatcaaatgcaactgtcattattagcatccatctttccatttgttcccataattgcttcatgagatagattattgttagcatttgacagatgtttcatgagcatgtgggaacatttagtaaaatattgtaaaaatgttgctttttattaatatatgtaaaggggctttgatcgatgtcagacaccatgcagatggaagggaatgccgctcctcaggatggcttaggcccacattcttgtcagcatttggaagtctcactgcatgaatttaaatcatgcatcacaagaatcagagaaacagcctccatgtctgataaagagagaccagagaatggatcaaaaagatcttttagcaagaatagctaggcattactatattgaaacaccaaggctgtctacgtgtgtgtggtgtgtgtgtgtgtgtgtgtgtgtgtgtgtgtgtgtatgtgcactgtgagtacatgtggaggtcagaggtcaaactcaactggtgttatccaggcaacacccatctcctctttacaggcagtgtccccggctttctggaactcaccaggtcggctgactaaccagagagcctcagagaccagcctatctcccctgctcagcacgagggtcacaagtgtgtgccatacccagctcttgtttggttttgtttgttttatgaaacaaggtctccatgtaatcctggctgtcctaaaatttgataagtaaaccaaggaggcctcgaacgcacaaagacctgcctccagctcctacgtgctgaaattaaatgtgtgcaatgctgtgcccagctgactcttttcaaatgtgcttgctggggattgagctcaggtctctttgactcatcaggtctccatgcttgtaagtcaagcactctgctatctgaattatttccccatccccaaacagtaaaatcttaagtatgactgtgtttgacatgtaagattataggttatttttcttgaaacttctctgcctattccaagtttctcctgtgtcctgaactggagaggaacggggagtcagccacaggaacgagagttgagcatcgagccccagtaaactatctagcaaagccccaacttccagccatgtgctggggctggggtcttcaaaactcaggtcctgactcctctcgcctcaaaatccaacttggtacacatagccttagggtgctcctctgtctgtctctgatgactgagttagattctttcttttagcttgctggaaggacctgacctctctctaggcagggagacctaatggcattggctactccatcctttctgtatagtgttagtttaccttggagccgttctcagggtagtcaaagccagtcaaggaagtctccacccaaagctgcttttctcagaagtgacctatagaggtcgcatagaggcgtcaacagctcctccctcctgagccaggcatggtggtctcctctgagcttctctcagctcttcaggctcctaagccagagcctgcaccctctccatgaactcccagtgagcgctcttttccgaccttgggatctattggtttgtcattctctccttcaccacccttgcttgcctaccatcttctccagcttggatagcgcagagcaactcataacctgccttcttacctgctcctgctttcttctattctattttcctggcagcagccagtgccctttctcattttcatgcacacacctgtgagagtgtgcgtgtgtgcatgtacatgtatgtgtgtgcacatgtgtatgtgtgtgtgtgtatacatgcacctgtgtgtgtatgcatgtgtctgtgtacaggtatacatgtgtgtgtttacatatggaagcacaacatacattttggaatcatccctgattgtttttccatcttacgcattgagttagtgtctttaaatcaaatgcagagctcaccgatatggctaaccttgttagccagtttgctctgaggatcccctgtctctgacttctgaggctacctgtgggctcctggcattgacttgggttctgggaatccaaactccaatcctcatatattcatggcaaatactttaaccactgagccacctcccaaccctgggatgatctttttccaaattccattctaaatgggataactgatggcttttcatttccccgtagaatgaaggatcagaccgggtcaagtaccagacaagctgttgcattgtctagcttatatcatggttctgagtttgcagttccccaggcttgcccaaggccttgtcagggtgtctgtgaggtgaaagctgttgtcctcagcacaacactaagagactagttcatggtactgatgctggcccagccactgtgaacagtgtgatgagtaaaacctctggctaagtgtcagttaagatagtgacagcaggatcagaggatggctcagctgggaacagacctggccaccaagcctaatgatgtgagttcagtccctgtggtggaaggagaacactcgtaaagttgtcctctgacctcttcacacacggcacttgtgtgcatacacacacacacacacacacacacacacacacacaaatgcaatgttagtctttaaagatagtgaccacggactgtacatagtctttgtggtttttatggtcatatgccctctcactatgagactgggatgtttcttaatgggctaaaaggcaccctctttcacaaattaaaacaaagagagtgtcagattcactcacaatagttcttggtggaacacttttttaaaaaaaaatcaaaatagggagtactgtgtgcttgtccagaggtcctgagttcaattcccaccaccaacatggtggctcacaacatctgtaatgggatgccctcttctggcatgcagtatacatgcacatacacatacatacatacatacatacatacatacatacatgcatacatctttaaaaattgttttcaaaataaaaatttaaatctcagcccttgttatacagtttctgttggtggcattggaaatattgtatatgaagaatggtcgagtgacaatggctaagttgcttccgttgctgtccatggaaacacagaaagcccttgtgtttctgtgaattgttaatggccacaacaggaagggctctcctgagaagaaaactggcaggcaatctattgtctcaaaacaaagcaagcttcccacttgaaggaaatcagatttggaatctttagaaagcttgtacctgccactgtgtgctcatcaactttccagtacttacagagcttttctattgaagtcagaggtcacatagaggacagtgatgtcgtgacagtgtgtgctggaaacacatgaggaagatccccacaaaccagtgtcttccaaacagccaaaccatgacattgccacactccgtgggggtagaggttggtccaaggcaagaggtggagcctcgcctcgcagagcattcagtttgtcaacaccacacaggttctgccttgcctgacacttaacaaggcagccctcgaggagacgtggtgcataccaggttttcatcatatagccctttccaaacattacagcacactgaatgtagaaatgggatggaggctctaaccatcccccaccccaccccctctctggtgtgtgtaaggtgcgtgcacttgtgtgcatgtgtgtggaggtcagagatcaatttaggtactgctcctcatgccccagccagcttgtcttttgagacaggatctcttgctggcccgggccttgccttaggctagataggctaagcactaagctacaggggtccacctaccccagcctccccagtgctgggatgggaaactgatccattactactgtaggctactttaaagtgggttctggagattggattcaagttctcatggttgcaggacaaacgttttaccaactgtgtttactccagcttctccaaacatctttttataaagtcattagatttacagatgttaaaaaaaacagtgcattttttgcactttcttacaaaaatgggattttcatgaacatgtttgttttcattactgtcttactgacgtattgttagtaaagtattattggaagaattcgtatgtttttaagtgtcctgtcttacttaatgttatggaaactgatgggctgtgggagtgtgagggacttccaagtacacagtccttgagagtcactggtctaagctctgtacataaaggattaacattccagcctcccccacatcactcttaatcttcccaaatgtcccctaatcccttctttctgtcccacaatcagtttcctcagtcggactgccctgtgcttcaaggcttcttcccatgcaatttctcgggccacaaatggacaccctaaccccagccctcccctcggcacctgggctgtctctctccagtgcagcttaagaaggcgtctccttgccagcatctacccgcgtgctttcattccccccgccccgtaggctccatgttaatgtgtttcctaatgatctctaccttcagattgaaattctcattatgtccctcctttatcatctcccttctgcacctatcttacaagtgcctcctctgccgcccgttgtatcgtattaatcaccacctgtctgagagaagagagacgaaaagctaaccgacattttcggtgtgagagcagtnnnnnnnnnnnnnnnnnnnnnnnnnnnnnnnnnnnnnnnnnnnnnnnnnttctcagtctgtccccccacccccccccaccccccacccccgcataaaagggtctcatataagtctttacaggtgctaggataatttagtcattgttgttggaggttttttttccctcccaagaccaggaagaaaaccatctggtgctgtcattaatgaggccaatttccctgtctcttgtagctggaagcccctgaagtgtgtgcttgttctgcacgctagccactcctttcactttcttgttctctgagctccagcccttatgtagactctgcccccgcccaagctcggggtcagtgggaatcatctgtatcctctgattttcctttgcaaagaaaaaaaaaatgtgggttgtctagatgttgcatcctgctgtggtgcagtaaaggcatgataggattttcttattggaactgttaagaaagctttataagagatcaggctatctgtgtccttggttgaagaggtctggtcgtaaagcatgccctggtataaatgaagcatgccctggtacaaatgatgctggagcctctggtgctctctggacctgtttttccctctgtcggatgaacaggttccagagagcccagtaaactccaggctactcttggtgcagaggagggacacatgatgggtcttctctccaaagaacgcagtctcttaggtaccctaaagcatctatgggatgatatccactctgcacatgtgcgtattcatttacatacacgtgtgtatgcatggatactctaaactgtccaccttgtgccacccttgctgatcctgggttgtggtggtggcaaatgaggactaatggtacccatcaactctaaagagttcataggcttgtggtggagctacatagcacatgtaactagccaggctttgctaggagggtactatcctgaaggagagatgggatacgatgtcctgatgcttcaggacaggaactggggagtgggtaccaactaggaatggtgacagtttccagttgaggaacttgaggaagccttttggaaaggcatgatttagtcaaggctagtggcatatacctgacatcccgacactcaggaggcagaagcaggaagactgtaaaatatggtatgtggagtatgggctacacagtgagaccctgttttacagataggggagagagatgggagggcagaagatctattatcaaagcaaagccatatagcttaatgacgaatactgcaagaatccagagaggagaagtcaaggcgctctaacctcactaaggaaaggttggggtgggggggagagagaggagagaggagagatttttcttgagactctggagtactctagaatcatgctgctaacccaaggtgggcaggaggtgtgaggatgaagcaggtccctcctacagggtccttgcgatgtcattatctggatgcaagctcccaacgttcaagtaccctgtctcagtggtctgtgggtactttaggtctgtgtgcaacagcgatctgggcatttcatagagtctggaaggcagggggagacggtcgggctgaagaaacttaagaacatatatcactccccttcagataagaagctcagtcgagcagcttgttttaatttttcagccctgtggtctccttagtagtctgcctgggcgaggtctgcatacacaccagggcttcagaggatgctgggcagtctggtgccattagcatgtgctctttgcccagggcacattagatcattaccaagcactcagagtatttgacaaatgggatagctgccgctcaggcaatttcccagtgaatggctgagccaggtggagtgggcagataggcggcctgactgaacaggggaagctaatactaatcattaggtctttgaaccttaccgtgttcccaattaatggccgaataaaatgaaacaagtaattagatggattccaacccactagctgcgcttccctgcttgagtgcctcccacctccttacctctcaaggcagagcagcgactccgcacagacgagcagtgtgggcttaggatacggatagtggatagcattaatagctgctagccactgaaaatgtaaaaagggcacttaggaagatccaagttcaatgctaggatgttggcatttgaacagtgatgacctgtctgctccatcttagagacacaaaggtcaggatgagagaagcatgaagtgccaccaggaccacctggttgggtnnnnnnnnnnnnnnnnnnnngacgggaccaaagctgactggccccaggcgagctattttcttgctgaagcaggagaccttcccaggctcactgatgtgaaatccactttaaagactttcaccagccagcaaatggtcccatttgttggtgtgttgtaagctgtggggcatggttttagtttttatgtggctgagaaagcgccactttacctctgtgctgtcttcagaatgatcacttcctgtgtttcactccaattgtgtgagtgaagctgagcccccggggggccaagcctcgaacacacaaagcctttctttctccctggggactttgtgtgtttggacccataatctacgcaaatcccagaacactgtgcagtgggagcttcattctagaatagctgagagtgaggctccctccatttcaccttcacctccagctcactctacagccagtcaggccccagtcacccttaagggactctccggactcccagacttctgtgaccttctgtttagtgacttcttgtgtttattccccataaataaaatcctaacatgattggtacacttgtcactgatgaacaaaatgtaagtttggtcgcttaaaatgggaattctttttctataatcatgcacagctttattttttgaattcaatactcactgaggtgatttagggtcttcattttgatcatcttgccaaggacgagtgattcagacccagtctcccacatagctagggtggcccagtgaccagtctagagtcacctctcgagggtagaacactcgtcttcagcattgctgtcactcttcctcactcagtggcatgagtgtgtcctggccctcatgcctctttgtcatctcttagtccagagcccagttcaggctacaaacaagcatgagtgcagggaacaagagagcagaggcttgcatcagtgcccctgatgggcgtcaccagtcttacttagcgtgctgaccactcctgtgccacaagctgcccatgtccccagtcctcctagaataacacatcaacttttctggagattccacatagctgcagggcctcgagactcatttcatgtttgaggagcctgctttgttaagttgaagctctcttcaacttaactgaaaggttctacttactgtaaataaaggtggtatctgataaggtaaagagttttttttttcacaaatgagaagaaatgaggcactttatgcgaatgtgacaaatgtatgttgtctgcacataaaacttaataagagacttaacaccagactttgagactcggttctgtgtgtggtgcagtgaggacgtgaacgcacgtggtaggctgtaggctgactgcaggtgtcttcccttgattactgtccacctttctttttgagataaggtgcctcagtgaatccagagctcatagatttagccatagaaggactcagggacccttctgtccccttccctcacagcacttggttacaggtacatgccaccacgaatgattgccatgcttgcatagcaaccttaccaagcaaactatcctgagcccctgcttgtgatcctaactgtggtctcctgggaatgtgtacgtgtttaaacctccacttgtatagtctaaatttataaaaggttcatgcgctaataaaactatgcctgtcgatcgtcaggttttcccagaagtattttcccttttcagggaggagctgcctgagaaattattcaaatcagatgtcttgatctatctggatcgcagctctcaggcgttccctcccccgctctgctatctcccaccattactgtggtgctttaggactgaggctcgtggggacctcatcagggacacacggtagtgaagcatcctctcggcagagaacactcacttcatgaagctcctcaactgatgtcttaagagcaccgatggtttttaggtcatgggccccaaaggaagacccatcctcggtcacagttaccgaaatcacatcttaccacctgtagcctcatgtgctctgtgctgtggtgccaaaggatagcccagctaccagcctgcatagccttctatgtctctgccatgctaccataggatagcccagccaccagcctgcatagccatctattcaggatgctctttggacctttttttttcctgcccatctaactctgccagtgccttcatggggcaacatcacccagggtctgccccaccctcccttcaaaatatgtcccatttctctgtattcctgtagaatgtgatgttttgttttgttttatcagtttatatggacctcatgcatgtctagatctctttatccgagagcgccggacttgtagcgagaactctatcaaaagcattttctcagatttattggctcaaaacactggatcatatagttcagagagaggccgtttacagaggatctgtgatgctgtttatttgttgaacaaaaatggtaagcatgcctatcaaatcccaggaggacacagaaagctgggagaggtgactgcaatacaagagccatctgtccatccgctgtccacatagctaagcctgtgccctgagccagacctgcactgtaagcatccttcaggtacttttcaccacagagctgtcaggggaggcacttggtgggtgaggaggtcgtcctagccccgttagctctgtcaacttgacacaatctagaacttcctgagtggggagacttagtgactgcttgtccagagtaggttggcctgcaggcacataccttgagtatgctgactgaggtggtaagacgtgaccactgtggttggtgccatcctcaaagcaagggatcccaaattaagtcggagttgagaaatacacccgagtataagtgtgtgtgtacactcctattcctgattataggttcagtgtggacagttccttcagtctctgccactgtgactgccctaccatgatggactgcatgcagtcttgaaccatgagcaggaataaatacctccccccttacattttttttttttggttaggatattttttatcacagcaatagctaatgaacctaaaaatctccaaagtagtgaatggtattaggaggtagacccttgggaggtgagcataccatgagagcagagccttaccagtggaggagtgtctcacaaaggggatccagcgtccctgctctcctgagcaatctgcagccagactctgcgggctccattggatttctaggggaacgagggagataacagtgtgtcagctcaggctgtgactctccctcatagctgactacacacagctgagtcaggaggctcacagccaggcttctctgaacccagggctcttgcttcagccttgaggagaaagagctactgaggcagcacagtggctgcctgggggagaaaagaaatgagctctgcttgctgggagaggcttagcttacagccacactccgccaccaactcactgggagattggcagcaacctcagatcacccccacccacggctggtgctacagggatgctaagagccccatttcaggaggctgcagtgccttacccgaacatcttagggaacaaaggaattaatgaacatgaatcaaccctaagttaaaccgtgtggcgtggaacaaaaggagaaaggagctgctttcagattctaaatgaatatgagtaccagccatcagcaagcccagtggagggagccttagtgctcctgcatggatgctcctgcatgggtgctcctgccttgtctgcccagtgctattatgagcaacacagaacaatgcctccccagggacactcctggccctgagccccaaaccagggctcccgagaagccaggactcttcacctataaaacccatggctgcttcctggcaggcgcctatgaagaggaacttcaaagtgtatgtcaggatcctcatctagcgccaaagattcaaacacctctcaagagctgggtaaccctggagccctcacacaggtaaactgggatctttgtgagaagaacacagcacctgggagagattgatgggacaggatctttcacacaagtgagaaagaaaaaaaaatgctttatcttctaaagagcagcctgcgcctttcatcctgagattaaggctctccccctcatccccattgctgctcttgatcaaagagctacgtgggagtaggacaatggggccatctgtccatctgtctgtctgtctgtccatctgtccatccataccacgatcccgtccaggctctggattaggctctgtgaacagcaagattcaaaggttgagttctggctacaagcaaagtgattaagagttgacatggaggcctgtcatggggaacctgggaaggaaacctcggagtgtctgagggttgccctgaagaagagacccatatatttgataactaggtatgtgtaagagaaagagaagatagggcatattacccagagcaggagacagcaggagaaaggtcagaaattacccacaggcctgatggatctagagaacagggggtgggggagggtatgtggctaagcacagcctgaagactgccaagccacagtggtcgggcaagcagaggactcggtcatctagcctgaggtcatttgtaggctctgaggtgtggtagtgcccatggaacagcgttgtcagtcacctttgctggggtattagtaccccagtccttaacttcagcactgggtgggggacacactctccttccatttgtcatgcacctcagacttcctgtcagaaacggcccagaggaaaagtgtcctgagatcctgctggcagtattagaggtctataaaaagagccattcagagagaaatgaagagtaaggcaggcatcctggccctcccctcctggagcttcacggccatgagagaaaattcccataaggccatacagtcagattcaaactgtgaagaaacaaaaaaaaaaaatcaatatttttgcaattcaccacatagaacccccctgtaccctaacctgcttgtggacactttggggagctttcattcccttatgacaattggctgtgacagggacataagatgtctctcacaagccggaggaaatctctggaataaatcttggatgataaaaatagctgactcaacagttttcctcaggtttaaaaaaagaagggaaaaaccccaaacaatcaaacgatcatccccacaggtgtttctgcaggaaattgcctggctctggtttttctctcctctctctggaagtgcccagtttccctctgacctccccatttgtcaccagggctccacaagagcttttccacccctgcctgcctgcctctgcttcatttccagcctcggaactctcacctgcccctttcaccctggcgactctgcagagggctctctgttttctaccacgaggctccctcttagcatctcctaaatcttcacttgcattgtaataaaagcaaagcagccatcacgtggctagcagtagacaagtaggcctccagatccggaggcacagcccagctgcactcacccaatcactttgcagggcaacgtggccttggggtggaaaagaaacatgaccttgcctgttaccacggtgtacttaagtgcctaagtctgggggcgagggagagcgggagggtgactttagctgctgtgtacaaactgtgcggcgagccagtaccttcactagcaacaaactgaatgtcagtcttttgaatgaaagctcaagcatttctctgagagaccagagaggtggcatagcatcgggtcaggaagctcggaagtatgcttgggacctgggtgaccccgtgaaaccttaggagcagactgaagctgtattttgataaaacctcagtttctacacctatgacatgaagcatgtgatacctcgcacctttggggccatcaaaatgcacctggaacaacaatgcccagttagagggttttttgtttgtttgtttgtttgtttgtttgtttgtttgtttaagatggaggctcatgtagaccaagccagttttgatcttgttacatagctgaagaaaaccttggatttctgatccttctgcctctacttcctgagggctgggattacacatgtgtatcaccgtacctgatttatatggcgctgagactagaacccagggcttcacgcacgttaagccagcgtcctcccagctgggtaatatcccaagcctgagcacatcttagagaactctgacttcacctgttgggggaagattccttttgtagtttgggaataaattggaagagtagtttgttctgctttatttatgatgtaatgctaaaaaaaaaaaaaaaaaaaaaaaaaaaaaccaaaaaaacaaattttagaaaatataagaggtttctgctaatgtccacctttcccacctgtaaatggggcttcagccctctctcccagtgcacaggctattgtaattctgctggccttcgaaggcttcacggcgcaaatgtcatcccacatcgctctaccgtacgcctcagcgtcagtaaccggaaagcatccgcaggctctgtcaaacagtaatttatccccattgttagatgcctttgaagggctcaattacgctcttctctaagtagagcagagccatgggattactgaatcaagaaggtgggtgggtgtctccaaagctgctggggccagtgctaccctgtgcttgcaaagagctgtagctgctggttaccatggctgccaccaactagggctgtctggtcctagagcgtggatgttctgtgtaaattagttgtcgatttagtgtatgtcagctaacgtaaaagtgtgtgggtctttgactatatgaggctggccatggttccgtgtggacttttatgtttgttactcctatttcacgttgtgggatctggaacatagaggcttacatcccttgtccgtgtgagcatgggtgtttatgaggaggccagaataggatgttgggtgcctgctttgactctctgtattcctttgagccaggatctgtcactgaacctggagccaggctgctgatggccaagcaccatcagtcctcctatctctgtcccccaactccccagcactggggtcacagaaaacacgtgtagccgtgctcatttttcatatgggtgcaggggatttgaactggtgtcctcacacttgtatatcaacctctagttcccactgacctatctctccagtcccacacttaatattttgaggtttgataaacatatacagccagggagcaagaaggaagggctcagaacaactggaaagtcagtcggggtcctttagtcactcaggagcctttagcccaaggccagcttgcttctaaggtggctgccatccaagctgcctaaagttgatttcacaaagttgataaccccatcccccataaattccccccaaggactctagtaaaacatgtggcattgaaaactcagtggagtggaggagactagagagaggcttggctgttaagagcactcaatgctcttgcaaagaacttagctcagttcccagcaccgtctgacactcacacatccctgtaactccaggccagggatccagcgccctcttctgggtccatgggcaccagcacacataatcacataagtaaaaataaaataaatcttaaagaaagagaatgcagtgcctttgaaggcagtgagcaagccccagggagtggtggccagcataaatacgttcagacacacctgcaattgtggtactttacatccttttaaagactctcagtcaagtgaaacctaagagggatcaagtcctgagggcagaagcactagctggaggagcctaagggttaccagtaggttcttccgcagagctcctcgttgtgcttcctgggcaggctccagcctgaaggttcacttcctcaaactctagcagctgaagcccagggctggctgacagccagatttgctaacctggaagacggtacctctttaacccagatggctccctgagcgccccgacagacagcatcttctatacagttctctgctcttcctctcccagcagaggaggccaccatggccagttcaatcagcccaagttcaggccacctctgctccgcttcccacaggccaccgatggccccctctgcagggcttccactcttttcccatcctgggtcctctcttcccctccctccctaactgaagtgactcatagcttgtggtttctaaagttgaaattctcaaggtgctgaaaaaaagcacacaaataaatcagcaggtgccagagcagctcccgagggggacttggtagctggggggtggggattactgaagtttaatttacgcaacagctgtgcttctaaaaggctgtgtaaacctgtccagaggtgaatgaaaggcgaatgggagagggggtgttacttagaagacccccttagtgagctcttttgtaaaacaaatcttagcgagctcccaggtctgctggtgtctcgcctctgtgaccctcctcctcccttcaatctaagcagattaacaagtaccctttggacttcatcacacctctgtgtaccgcctggactaaaaatagttcctggtacaggggaaaaaaaggcatgaaatccacatttgtggattcagggaaagaagaaagtggcacacagggaattaaacttccctcgatgaaaggaacagcatatcttaagtgacccccccccccaccagctggagccttcctcccctatgagcctgtaatacttgaaggcctcacaacaaattagcccctcttaatttatcctctggtaaacccttctgttaacacagattagtataattaatgaaaggttagtagagatgtgtgggcagatgtcacagcagttgtgaagcttaaggacacactcagtgtctgtgggtcagcacgtggccttcctccacttcctaggcagaggggaccacagaagtaaggacggacgccttctgtgtggggaatccctcttctgctgaggcaggataaggggacaggaaaaattatggggcatgcccctcatcttggagtctggctgaagcctcctatcaagcattccagaacaaccagtagtcattttctgaaggccttcctctgtggtagtaacctgtggagatctcaccagatagcaatttacagtaagaggactcatcctagccaccccatgcaagccaatagctcctgcttatcttcttagattgtaagccctgtccagggagcctctggagccagcttcaaatctcagttatttgacagggggtgggggtggggcagctggggggagggtaggaaaaggagttttgtagcaccccttggcatgtcacccaagagccatgaaaatgacattaggtctacagctgagagtcaatttttgctctcctttgagaaacccatgctctctggcaagtcttagttcccaaatgcttctctttcttaacccccgtgcacatatatatatatatatatatatatatgtatatatatatatatatacatatatatatatatatatatgtatatatatatatatatatatatatacatatatatatatatatccatgtatttcataaactccaactctactttatgccggtttgttctgaaattcttttctgcatcagagccaagaagttggttcacctgagtcaaagtacctaaaagattaaaggaccccaacccctgggctgccgtgggtgacagctgggtctctacccttgccaccactgacatcaacggttattctgggattcctgtcacacagcaggctgcaatggccaaggccatactgggtggtgaacatttgggggcctctgtcatgtctatgggtctgtgctcagagcagacttgagagtttttagtgggaaatcctgacctgttcatgtattaccttggctatcttctttagactgaaggtacaaatccagttagataccactccttcagaaaaggatatcaattctacatttggtttgcatgactacctaaaaaattaattaattatacatttggaagacagacaagctgcctggtgatatccactctgatttcctgggaggatacagggttcaccagcttgacatcatgggatagaggcaacttgtctgagccttgctcttatgtgtcattaaactactggcttcttgcctttgctcgggggcagggcccccaacaacaggagtcctgtaagaagcacagattttaaactcactcctccctgtagggaatctaagcacagtccctggcacatagagtatcaaagtgccaactcgctcggagttatcatcatcactgtcctggttagtgcctatgttagcatgctacagcagacatctggtggaacagcatgcactgtctcggcccaagtctcttcgcttctctcagttgtgagaagctgaactttgtgagcagctgctatgtcttcagagttgtggtatctggagacccagagactaactcgactcttttctcttcctttggcttttccagaagcctggagccaggtttgtgtgctgcctaaacctagtaacagtacataaccgtcacacattggtctcctgtgtactccagccatccccagccttcctcctcctcctccccctcaccacttccttatcccttgtcccaagcattttatgccacctgtcccccaccccttatcacgtgtacaccatctgctttttgccatctaccgctgctttatttatcgcctctgtcacctgtcatctatcatacagatctgtgtgtaaaacacttcaagtgctttcttacaaagaaaatgtatgcttctttttttttaatcaatgttttaaggcgtttcaaattctcattgtcatctttgaagttgctcagtgctgatcttgttagaaactacaaagatggtggacacttaattctgtaattaagtgagcccccttttctctatcttttagcctcagctttgtaaactatgtcagtttaattggatttgcattttgattggacacccattcacagagaaaggcacccaagcaataggtgcactgcccggcaagctgtcacagggtggccagactgaggacgaggtgcataacatttctagtatctcaaaggtctacaagtgtcccccggtgcacgttgatgcctcctcctcctcctcctccctcctcctcctccctccttgatagtagctgctctcctgagtcctacccccataggttatttcacctggtttttgagctttgtatgcaaatgcctttgtgcggtgcccaccatgctccttggtgtctggccccccagtcatatgtggtgatgtccatcagctctggggagtttagtagctgttcatttgtctttcacctgtgagtgttgccacatgctggcactgatgacttcagcttctttcagcatctggctattgttttctgttgtttgggagcccaagataaggaagagaagaaatgcagccaggtccatccccaagctgagctgctagagaatgagttctaggatacccaggcctacacagagaaaccctgtcttgagagagagagagacagagagagagacacagacagagacacagacacagagagagacagagacagagagagagcttatattaacttttatccttaatttgtgttcgtgttctagatgatatgatctatctctctctcctctctctatgatagagtaagcaagtgcacacaacagaaagttgaccgttgtgaagacactgacacacagtccagcttcactaagcatattgatgtctcacgtctgtcaaccttcctgggttttaaagggagctgtgtttattgtggttaaagttaacttatggcgtgccatgaaaaatgcccgtctgaccagatatacgactgactcttgttacggggggaaagatcatttctggatgagtttaaatacttttggccaccggtaatgcattcagctttaagttattaaggggatggcctctctcccacaaagttgtgcaaagctaaagagtcagtgagcccagagggttgatggcatcatcttaccattgagttgttcccaccctgccatcccttccatccttggcacggtggctttggtctcagtcacagatgggctgcaccactggtgacagatgtggtatccctagactgtagcatctcaaggtcagtgggccacaggcgagtgtcttcccgtgtataagtcaattatgttaatattaaacactcccaatgagtaatattaagtgaagtcaccaaacctcagaaagaataaaagaatcacatgtcctctctcagatgatgtgtacacgtgtaaatgtacgcaaatggatgcagtataacacatagaagggggaccgaggaagggtgatattgagtggtaaggaagggggcagtgaaggttagggacacacaagtgttgaagtgaaagacctccgtggggatactcccacccaagtcatgagatagcgcacacccaaagaatcacaagagactgtcttgatgaaaacacacgaggtagtttaatgatggagctccggaccaacacatatctcaagcaggagacaaaggtgtcgacgatgaggctcaaaagttaggggtttatataggaaaagagtgggggtaggggaggaattggcgtggcttcacacaattggacagtgtaaacatcagcaaactgtatgtgcagatcgaggtaactgcagagcatctggttaacatttaacccatgtcagaaaggcaggagatagggaggcgccgggacagtccggacattcttgtatgtcttccctatctttatggctagttgattcctgggatgactttacagcctctgttctttgtcttaggcccaaaagccctcctaactagcaagccgcataagtcatggaccttgaattttaattttctttcagaaggaaggtataaaacagttgtgtttctagttttaactctatcatggcagtcttggtttgtgtgtgtgtgtgtgtgtgtgtgtgtgtgtgtgtgtgtcagagggtggggcatgttggataagtacacaagactataactggtagtgataatgtggagccttgagtgaggcaccatagcttcagaatggccattctaaccctagacaagttcatcaagatgtatagtctttgggtctggtaggtgctagttggaatggttgtgttaatctacctgtgtggtgtttggccttcctttctttctttcttccttcctttctttctttcttccttccttccttcctttctttctttctttctttctttctttctttctttctttctttcttttatacgttctttatgataaagtgatttttattttttaaaagtaacaaaataattagtattttttaaaatgctatccttaaagagtgaagatggaatcagatatggtactggtgtacactcgtaaccctagcacttgggaggtgagagcaggggcatcacttgttcaagtgtatcctggattacatgagaccttttctcatttaaaaaataaaaataaaaatagcaaagacaccttagtaggttttccaacacatcacactatccagatttgagtcacagtcccaaccataaattagtattgccaataacactggacccacagcaacctgttcctgagcaagtctgagctggagccagcctctcatggaacctggatgagtttgatttctgccaggcaaaggaaagggatcagagtgaactatcggtcatgtctacagctgctccctagctccctagccttaatgtgaagtcctccccagtctccaagtaagagatgatgctggggtagtgggtggagcggagtgcatttgtttgaataaagtaatatgaatcttaactgaaaatctggttctataagaatttttacaaccaccagaatgtcacaagctgcaaaacaaaccctaatgtgttagccatcctgagagctctaataagctcagggtccctttggagagggggtaccatacttctttgctctttccccaactcttctaaggcttagcttagagaacacctgctctgaacacctggtcagaatcccagaaccaatatgaattttgcttgttggttatgctgtgcatagttacccactgcttaccaaagctgccttcatttactgctttatttgaaaatattgtaaaagtagtaggcttctccatcatcaataatgcgaatgatttatccactaaagttgttttttttttttttttttttttgagatgggtctcatgttccaggctgttctctaacttgttcctgtcctagagctccaaagcccctggcactgggattgtaagtgtgtgggctacctggtggatgttgtgccagggctcagcctctgggctacctcagccaggcaggaactccatcacctgagcgtcactgtataagtcaaccaagaccccacttccccatgaaagtccactgttctctacttgcttgctgcttcccaagccctttatttcagtccttaaaccttcagagacacgcaggagcccactctttactgaatgatatgtctgtcattctcagacttgagcttgatgttctccaggacagtcagggcatgcctccacctgagcagatccagagctgtcctttgctgcttgccattggaatctgaggacctctcattctcttcataaccaaccccctgattatgggaactgacgttccactgtctcacattttgttcactctgccaggaagaccctgctgcctatccatctgcaggctggatccttagaaaaaaaattgttaggtcaaagaataggtgattttaaattttgattgctactgccaaaatttatgagggtgtttggggccagctgctgcttgtagaagataagtaaatatgcacacatacatactcatgcgtgcatgcacacacacacacacacacacacacacacacacaggagctaacatgaagaaagttgccaacattttatgtctccatgtagtgataattcctaaataccaattatcaccaattaaatgtgaaattgggacttccatgtgtcaaaatgtctgcaatttcacatgattgaacttaatgttgtcagcatggtttcataaaggcatgatctccatatgttcacaccagcgagcgtgcgcgagcacgcacgcgcacacacacacacacacaccttttgtgtttttcacttcactgtggtgtgtgaacatttagtctcatgtgtggtgcagcccatcctatgcctctgccagcagccatctgctctgtgactgagaggaaggatcgtttacagggagattgacgtgttagagagggaataagtcacacattctgtcccaggtcccttgtatgatggagccactgtggggatggtgtgttagtcatgagcttgtcactgtaatagaatagttgaagagacaagaagaatttagttggctcatggtctcagaagtctcaatcagtggttggctagctacattgcttttctacctgtgacgagacagaaaagttatgggagaagggtgtggtgagagagaaagctactcacatcattgtggccatgaagcaaagagacagccattgcaatgtgaaatgtaactatagacaatgcttaaatatacgtggctgtgttccaatgaagccttatttacaagagcacatgacaaagtggtttgatccattattatgggagtaaaaacaagaacagactgaatttggatcaatactagctttggtgcttagaagctgtgtttctgaggcaagctacttcagcctttggaggctttgtttcccaaaatgtaaagcaggagaatgattgctccctccagacctgggagagccagctgagagtgcatgcaagtgggagcgtctgggactgcagacacgcacagatgtgggaggggtttgggagtagctagctttaatggtagatctatacccggcagcccaacttcctttccatagctccatccagggaataacatgaaagagcgggaggcaggatactgaaggagtgacagacgagatgctcagaacgttgatttggtttcagcacaagcactgggcagacatgatgatgtccctggtcctccttgcacagccttcgggtgtctattcagcaacgccctggtctcattgcatccatctctagcagctcacggcttccagaaacacagtcctagacagatgttcagtctgtctggggattagagataccctcttccattaagcataaattaacttaatcaccaggtatgaaagataagcaacacaaacaaacagcactccctgaagctttcattaaaattaaaattgtacttaaaatttagctcatattttctaggactcaaaccccttcaaagagatagtgtctgctctatgttttctctgataagtggcagagatgagggtgcaggagacagtggtagactgtgtggtttggcttcacctcctggtcctctcaccaatgcaggatctggacagtttatagaagtcattcattcagccgggtctggtccctaagcacttccatcacttgtcagactggtccaagaaaacagaactcagaggcaagattcccagattcttactgctgggccccacactgtggaaagcacaagaaaaacaagagagaaggaacgccacccgccacaaatcatcacgagccctggaaggcaagcttcccctgctcctgcttgcttgtctgggctgagccggatgagtgcagaatgggcgaccggcgggtcacagttcaatgtagtctttatcaaacattacacacacggaaggaattcagccaagtctacagagcacggtaggaagaccatgggaggcagagacagctagcctcgaatcctggctctttattttgttttctgcctgtaatcttgggcatatcttactaatttctctgagcctcaaatccctagtttaccaaataaagaaaataacttcttgcccataacatcatcgtggtaatcagaggaggtcacagaaaggcctgaaacttatcccacctaaagcatacacgtaattaagaaagtcactggatatccaccactttgtggacccagaagagatctagatctcagtgacagcaaggcttttcttggcctgtgggtcagagagaggagttctgagcagccttctgctcagaaaggcagcgagaacacgagaacaccgtggtgactgggaactggaggattgtaagcagcatgatattgtcacctggtgagggggacaggaagaaaacctggagggttgaacatctcttggtatgtgcaaacatccctggaggacatgacctgaagtgttctgaacgattcttcagtgagtctcagagtccagtaccatatttccctagaccagacaatgtcccttacagaaggaacttgcttgctttggctgaactgtagagctgaggggaacctaggggtagagttgaggacacagggtcctactgtcatacacaaattaggacctatcttttggtttaaaaacctgctcccctcctcattacaaaacacagccccatgcgaccatttcaggatctcaaccaagtctggcacacgttcttcagaaataccaagacgcgctagccagagttttattttgtggtttgcctctttcctattgtaaagttgcctcgttaatcaaaacagtcattatatccgagacaatcaaagatgtctaggctctttcctatgtaacccaaaacatgctcatttataagagaaatagttagaatacttataaggcaagtattattttagaaaaagggggtggacagaaaagatgttttccgcaaacatttctgtcttgacagctcagtgtcactctctccgggagccctcagccctttgtggtgaggacaaatgtgtgttaaagaaagtggctggggttggtctcttatctgcagtcacagtgatggtagcaccactttctaaactgccacactcatctgacaggaagctgtgaaggctctggaaggttctaaagccaacatacagggtggcagaatgttacatagagaagtgtttggaagctcgccgtagataagccccagtgagagctaaataccagatgttctcaacaagggaaaaccatgatgcaagagacttaccaaattgcatttgcagaaaccaaatagcgaagtgttgttccaccccaccccacccctgactgccacccctgccccaggacacctgctatgagtgaggttcagcatctgcaaagcacagagaccatgtggtactgattttgtatctgaaatttctattgtgtaggcaatgtagccagccccctctgaggctttgcatgcacatggaaagaatcctgtctgtattgcttaccactcagagtctctcttaggaaatctcactgactgttgggccagcagcaaagggctctgggatgttgctagcagtcattgctagcaaccaggacctgacatgtctcttcctctcttctctagtgtcccaggcaccagtgcatcacatggtaatccccacctggcttgtagagccattcaaatgagtataaccacacaaaccaggaatggtcatatggccctgggtctcacactggaggatgaggcacgacctagagcttagtgtttggaaccttctcagcctgtactttggacctacctctaagcctgccattcccagatgatctagaatgggtggtccagaggacctgggcccagctctttgactctgttcctctcgtttcccatggttctgggaaagtcccttccctacactgggattctctttttcaaaagacagttgggtctaagcaattactatagcaccttccaacagtcaactgcagatccatgagcactttcagtttggtcaagactggcttttagcatcatggtgagtctttgattgttagaaacacttgagagcccttgtattttctgttttttaaatggtcttgtgtgtacgtgtctaagcatctttacttactagatttactcattccatgagtttgctactcttccttctcctcctttcccttccatccttcctccctttctctcttccctgctctcttctttcagaggcttcccatgcaatccaggctgggctccatcccatcctttacacccatcttctcagcactgggaggacaagtgtacgccaccacacccatcttggggctttttgtctgaatgatgattccgcaacctggtttgggactgctctctgtcagtgtcttcgaagagcgtgacttttgcgagtgattattttcttcttacttttctgttttctggctagaagctgtttcttcctcctctgcaaatcatgtgcctgtgatatcctgtcccctcccttctaattttcagtgtatctgaaagccaattcagcacacttattagagggtcggtaaagtgagaatatgtagggcttgaaaggctcttggtggcccttgtttcccatgcggacattgaccttagtaggtgagcttccatgtctggactctctctggctcctgtttcttcagactgttccacacagaaggggaggttcttgggtacctgagttctgagacaagctatgtctctgctcctgtggggagtatttgccaggaccttcttccctgttcccattgcccttccacatgccttaggctccatccctatcacctgaacttctaaaacacaccttccctcctgcacccctatcagttcccttttgcagggtcctttgcctggagtctgtgcattcctgtcttcccacctgcctggcatgcagctcttactcctctaggaaactttccatgatactctctgtgagccacgagtcctccccatccctgtgacccctctggcttatcctgtgttgtgtcagctgatctgtctggcaatactgccttcaggtatgaagtcttctgtggttgatctaatttgtctctacccaaatcaatgtctggaatctctgttctccattataattggaagaatgactgactgaatgaatgaatgaatgctgtgagtgaatcatgttgtctttgcctccaaattcagatttaatcctaatttgcaacttatattgtggccttatatggaaatatggtctttattggggtaactgagttaaaataaagtccttaatggataaataaagtccaagtggatgttaatgcagtgtccttgtcatgaccggtgtcctagtaaggagagaaaatgggtatgcagagacccataaaaagaagacaacatgatgacatgtagacacaagacagggaggtgataggcttacaccacagctcctgaacaatgggctgcgtggctgcctgctgctcatgataaacattatcactagtcggaagaagtaactggatggagaaacaaatgaagaggtaagaagagaaagctactacagagtgggacaaggacagtattagttacttctgtctttaatgaatcctcaacgatgttgagatgggaagagggatctgcacccattgctcatgtgacatcagcatgtggtgggatctttccaaagaactacttattctgtgtggtgggccaggcccaccgagttttctaatctggatataaaagactgaatgagacctgagaggacactgtgtggagacccttattctctggcccacggtcccctgctcacacatgttataagagagaacaggaggtgtgtcttagtttgtatttcactactatgaaagagacaccatgatgaaggcaactcctgtaaggacaatacttaattggggctggcttacatgttcagaggttcagtccattatccatggtgggaagcatagcagcatccaggcaggcgtggtgctgaagaaggagctgagagttctacatcttgacccaaaggcagccaggtagagagactctttttgcaggcagccaggaggggactcccttccatactgggtggagctttagcactaggagccctcagaaccctcctacacagtgacacacttccttcaccaaggcaacccctcctaatagtgccatttctcatgggccaagcatattcaaaccaccacaaggtctgatgctatgctgtaccactgggggttcactactcaatgcttttccttagtaaatctcttgcattttgcgtatgtgcaggttttacatgttttatgtgcacatgtgtgggagtgcatttccacctgtccactgaggtggggtctcgcagttaaaaccagtgctcaccgctgtgcctaactagatacttagcttgccacgtgagtcttcggtccccaccttccagtgccaggattttagactggctgtctcatgcccacctggtacttatgtgggcttctgggaatccagactcaagtgtttgtgcttaatgcttgtgctacaggcctttgacccttgggtcatctcctgagccacttgtaatgaatctttgtccttaagtcttagctattttctccaattatatgtagcacatttcaagtatttgctcacttagaagtcacggcttttctacaacgagacactacatatgtgagagtccccagggaaatctgcagtaagatttagcagatttcaaatgtctagatcatgtatcctcggaaggttgctaccaaatggaaaacagctgcaggagaatggcagttgcctgagaaaaatggagactgggagctgtctgagaaaaatcctgcatgctttctaggtaatagaaggagtgtggtgacctccgactggtgaggaagattgcttttgccctatctcctgtggtttgcatactcacctctcccttatgcatggatactcatcggaaggtctgtgttttattgggatgttctgaatcccaggaaggtagagtgcaagctgcatcccgccacttgtcaccactcctgaacccagaagacattccagaaggatctctgaagtgacagacacaagcagaggttcgaggacaatttgcaggaattagtccttccaccatgtggagattgggtatcgaactcaggccaataatcctggaggcaagcaccctttcccaccgagcatctcacaaccaagccctcccattttaaattcttctttgtcactgttgttctgggagcagtctctgggttagtgtagggtctcctcctcgttgatgccacactatatccccaaagcaccaacctcaggctcacactgtcaaacaggcaagctttccccacacatctatgatcagcagttaagcactgatggttgtgctgtgtcaaagaacctgagagttgtaccctccaggagtcccagcttggagagacatttgaacaaagaactgcaatttgaccaagagcaaagtaagtgttaaatgaggcctgggcaatgagctataggatggagagtgattaattctgccttcacagatcaaggaaggatcacggagaatatagacatttttaaaaattttattgcataaatggaattgtgagcggctgaagtcttgggttcacgttctacataagaaactcagaaatagagtccccatctccaggtctgactgctcagtctgctgactcaccttgaagttcatagctgtgagagaagagtctacaaaaataattagagatacaaatctcagtgactttcttattattaggaagtgattggggtcatttggaaatattgcttaatcgcgtgactttcagttccacatgcttctgtgtgagacagtcctaattcttagtgttgaaattaatagcaacctgtgctgctctattttattgtgatcacagtcgtcagcttcatctcaaacaaaggattgtaggtgggaacctttgagttcatccctcaacaacatacaggccctggatggagacaggtaatagatttagggtcttagagacctgcttagaaacttcacttctgggagtttgttctaaaggtataatccccaaataggagaataatagtttgcataagtgagttcatctgagtaggtaaagttggaagcagtcttaatacatgacagcttaagggacattcatccttgcaaggatgcctaaaatgtttatagtagaatgttaaatgtgaggctagctgcaagctggtatatattatatactgtgatatttaactgtgtgaagatatagtcacagaagaagactacaagaggtatggtattaaaaacacaaataggagacctttcgtattgcagctcaggcctctgggtgcagcactggccagcaggatgtgaactttaagggtccaagaagcatggctccaaaggttaccatagtctttaaaagtaaaatcctatgacaaaccatggctctatctgagtccacagttgtctcccacccaatacaggaggaggggcagacagagaaggccaggccttggtcaaccctggtaggcaggtgtgagtggcctcatgatcgcaggggctcaagttgttcacagctggactcagataggaagaagttacaggaacttgaacccactgcccacatagaaaaaggaagcccagagttgacagggcccagccagatgggtagagatcatagtcagggtgtccttgtaggaaacagttttgagcagacttcaaggacgaaggccactgtgatggaactggccaacccctgtgagcatgcagttggcacgaacatgcattggctgcatctggggggtttctgttaggtgccaggattccaggcttgaggcagaaggataacagcagttctagtgagactgggactctggttgctgggctaggaacagctcagggcttaggcagggctgagtagattggtaggggctgcaggcatctttgggtatcagtctgagacaggtatctggtgtaacactagaaggacagtgtactacatacttgataacttggaaaagataaccaagcagctataaatgtccactgggctatcgtctcttgttagaattgtctccaaaggccagatttcctaagagaaggaagaccagagagtgggaaggaaggcagctgaagtttcctgggcagactccatccccatgtgaagctgagtcggagtttatatttgacccacaccatgcttgacacccccgtgctagctggaaaaacccacaggccccacgagtcagaatgacaggatagatgtcatcacatttaatgtgcacagggaaaaatacagcccagaagtttgtctgaaggattcacattcacctaatctctccaccttgccagcaaagctatttttcatgatggattcatgaagtatagcacagcatgtctggacagcctgggcactgcccatgcccgccactgtgtgcgtctagacaggggggaatgtatgtgtctgtccgcagtgactgcttaacagcagtttgtgaaaagaatgtcaaaacctggtatgtgtagcagtcgcatgcactgcatgttcttctgcgggctggacacagggcctcggggatgccagacacaatctctgctactgagctggagccaatccctttaaaagctaaaaacggagtttaaatgggatctcctcacattacatcatctggagttagacttaatctgtagccaaggcaggctttgaccctttagctacctcctgcctcagctacccaagttgttgggatcataggcgagctgtgtcacgttatatacataagtgaatatttgtattcttacacagtcttagttaaatctcacaatgaccccacaagaaattatccccgatttaaaaattaaacaaagagaggctctgaagagctacatgacttacatgcaattacatagcaccttaggggcagtattgagctttgaactgtttgggctccagtgtgagtgctgatttcttttcctttaaagtatataagcttttttaaaaatttatttattctttcagaatttcatatattcatagtatctacaagttctttcatggaaagaattccattgattctcttttatttcctgtcccaccaaattcctttctcttccttttacttttatgactttgtgtgtgtgtgtgtgtgtgtgtgtgtgtgtgtgtgtgtgtgtgtgtgtatgtgtgtgtgtgctcaagcctctgagttcaattagggctgcctacatgagcatggttggggttatttgattaagtagggaccggtggctatagcaccaaggctttctctcccttcccctgcaatccttagctatcagtagttctcctgtaaggggtagggccttaggagcccctctcacttccatgatagaacgctgatggtccccagcttgtgcaagtgggtgctgtttccactgaggtcttcagactgtgccatcacaatggcagctctctatagtccatagctgggactgctgaaggtctatcaaagcatcttggcattttcacagagtgctgcagtcatctaacctcccaggggaaagccgtggtatggaaggagcgagacctgggttctgggttctactctctgcttcttataggatgttggcaagtgaatatccttagcccttggtttccttatctataacataagatgatgaccacttaacctcgtagggctaagggctaaacggctaagatggcatgcagcatggtttcatgtccaggaaactctatgtaccgtctcccattattactgccttgtatttgatcgtgtctctgagcttctgctgggagcactgtggctccagaagccccaagaaagcatctaagacccagagtcaggtagacttttatccaaataccatctctactgaggcacacaacggcacaaatgtacactcttgtcacttagaatgacttttagaaagaaagacaatgggattagcatctctattaccatatcaggttcccggggaattactacaagacttattttggctcctagcctcagaaacgttagtctatgattgacttgacctgataaggaagcgtatcctggtaggaggtatatggcgagcaagaccacttagctctcggctcagaagctaaagggaaagagaagtaggccagggttccagagttctggggactgtcagctgactgaaaggctaaggtccaccccttaaggtttctcccactcccaacagcaccagcctggccaccagacccttaccacatggacctttggggacacggggttcattcctgaaccatattagccgagtccagggaaaggtgctcactacagcaaggcaggaaaatgccttcccaagaacaaatcagaagacacattcattcagaaggggaggtttcagaccaagactggtaactacttactttttggcagtgggctgagaaatagatatgctttacatattaactgtttattcataatttcagtttcctttcggagactgtttttacacagagcaaaacaaatcagtaagtgtaatattttgttgaaccacacactagatcttatgtttctaagaatataaccaagtacacatttgatggaattctcctggtactggataatgttttaaatcatttctttttaaaatttttatttatattggtgttctgtctccacgtatgtccatgtgaaggttggttcccctgaaactggaattatagacagttgtgagctgctgtgtgggtactggaatttgaacctgggtcctttggaagggcagtcagtgcttttaattgctgagccatctttccagtcctcttaaatagtttcttaatgtaaagatgatctggaagacaaataagagaacagaaaacacaccaaaggtctgaaaaagcaggcacagtaccaggtacacaaactgggttgcccctttgggcattatctctgccagcctggagcttgggcctgatgtttggagaagggagatgaaatctagaccctaaacagtgaaggagttagaccagagatgcccatggagctagaatccctgagggatcacagctttagtggaagacttggagaagacacacccctagtgcacaatggataactacttagtcatgttctgggcctggaacaagaagtaatggctacctccttaagaatccataaacccctcttcatggaggtttggggatcagaattcacattgtatgtgcagcttgagaagtaggccattcatggttcagtcactggtatttccagcaatatgactaatgggaccaactctatctggaactcaggcaggcaggtctgaaatggaaaggaaaggcttacttaaaatcctcaggacagtagggcaaatgaggaagactatggggaaatgacaaagctgagaataaacctcacaacggctatggaaattaaaattattgcatacagaccactgaataaagtcacttaatggctttaaagaaaagaaaaaaataaaatcaggttgacaaacttatgaaaaaataaaagcaaaacaaacaaacagacagacaacaacaacaacaacaacaaatacccagataagtcagattctttttttaaagcaatcagacctttagaaaaaaaagcaagtattattaaaacagaagttgaggacacaggcaaattagcttactagaccaagtgaggagaaatcaaagagcacgtggtagaggttactaagaatcttatgaacacagtgaatgggaaagtgagggagccacagaggggcaaagaacactacagaagacttcagaagaagtaaagatgagaaccttccaatgaaacttagaaataaatggcaaaatgatcagaaagcccacagagttccaagaaatataaataaaatgaactggggatagtgactcagcctgactactgaggcaggaggatttctgtgagttgggagccgctttggtgtaaatagtgagtttcaattaagcatgggctacaatgtgagaccctgtctcaaagtaagttaattatctgattaaattagccattcacaggtagaaacatcagaaccaataaggtaccaaaataccaaagacacagaaggacagtgagcatggcagaggagggagaattaggcagccaggacatttgaagggtgacaacagaatccaacaggaaaagcttcaaatgcccagaggaatgaatcaggaccatatttcccatgaacgtgccttaatgaagactcttggaaactcagagcaacagatgccttcactgagggcacgaggctctgacttcagggtcactgtgctgcaaagagcttaataagcgctagctattctggaatcaactcccacatgccgagcgcatgaacatgggctcattaaagcacccactagcttctgtttcccaccctgtaacatggggaaatattgtttccatttgttctatagacagcttgtatctgagatgcaccttaccccaaagcagctggggataaacaatgcaaacccccaaatctcctgggccctacgttctagtggcagtggttatgaggagggagaaaacagaggggaaaaatagttaagctatagagcaagtaaggagagcatggtttgtgtcagggattgtttggcagagcctcctaaagaaggggcagagtaaggaagccaagaccagggaggacaggctagcaggcaatagagcaatagacaagctcactggcataggacttgtgccaggcacatccaagatggcagatagaaatgaagccaagggaaccagagagaaacaggtggagtaggacaacatcgccttcacacagcacgtcccctgacagagggactgtggagaaacagagggaagtggtataatgacatcatagtcttcccagagaacaccagtgacagggcagggggcagcatgccacagagcaagccgacatgacgacaaaccccagtcaggtgtgactccttccagcccaccagctggctgaacagcatcttaccctgctccctaaggatgcatgccactgcagtgaagtgtccctgtcccaccaagggccatatgcagtcatcttgccatgcagaccccacaaagtaccaaaacaccactgagatcttgagtagcaattgtatggcagatagttagacccctgtgtggcctgagcccctaggctgcagccacatttccctactggcccagcccagcaagcccaacttgccctccaagaaagcaagttgacacagagttatctgggggagtggggacctcaattgaggaatgacctccacatcacactagcctatatgcaagtccctcgaggcattttattgagtgatgattgatgggggagggtccaggccactgtgggcagggccacccctaggcaggggccctaggttgtatgagaaagcaggctgagcacgccagggaaaacaagcaagtatactgcattctgccatgatatctttttcaattcctgccttggcttctctaggcggtgcgtaagataatccctctcctcccacaagttgaatctcatcaatgttttaacacaacagcaaaaggcaaactaagacccccccccccaaagagcggctgacgcccagccctcctcagctacctttgctgcatccacctggacacctatgtgtcagaccccacggacgctgtccttgcagggtcacagagcacagcctcctgacccccacccctaccccattctctgccaccctccctgacgctccgagtctccaagcatttttttgctcaggatgatgaggatggtggtaacagagaatgggaaggaggaaggaggggaagggaggctggtgaggagcggaagctgcaaaggttatttggggcttattgcggaagtggtgggagtcctgagtcctgccaatgaggctgagcacttgagggaggaaagaagtgagccagtttgggtctgcagagaggagcaaagtagagtagggtaggctgggctctggcttcaagtgtagcacagagagatgctcaaccctctggtcttgcctcacagagctgacatgagcctaaaagcgaagtagcaactcgggatttattattattattattgtaatcatttctaggtaaactaccctaagcacacatcctgtgagcagtggttgggcatcctggactctcaagggagcctcttctgtgtctataccacatcctcactattgaggctccattaatccgtccaccctctcctagattgccaggtcacattcaattaatacgtcaagaagaaagctgctgagtgggcactgagttgacatttgcttcataaaactccttttctaaggagcaggaaggaggagccctagagtctggtgaggctggctgtgacccacagctacagcctctgagccttttcacatgtggtccctttagtttggggcagccaccgccttgagaccctcccatcccagtacagtgtgaagaaggctcctctaccagtggatttggatgcttcttcctgcttcaggacaaaggggattctctgcagttgccctatcagccccagaccactcacttaaagtacctgccggtcttcctctgcaggcatttgtccttccacactgggacatgtgtgaagtcactgctgttcagcacagttaggcagagggactggcaagtggagaggaaaaggaagacagtgggggagggcagggcagggcagggcagtggaggggagggcagggcagggcaaggcagggcaggggaggggaggggagggcagggcaaggcagggcaggggagggcagagcagggcagggcagggcaggggaggtgattgaggcttcaggaaagcacagcgagggaggacagggtgggctgtggaactgtcctcagaggggtcagaaggaagaagcacatgtgtcctaccagtggcacaggaaatacctttatatcttcagcactggcctagcctggatccctgtgccctttgtattcccagcattctctgctttcccagcagcctgtttctcccatgggtctcagggacagaattcaacaacccttcttttatctacttagaggtaactgaagttttagacaatggaacagcatattcacacaaaaatacacacagacacacaaacatacatccacatccacacacacccatacaaatatgcacatagccaaatatgttcacacacatacacaggcatacacacacacacatgcaagcacaagtacatgtgcccataggcttctacacaaacacatatacacatgcatatacaaacacagtgaggttttagaggaacactatctacagggaaataaaacacattccagcattttcttctgacagcctttactgtctggaagagcctaagagctgtcgagggagcaagcacaccagctcactgctactaaacttaagaaatgggagataaagagaagagacagcttggcttccacctttgtctttatgattgtatttccatgaacatagaactttagttagaagcaaaacctttaaacagttggcccctccccatcctgactgtgacttttctctcacctgtatcctcatatgggacagtttgtagagatctgatcttgagaggggtttgtttatctctggtcttagtgtgtgagcttaacccctctcccccgcttcctctctgactgcaccttagcttatggtgagagcttacagctcttctgagaccctttctgctccactgtgagctcccattaggaagggacactgtgatgcttattttgtatccccttatgtgacagcacttgtcacataagccacctcaccaatttctctgactgtgtaataaagacaccgagtacctttggttctgttcaaacatttggcaggaaggtcccaccccagtccctctgggcccctatgcaggctgggccccatggatgtcctctgagccactccacaggatctctgtagaacttactttaactgcctcatgcaaagcagcctgcaaaaaaagagttccttgtgctttctgctttcagctttccagatatctatatggacagaaaacacagaattcctccagtttctgacagaatgtcttcatggaagcataagggttcctcgctttccatagtcaggtactgactagtcaagtgcacatagtggggctgatcgtctctttactgccacatcagggtgtggaacagggaactggacagggaatgcaacaaaaggcaatgaaagccatccccaaataagccatgggcagtggcacaatccctgtaatcctagcacttgggaggctagcctgggctacgtatcaagactatacctccagacaaataaatccccaattcacccttggtgtaggcagagggatgtgaactcggaagaaaaggaaaggcctggataagaatccttgttcacccattttcctgacccacgactgtggatcctcaggcttattatttaccttaaatgtctgcctgcctgcctgcctgcctgcctgcctgtctgtctgtctgtctctctgtcacacacacacacacacacacacacacacacacacacacacacacacatgaggaagaacggaacaggaagtctgggaagcaagcagcatgctaacaattcctccaatattttaccatgatccaaatgctgaatattttgccccttttgtttcttctttttgggatctttttgatatcttttttccttgagcacatattgactttataattaggaagatagaaaataagcctgaaagaataaaatagagggaaaaaatgcacattaagaagcaagcataagttggcactgtgtaaatggtagctatttttactaattagtcattatgcctaataataataattaggagtaatgatttcctctgggaatgaacttgtgcatttgttggttggaggttgtagaagactcatggctcccttgccgagagatagggaccagagtccccttccaatcaggctgccccttacctaccttcctggctctcccataacctcagctccctgctcagcctcatcccatcgttggtgccgcacatcaacccacataagtctacagtgtacaaagctcctgtgcccacacaaacgaccatcacttctaccgtggcagaaagtgagacagattgctgtcacccctctgctgatggtttttctctagaggacagtgagagcaagagaattgggggtctcatctgcttcctctgtgtgggaggtagagaaggtaccccacggagactcaaacatctaaaaccacctggatgttgctgactggaaagagttcaggccccagtgagtttctcttcagtgattccatcggccaggaggagaatttagactaaaactccagcctcctttaagtccccaccagagagaagagaggttctatattaaggaaagagtgggattcctcggaagctttgtgagatgaacaggcaggcagcatctctgaacctgtgttttcaggcagaaaaaaaccaagcaatgggcacagctggatcccaaggtcctcgatgttctcaacctcatgacatgatgattataaatagagtggactctgggaagagagtggacttggatgttttctgtgctccaagggcaagctgccaaaatgtgatggataagacaagaaaggacaggaattctctctggggctgacactgatcggtccagctcccagaggagacaaatgatgggaagacttctaggtggcttctaaaaggagaggaagcaggctctcctcagatctcatgatcccaagactcccctccccaaccccttgcacccagtatcttacttactgtgaagagacaccatgaccaagacatttaataaaagaaaacacttacctgggggcttgcttgcagtctcagacggtcaatccatgtgctggtcatgcacatagagctgcattccgcacaggggcttatgagtgctccattctgcacaggggcttgtgagtgctcctgtgtgtggaatctgaggagcaggacaccatcaaaccctgctctgggaactggtgttctctatagagggtgaggaggtgaaggatggagatggatgagaaatgaaatgaaggtgtagaactgagcagtcagcctcgcactcccaggttcagcatctcgccgtgcaaccaaccacacagtggaaacactagggaaggctgtatctgtactgaccatgtgcagacattcccttgcttgcggcagtttcctaaacaatactgtgtatcaattctctctatagcatctgcattccatttggtattgggatctggagaggaccccatacatccaggaggatgtgagcagcttctctgcaaatatgacgccattttttttttcataagggatttggacaactcgggcttgaggctccccaccattggtcctggaccacatccccatgagccccaaggaatgatagtacaccgttgaaaacagagggagaagtccctggaggttctgaggaagcagggtgccagcaaagtgctcaggggacatcagactaagaaggagtcaactgaacaaattttggtaggaatgatggatcgattagtgggtagggtaaagtcagaggtgacagggtgggctgtgttccttggatgtgataggaaggatgttttggaagaggatgtgcatagtggcctgactgacaaagacatcatgagagttcaggtatctcttcgtggtgacaaaaggtaggggtgtcataggaacctgaggggacaagagagaacaggggagaggacttacttggccatctcatattatgagggcatggggaaaattggtttctctagtatctagccaccaggtgagtagagatatcccttccaacacacacacacacacacacacacacacacacacacacacacacacacacgcatgcatgcacgctagaggcttgggttcaggagagaagctgaccaatttaccagtgacttgcccaagtatacacatgttcttgaagacattctttatcctacatagacaatgatgggccagtgtagcctcatggaatgtccatcagtctccaagcagaaggacattctgacacaggttgcacatagagaaccccaagggcactgtacagtgaaatacagcaaatagtgactcgtctatgggggaaagtcccaagaaggtggcacaggggctgcagggaggggaagcagaggcttgtgtctctattttgaaagaggaaagtctctggaagttggtggtactgatggctacacaacaaagaatctctctgacatcaccaaatttggcaaaatttaatttaaatgagtcaaaagggacgttctctgtcaaatggagtgcgtcaaatgttaatttattgttgaggtcctagggatcgaagccaggacctcactcatgttccgcaaagcaccctggtgctaagctgcactccccggccttggtttacaaattcaaacaaacaaacaaacaattttaaaaaacaattcaaattaaattttcatctgcttactttgtgtgtgtgtgtgtgtgtgtgtgtgtgtgtgtgtgtgtgtgtgtaaggtgttatgtgtgaagccaagaggataacttgtataaactgcttctctcctttcaccatgtggatcctgggactagaactcaggttgtcaggcttggtggcaagcacctttatctgctgagaaaaattaaaagtctcctaagcagttttcttagagtcaggcatttggagttatctcccaaagctgctttcacctaccttgcctcttactctgggtgtggggcgcctggaaaattcaccttgcctctctaagcctgtttgtcctcacctgtagagtcatggggctggggagaagactgaagacatccacacttcgatgcctaggacagagcaaaccttttgccattggtcaatttgctattcccatgctggcatagctgggcttagatagacatagcctgctccagcgctcatgagctgtgtgaccttgggctaacctctaattttcccgtaccttagttcccacccatagagagggactggtaatccctgactgacagagttgatgtaggacttggtacaaccatgtacaaagcccccaaggcagggcctgcaggccatggctgatgacattagttgtcattgtgtgagcacagagtcacagataggcaggaagaaaattagcatggcaacacgacacggcatctctggctgttgtataatccgtttccacatctatttcatgttacaggcagaaaaggctcagagcagatctgcagagtcctgaaattatccctctttgctccagaagtgtgttcgtgtctgaaatatgtatatatttgcaaagagacaggcctaagtaatgtatatatttgaaatatgtatatatcctaaggaatgtgtaccaagccactgtcctatactgagccccttgctccatcctgagggctagagatgacctcaaaccagatgctctctgcgaagagctgattgtggcccatgggagagctgaggatgctgtcgcagccctgaaacctatatgccaagccaccttggacaagtcaagttcctcctccaaacttcagtccttgcctgcatacagaacaagcgtgctgaacgtggaactccctgtgcccagagccttttccccccttatggagagcagacttcagggtgtcaaatgttatattgtacgcacatccctctgcaccattcacagttgaccttgggaatcttacctgtcagccaggataggtctgacccctcctcccccatgcatgtagggatcacagcatcagactgcccaggaagagaaagatacggggtccaggtagaacgcagaatactgagaactggagagggaaatgagagcagagatacagggcagtggtctcctggtgatacaactggagagggactgatggctcacagccacaacagacacaagtcagcaggggacctgggtaaagcaggacccattccaggtcccctgactcccaagcagttgagacctgactcccaaagcatagcacacagctgccatggttcaagtaaactgccctgggaagataacagatgctggggcagacccagtgcccaaggcacagaggacccccctcttctcatgccctgtcctatccctgggagcctctgctcctgggtccaggccactcctctacatctcagaccatgacaacagcgttcacttttcttctatttgcatcttccttctggtcttctctctgtctcacgccaaggcatggtctgcccatctcacatgagacactctactttatctactttatgcggtcttatctcaagctggaattgaatcaaatccagcaaagctccgttcagatcctggggatcatcggtgtgtgcactggcatagtgtagcctagtcaaatgctcagtaagcaaccaaagtcgattagcactgtcagaaaaattgcaggttatcattcagccatgcctgccatccatatgtatgaagcccgcagtcctgactcccttgtggaatcaggcacagccattaaaggaaccagttttagagacagtgttaacagtgttcccccaaccgcattcctgtaagcggcagtcagtgttttctcaggtctcaggtctgtggcaacaaaggaaacttcttggctgtctgcgtgtcctcagtgcttgcaaagattttgatgggctccagccacttaagaagtgggtcacttgtagaaacgttgggcttcagtgaacgcatcaagcctgtgtgtaggaaaaacatgctgttttctctagagctgacctgagacgaccagcttgttcctgagaacagatgttttgtgaaacccactgtgacaggctcatcatcttgggctggagatgggccagcacttagtcaccagccttgcaaggacacaaacgcctctgggctgtccgcttgtccctggcttgcagggcatgtgccaccctccagtgctcaggatctgaagttaaacagtttaccagtctgggaatggaggtggcgacagtggcagcagctagcaggtgtgccttgggtaagttgtttccaaggtatcgtctgggaatgttctagaatagttctgtgcacctgactttcatgcagggctcactgtgcaccaggccctgttgaaactgtttctatgttattgcagaataaccctctatgaccatccattccagagaggaggatactgaggtctgctggtcacttctaagagctgcctcccagtcaccaacagatgggaggtgaggggcagggggtcacaaagtcacagaagtggatctcctcctggttctggacccagagtacaaattatgtggccacagctcttctgatcatttggagagaagcagctttggatggctctggtttgtttcttggtaatagcaccccagtcctgtctgtgtgtgtcaccattatgccaatctatacatcaggacacctgtcactagatttagggtcctctaaatccagatgatctcaaagcttttaacttgtttttgttttttcctctgcaaagattgtccttataagggcctggacagtcatggtcttggggattagaacctgaaaatgtctggaaggtgaggcacagttcagcccttaactaatagtttcttcaaggacatcttgccaagatcatatagcaagatatggtctctctacagctggtcaatgtgactatgggttattcagctctaaatgggacatgtgtatcatacccctcctctcaaggctacaagattatcaaggagtaaggtagaacgattgtaagaggtggaggtagtgggcgactacagtgaaatagtgtttgctggctacagtgggcagtcgcacatctgaacttcagcaatgcagcccctaggaaacacccatgctccagtagatgggcccacacccatgtgcacataggaagggctcacacccatgtgcacatagacaccactgagtggactctgaggtttataaaaggaccactcgaaattcagagaaaatagtgggatggaggtgggaaggaagagagagtaggggaggggaggaaggagaggggaaggaatggaagtagatttgagtacaatgacatgatatgtgtgtcattctcaaagaagaagagggggaagagagggaggaggcgaggagggagaagaataaaagcatcccacatttcggagtggaacccaagtcggctgaactctctatgaagccccagtcaggtactaagtcatcgcatcagatactcctagctctagtatcatggagacaacataaagtcaagagaaaagaggccaacctctctggtcttaacatacccatgctgaaaccaggcatgttggtgcacatatgtaatcccagctctcaagaggcagaggattgtaaattgaagcccagcctgggctatgtagcagggagatcctgccctagatgagtcctggggtcaagcagatctgtactcataactggtcccattcttgactgccttccggcacattgtgtccctcctggtctgtagggcagtgttgcatctgaaagctgggaatcctgggaagaggacatgtgaccaccaagggttctggtgatggccaatgtgccctggctgcaagagtgcactcaggcagagctgaagcacctgcctcacagccctgaccacctcactcagggactctccagactcagggcctccaaatggaagagggtggggccgcctctgaagctgttccccagagaccaggatgaggacaaggcttggctaactgctcaagagaagttgaaaaaaaaaaaaaaaccaagaaaatatcgagctgcaggttctgggaaacaaatttgttcaacttggaacactggactcatcgggatgcaggtgggacatctgtggatctgtctggcaggtgttaggcttagaaggtgacttttaaaagctacatgaagccaaagactgagaggaagaaaatttaacctgtttaggctgactcctgtgctgtctacagcaatgggggagagagcaggcttgaaaggtgaaaatgtgctagctacaaactcattgtttaatcagggatgggaagctgtgctctgagcctggggcagcgagcatcagctttagccagggttcctcaaatgctgagcaaggcaggagagacccggagaaggtatacaagtctctctctctctctctctctctctctctctctctctctctctctctctctctcacacacacacacacacacacacacacacacacacacacacacacacacacacacactcgctctccagtaaaggccctgataacagattctgagtcttcccataatcacccaggagtctgtctgcacagtaaaagctataactcctcctcctgacaaaaggtgtacctttgctgattttgtttgacagtatgtctcatctgaacgccatggagttccatggacaggaagttgtccctgaactaccactttctatacatcccaccctacagcatgtgggcgtgtgtgtttggcagggtgagggtaggttgctagttgttgccatgacaaccaagaaagaggcgaatgagctctgacttcagtgcctgcttgttagtaatgaaacctcatagtgaagactttgtcccctgaccttggagaatgaggtccacaccatattcctgttggcatggagacctttgactactcaccaaatctagtccagtaaatattaatttatttgaaagaatgggtgttaggaagatgtcaaggggcctggggagatagcttcattggtaaaatgctccttatacaagcgtgaagacccgagtgcaagcactagtgcttacataaacaattgagttaactgatatgtgcctacgatttctatgccagggaggtagagataggtgagtccctacctagtcagttaaggtcagtgagagatcttgtctgaggaaaaaaagtggggaggactggggagatggctcagcagtaagagcactggttcctcttccagaggacttaggttggatccccagcaggcacatggaggctcacgactgtatatgactgtagtctcaggggatctgacagtctctttcagcttcctcaggcaccatacacagacatgcctgcaggcaaaacacccatgcacacgaaatttaaaagtgtttaaaaaaaaagaaagaaggaaaggaaaggaaaggaaaggaaaggaagaagagaagagaagagaagagaagagaagagaggaaagaaaagagaagagaaagaaaaaagaggagaaaagaaaaaagaggagaaaagaaaaaaagaggagaaaagaaaaaagaagagaaaagaaaaagaggagaaaagaaaaaagaggagaaaagaaaaaaagaaaagaaaagaaaagagaggagaaaagaaaagaaaagaaaagaaaagaaaagaaaagaaaagaaaagaaaagagaaaagaagagaaaagggtagctaaccagctcctacagattgatctcaggcttctggcttccatatattcatgtgtgctgtgacaaaaacagtcaagttataatctttgcaaatcagccacttgaagaagcatgtgtgtttgtgtgtgtgtgtgtgtgtgtgtgtgtgtgtgagagagagagagagagagagagagagagagagagagagagagagagagagagagagaacttctagaccctggtctctgtatccccacatccttacataagctgtcttgtattgaggacatgtctggcattctctcaggttctctacatttgatattccgctcagaatgaatgaaccccatcaccttggcactgtcacacttagcagatgagaaaactgatgcctggagaggctaaggcccttcctgaggacactcattgaatgacaggcaggcctgcttgatccccaagatgcctacagctcttaacctgtctattgccttggtgcaaccttaagcttgaactcaatgcagtctctctagagcctctagacctatcggggagacatcatctaaaaactgtactgccataactaagcattcagtgcttctgtgagaaacaccacagcacactgtctggatgtctgcttagggaattgagtggtgacaagagaaattaaatactttaatagattctgacaacaactatatgttaggggaattcaaaatcacataaagtaaaaagtcaggctaatatgcatgcttaattacgagctgatttagaaaaaaaaaacaactaattttgttagcgctatagttctttaaggaaaatgagattgtagagtggagggagaggtcaacattcctagagaaggtggtcttaaactgaccttatgtccctcgcttcagggtgggtacttgaaaaatttgtgtctagtggggcacggtagcacatgcctgcagtcccagcactttggaggctgggagcagagcgatctagagttcaaagccatcttaagctaaataacaaaactgtttacctatctatctatgaacctatatttctttctatcattcatacacactcacatgtacacatgcatctgcaaacctgcatatgcttgtgcatgcacagacacacacacacacacacacacacacacacacacacacacacaccatgagtggcagcagctttccacacaccatgcttcagccaggatgctggccccttgcttttgtgctcccactgagcccctccacagctctggaagccagactgtactgtctgctccctttcaccaaagggaaactgagtctcagcaataagacacattcagtcagtaccagatggatcctggatgaagttactcttgttgtcatgagttatccccatagccttgttctcaagggaactgagtgcttccctgaagaggacatccagcagacgtcatgccattcttcccactatctgagctcaagagcacattgcatgtgcagtcactcactagcaggccttcctcacatgtgtgacatgtaagagacgaggggaacacaaatcagtttatttccaacaatctttcaggagaaatggccatgacggaagctcatgatatacttccaccaggaagtaccatgggaaatgcaggaagcaaacttctgagtgggagtgagggaaagaggttgtggctggcctctaagatgagctgtaaaggaccaacagaatcagaacctacttagggatgaaagctacacagggcatcatcctcccagacccaggtgcctgcatccatccctgggcaagaggtgtggatctggaagccacaagattgacagttagcatatactacaattgctggtctactacagcgagaccaatgcaaacacaggcacaggctgtccttgcctgagaatggctcctcccataaggtctccctcacacaggattctactgagtagtggctcaccagggaaatggggtgcaaatgctgtgagccctgtgtcaccgaggataggtggtttgggattcaacacctgtcttcagggatgaggcaggagattgaaaggtgcttcaggcaagtcagccagagaatggagttgactggagtctgccgagctgctctctggcctggtagagtcatatgaaatcactgaatcaggattcctgaattacacagcagtcaaaagagatccaggacttctgcagacaatgaatgggcttgggtgactggatgatagaaagaaggcagtctccacagagtgccatctacacacggctgtccccgtccaccccgcacccatgcagcctgggctctcatgcagaactgtgtttaaatactacaatgttttgtgcttcagccttgcactgagtgtgtaattacgaggatcccttcattagcagagctgcacagtgaaagctcaagtcggccttttctgctaattctggaggtggcgggcgaagcgggctaatacaaccgctgattacaattgtcacacagtctctcggaagccacgaggaagtttctgctctcctggaatgcgcgcaggagctttcagtgactgagagagaaggaagcaaaggttcattctggcttcagaagcagagacgtgtaggagtgggaatgtggagtatgacatagagttccaatccctgcctcctcgctgagggtagttctccctccttaagactcagggccaccagatataaactcgagggagtcattgtgtctagttaattcgagtgttaggagaactcgctcacatagtgactatactcactgcaagatatgtgcacagtgaggctgtgcggaggccataggtttagtcatagattgagacactatagggactgcccttctggaatttttcaggaaaaaaaccaaacaggtacttcatggacagttagaaaaataataataatttaagcatgataagtttttttaagaaaaaatcaagtatactgtgggtttttttttttttgcatcctgtaagtcaaagagtaagttctaagtgaatctcatgacaataataatgatgatagcattaatattgacaatgacnnnnnnnnnnnnnnnnnnnntgtgctgtgtggggtgggggtggagcaatgcttccatcaggacgggacttttatgatggcagtaatcctgagccaaaactgaaacataaggaaagatgtgcttagtcagtcattgaggcgccgtggagcatggcctaggccaggacaaggggacaggttctacgatctaagcagcctaatgtgagactctcccagcggctggagcagtgggggccaatcctgtgtctgtgtccagttatttgatggaggaggagccctaatctccctgggatctccctggtaaccatctgcccctccagagctggcttttagatggggagttttttgagatgaagaaacaccaggtgatggtgttagaagtagccgactggtatcaaggcactgtgctaggcgcatgctccagtctttctgattactgctacttatatcaggcctgtgggttagagactattattattctatcttacatgaggatttgaggttacatgacttgcctaaggtcacatggctccaagcagcagagatgatgcaactatttcttgatttacccgtctccacatcggtaccctaaaccatccacgtcaccaggctccatgtccctccagcgaggaaccacagtagcagggctccctgagcactgtgcatggaacatttcatctattgactgtgccacaatatagtcaggaaaagggacaaaagggaagacacatgacacggagagtactctgccaacaaagaagctcaatgggacgctggtagaaaatgagctgtcagatccttcatctggaaaccaaaaatgagagggctgggctcagcgacccctaaagagctctccagccctgaaaagacttgccttcaggtctggggaagcggccataatactgtgtcctcgagtttgtccttctgccgattcatcgtctggccaagcgagaaaatgctcaagcagccagctcaggtcccggctccgtggaacatcccacagcaggggcggagatggggctgttgcctctggcttcctcaatgctttgcattccacaagcatcctatgtcatgaattacaagtgctctggatggaaaagtaacatgctgatctgtttggcaaacaaaatggagcaactacctccagccgagcaattgacgctcccaaaaatcacacttaagtcacagagaagctgatagtttatcttggtgcctcacagaaaggttgaatttagaccttaaccaatagccccatttttgctggcgtagactgtgcccacccttgtctctttatgcctttcttaccccataagagattctctctacaactattagggaggagaagatgggttgaactgagcaatgacaagctgagaaagcgaggggaacatgccagttttgaacctaaacaactctgggctcaaatttaataactgggggggcttttgtaaagtatatatatatannnnnnnnnnnnnnnnnnnntacttttctatcctggctccaccatgaactggcttgtcttcctgtgtcttggtttccctttctctaaagtaggaatgtaacatccactttgtgagattttatgtagtgtacatactttaagcctgctgagttatggcatcatcagtatgcttgctgctagagaggctacatcctgcctcagaaaaaaaaagtgatgacgtgaggtgggagtggccaagcatgggcttggggcaggaaggtttggtgcgtgcacaaagacagacaggtaggagcatcctcagtctggctctggctctggctctggctctggctctggctctggctctggctctggctctggctctggctctggctctggctctggctctggctctggctctggctctggctctggctctggctctggctctggctctggctctggctctggctctggctctggctctggctctggctctggctctggctctggctctggctctggctctggctctggctctggctctggctctggctctggctctggctctggctctggctctggctctggctctggctctggctctggctctggctctggctctggctctggctctgatcttaagtggacttgaatgtatcaagcagaagcttccctaagttctgtcctcatctcttgatagggcctgcctggtctgcctggttcatctgtgccttttcttcaaattgcatcatatcactcatcaagcaaatggggctctgtcatggcagagatttgtcaagtaacagagctgggctttctgatagttaatttatttttagcaacttcatactgaggcactttaaattagctgtggtcctaatttaaggcactctgtgttgcgtggttagcatttctccattgagcagtggtgtgctatgtgcgcatttgaaacctagtgatggaggggccatgtcaaacagcacggaaagaggccagattacatccctctgtcctgtaagacccctgtgccccaggacatcctgactggccacagctttgccaggagcatgtgacctgcctgttctctgcctcttttcctccattttcaaacagtgtctgcctaaggagtccccgtcagtaattacctggtttcatgcttatccagtggtcctggtttagatagacctcatcttctgctgtctagataaagtctcagactctcccagagtattagtccagcccatgcaaagcttctagggcagggctagcatccatgagtgtgcattaccgtcatgttccaggagacatggatgcagcaagtccaaggaccccactttcaggatggctgatgtatcagggttatccaactcatggcctaagggcttcatgcagcccgcaatggctatggatgtgaccaacacaaaactgtaaatttacttaatacatcatgaggttaccttcatctttctgtaactctattatcatgaactttgtagatgtaacatcatgtcacaaaagtcacaaagtgacaaaaattaaacatttgtatgtactcaaaacctagatgagccacagctgaacaacttagatttaatgtgtgccctaagacaattcctccttatcccatgtgattctgagaagctaaaaggttggactccctggaatcctagactattccaggagttttctgatttctttctcaatcgatagtgtgtgctaacaactggatgtcttcactgtagacagttctgaccctgcctcccttgcattaaaacctcacaagttcttctgcactcctaaatccaacaaatgtctctagaagtcagaacccatgttgcctaaggagtcacgacatgacttgactggacctgacattaccagtgtggttcaattcatgtacagaccactctctccctgtcccgattcagacacatgtctctggcagcaggaactctgtgcaccccacctgtacatccgaggcacctgggacataccagtgtgtaggaaatcctcaaaaatgggaactgattgaaggtgtactaacaagagatgggaattattcctctggggaaaatttgagcaactcctatgaagctaggatttggtcttgccatatatattttcccacttttgtttatctcccggactgtgtacggcttatacagaaggagaaaagtctctggtttgatttaaatcaaatgagcataagggctgtatagtgagttcagcttgggcatgggggaggcagccccatggtcaatgctaatccctcagttgatctagtgacttggacaagtgtcacctggctgccctgtgtgtgtttgtgtgtgtgtgtgtgtgtgtgtgtgtgtgtgtgtgtgtgtgtgtgtatctgtggcgggggtggggggtcctagcctacttcagagacctgttattggaaacaaatgggattactgaggtaaattggttagctcaattattgacatgtagaaggctccctagtcattggtggtgatttttttttttagcagtgaggtctccagacaaaatagagatgggtggtttctcataagagttttaatgaaaatgaattccactttgaaaaatgataatagataaaacattctaggattctttctccgggtttaaagaattgaggatataccaaattcatattttttccagaaacgatcccaaaggactagtaagcttgatttatgttttctttatcagtcacttttattccaaaagcctcacatttccattaaaaccctattaagtaaaaacaggattttacggtatctgtgatgccttgggtctcggtgtgataattgcaattatctccagcaaagatgccattgctcatctttttatttcctcttatacatcagctgcatctttagtgtgtcccaggtgaggaaaaccacttccctcggaagctgaggttccggtctgggaagggacataagttggcagccatccggaggcacacaacgccttggagggctggtgaaaggcagatgctgggcagtgcgagaggcaggacaccacagagctgtctctggaaggagacattctggccctctggagtcacatgaggaagtcctgtctagcctgagcatcctgaggaggtggtaaggtccccatcatcatgccaggtcaaacgaaggcttccacctggcatgtgctgctttgaacagcctgctgctacgtaggtccaatcctgcctacctggattaagatttcttctctgaaatgacattgttgtgaaatgttctggaactagatggcagccatggtgataaagcctcaggaaagcctaaccaccactcaactgcacactttaaggtggtttacgtagctgcttctatgtatgcgccacacaagtacaacaaaaaatagccctggatggaatgatctccaaagccactgaaagctagcacagcgtggcatctggcacttgggagaagaggcacatcacccagggcggaggctggacgcttggctctgctaggcagacagcaagtcatgtgaccactaaatctttaacagaggaggagctattaaccacgttacagtctcacttaatacaggctgtgtggtgcatgcctttaatcccagctcttgggaggcagaggcaggtggatttctgaatttgaggccagcctggtctacagagtgagttccaggacagccagagccacacagagaaaccctgtctcaaaaaaacaaaaattaattaattaattagttagttaattaattaaaaaatacagactatgtgtatgtctataagaaacatgcttgcggtgtgcaaaaagagtttaaactacaagtcctgtcaccctaactctaaatacagacaaccacactttattagtgtctacctttaaattgtgggattaggaaccattttgatttctttatacctctctccaaaggtctacaaaaaaagctttaaatacttttattatctaaaacataaagttccctcccagatgacaatatggctcagttggcagagagcctgcctagcatgtagaagatcctaagtttgatcccggacgtggtaatgcatgcctgtaatcccagcagtgaggagatggaggcaggaggatctgaagtttaagcccatcctcaactgcttttatgagactttgcttaaaaaaaaaaaaaagtcaatgaacttttttaaaaaaaaaaaaaatttttttttaaaattaaacaatagtattgagaatctgtggcccctgtgtgaaccataatgtgctttagaataaggatgttctaagacatagagaatgctagagaactgatgtataatcctgacttactcagagagtaacgttctgctgtgttcagcctcagtctccacatctggagcaaggctgcagtcataggcccctcctcagaggtgcatggacagcaaaggagatgcctccctcaagcgggcgggctcgctgactgagtcctcctctgagctggttccgtgcatccagcagccacaggacacacctcccaaccttcccctttataaacttcctgagagcttctaatgtcagccgcagaccttgttcggtaatttaagggctgatttctaggaggagtgtcaattttcacccctcccccgtctcttctctttctaccactgtctcgggcaaaacacttcatctcatgtgaaaaatcaccaccaggcttttatttactgtctgaagttcaaggtgacagtgacaaagccatttctgctgaagggaaactgcacatcccaggaatatccacctctcccaaggactcgggtctgtatgcgcagaagaaagcacatcgaagcccagaccctccatacttttaacctataaagagattttccttcaccatgtcctggttctgttctcctgcctgtccttgctttgagtccagagttaggatctacttctacatctggatctgcagacagcaggaattgagaaagagacacttgacctggcttgggcttctgaaacctcaaagtccactcccattgacacacctcctccaacaaggctacatctactccaacaaggccacacctcctaatcgtgccaattccctataggtctatggcagccattttcattcaatccaacccacagtgcaacaaatttaatgaaaactgcctccccactccctgcacccaggaacctagcacataccacaccctatagacatgagttgactcgtgccttcagtgagctcgcaagaactctgaggggctgtcctgtgaaccatggcaacatgtagggaacagagagatgcatccaaggaacagaatgggatgagaaagaacatcggtggtttggccaaggagacatcagaagtagtctggatagagcctagcagcctgagacgtgcactgaacctccctggagcagatcttcatggggtttactggccgtgcccagtgttttcaaggtttggtcttaggaaatggtcacagaaggtagcagatggttatcttggtcctagttatgggtgggatgggaggccaggaaaagggagagagagaggcagtgggtgacagagggagctgggaactcaagagcaatgagccgactgatagatagcaagagtggcattcaaagcctggaagtgcctacccagtaaggaactagaaacaaggaagcctgggaaaaaagcaggagtgccaggatgaagcccttgtaaagaggccaccatctaaggcaaagtcagagaggaagtagcccaacaaggtatgctgattgccatggggctacacgcccatgatcctagcacttgagagaaagcaacagaagaattgcaaattctaggacagcctgggctatgtgacaagtttgcgaccagtaagggctacacagtgagactttgtctcgaaattgaaattaagtaaaatgatagccactcaagtgtcctcacagaggatggggaggacaaagtcagaaatatggcttggtggcctggatgaaaatggtcccataagcccataaaggcactgttaaaaagtgtagcctgtcagatgtgtcactgcgggggggtacaattggcagaccatcaattcacacccttctccgtatttcaatcacaagtgccatggcttcaaagcacatcagcacacagttattgagcctcagagacagcatgtcagcggacgccaggcttttcgtttcacctgtcaccaagatggctatctctattgggttctgctggggacagtgctctgctctcttgcgtcacactgtcaatgtatgctgctaattcccaaagcttcattaagcccgtgccgtctccgagtggctacacctgtgtnnnnnnnnnnnnnnnnnnnngagcttggaagtctcccaagctcaagccagacccagtgccatctgctcttcctgctgcctccagatccagatgtagaactctcagctacctctcaaagcaccatgtctgcctgcatgttgtcttcctaccataatgataatagactgaacctctgcactgtaagccagccccagttaactgcttgtctttataaaagctgctgtggtcatggtgtctcagcactgcaatagagcagtgactaagacacatgatgctctggtccaagcagggaagaatgggagaatgctggctggcctgtggatctgatttgggaactagagtgatagcattgactatggagagagaggaagagttggcatttattctgaattttcccacttgggtaatgggtcaatatttggtagtgacacatcaaggagatgggcacaccatctgtgggtcagggaaagcgctgtgtcatgttagaggagagaccatagccagctagaggcagaaggtagaagtctgtagctgctcattttcttgattatcagaataatttgagaataaaacgcacaggctaaggagtcacaaaactctcctcatgtttctatacgagctccaaagaagcagttaagacaggaaagcacctgtgtccctgggaccggggaatggaagtgtcttcccaagttgtccactgaactgtgcctatggctccttgccaaaaaatctcaatgagatttttctatttcttaattattcaattactacccataagtaggagtttgaaatcagacccaggctgatcacaatggagttctcccctgaatcacgagcagggcggaggaggtctcccatcttggaagccaggatggcagaacaaacagaggaagccagggtttccagtccttgctttgccctgggttcaagccttggctccgctatgcagaagctttgtgagccttgacaagccacttctcagaagtcagttttctagcacacaaatgacagtcccctgggggattgtacatcccaagggaaggaagccgttggaggaaggcagtagtcatgagtgccttgtgtatttcaggtctcagcagatggaaaagtctttcacttcaaaggaagatctgaactgtgacccgactggtggtgactccgagcccaaccctgaagcccatctgccctccatttgcctcaagcaggtgttccccaagtatgccaagcagttcaactacttgcgcctcgtggacaggatggccaatttgttcatccgatttctgggaatcaaggggacgatgaagttgggaccaactggctttcggaccttcataaggttagtgagactagcttcctccagcatgagttttggacagaatggaccccagtcactcctctggatggtcatatggcccaggactgctcttgggagacgataatattgagttaggaccctgtttgaggctgtattcatctcagggctggcactgatcctatagtcttggtgtgtgtgtgtgtgtgtgtgtgtgtgtgtgtgtgtgtatgattctggcatattgaagactcttgtcaaatgagttgatgaacactatgaccatgacacttaaaccataggtttgttgttaaaaacaagcagttgtggggctgagggggatgactcaataggagatgattctttatgcacaagcataaggacctgagttcacgtccccagtgccgacatacaagccagacatggtagcatgcaatagtaactccagcaccaggaacggggaacagggcaggacagagcttgctaacaagttaaagtataatactcctggttcagtgaagagcttgtctcaaaaataaggtagagcacagtagagggagacactcaaaatcaacctctaggctccatatacacatccataggtgtttgtacccatccctgcacacccagacacaccaaaataaaatgtgcacttccaaattagtcatttttattgttgttgttatgacacaatacctgaagttggatacctttataaagaaagggggactggagagatggctcagtggttaagagcattgactactcttccagaggtcctgagttcaaatcccagcaaccacatggtggctcacaaccatctgtaatggggtcctatgcccttttctagtgtgtctgaagagagcaacagtgtactcacatacaataaataaattaattaataaaaaaaaacaaagggggttatacaacttatagtagttttagttcgcagcttaaactcagtcacatagccccattagtttgatcttcagtgagggtctaaggcggatagcatcacagggaggcacgtgcaggagaaagagcatgtcccaagtgatggatgccagaaaacaggtaagagtcaggctcaacctgataacagctcagcttcccacaagaacctgcccagtgacctaaagagcctctacaggctcagcctcctaaagatgctacctcctcagcagcatgaagttcacgcttccaacacatgggtcctcgggagatgccctagctaattttatcaacctgacacaacccaaagtcccctgagaggaaagcctaaatcagattggccttaggcaagtctgtggagggctatcttgagtatagtctggcactgtacaggacaccatccccaggcaggaggccctaggctgtagtaaaagctagctgagtcagaacctgtgagcaagccagtaagagagccagcaagcagccttcctccaagttttctgcatcaagttcctcctcgagtccttgccctgacttcccccagtgatggaagtgacctggaagtgtaagaggaaatcttacctgagctgcatttggtcagaagattttattgaaaactagaacaggcaacatcctcaaaccccattgtaacacagcagttaccctgcaccaggtccttaaacacctcgtagtaattgctcttgggctctgacaagccctgcgcttcttattcttagcacgtgttttcccagtaggaacaacctggctatgtctgagttcacaaaggcatctcactccacagtgagtttctggagtaaaaacttcaacaattaatctgataaattatatagtacattttttctagttttacaataacatgcttataatgcatgctgtgcaaaacttgcatgaatttcaaaggtaagacataaaataaaagggtttttgctataacctacaaagtaagcattcgcctctgagtatctgtctttcacggttcattcaatttgcctccaccctttggaacactgtgggcaacacaggagagctcactagccataaaaacccagggcaagctcattattatccctggacctgcggtctttatcctatagacctggagggagtctatcctatagtgagtgcatgtgtgcatgcgcctctctctctctctctctctctctcnnnnnnnnnnnnnnnnnnnnnnnnnnnnnnnnnnnnnnnnnnnnnnnnnnnnnnnnnnnnnnnnnnnnnnnnnnnnnnnnnnnnnnnnnnnnnnnnnnnnnnnnnnnnnnnnnnnnnnnnnnnnnnnnnnnnnnnnnnnnnnnnnnnnnnnnnnnnnnnnnnnnnnnnnnnnnnnnnnnnnnnnnnnnnnnnnnnnnnnnnnnnnnnnnnnnnnnnnnnnnnncacacggccaggatctgcacaggctctggttcaaacctgacagccataccaaaccgctgaccctagatcgcttcaacaaacatgatctgactccaacagggatctgctcatttacagttctctgtggcatggccacctcaaaaggaaaagtctctgacaggcctcagcgctgctgtcacctcttgtccgtggttttaacatccttaccctgcatctcaaagccacactcctcacagtttgcttcactaaggcaaataattagacacaatgagttggaagccatgttttgcccaaggtttctggagactgctaccagtcgtctagtgttcttagtaagatggcaaacccagattttggcagcatattgttcccaagttaacaaacctgaagtctaggctgcagggtgcttgaaagggggcattgcaaagtgggagtatggcggaaagggtggcataggctttgcaaccaactatatatattcattggccgtgtggctttgaaaagtcccccattagtctctaagtcccagttccttcatgtgaacaacattcctgcctttcatggcattatgaacctggggtataatgtgtcatgatacctgacccaaggcctagatctaggaaactgtttgccaaatgagccttagccttcttgtggggcttgccttggatacgcagtggaggatgctgccttcaagtgacttagaacataaaagccagcagtggggctctagggctggtgagtgatcacaagatcacaagggtcccacctcatttctgctcaccccatgctaagcctgttctgatggcttcagggttacctatggtctacaagatggctgctcaaaatctaaccgctgaggttgagtcctagactggaagaaggaagaggcagtagcagcgcaggtctctactaggtgaattagagtcctaaaaagataccctgagccggacgtggtggcgcacacctttaatcccagcacttgggaggcagaggcaggcggatttctgagttcgaggccagcctggtctacaaaatgagttccaggacagccagggctacacagagaaaccctgtctcaaaaacaaaacaaaacaaaacaaaacaaaacaaaacaaaacaaaaaaaccaacaaaaaaaaagataccctggatgctatttgcaacgatttctgcctccatcttgctggctacttctacttacttgggaaccaggaaatctactttatattatatttattcattagttcagtgtgtgtgtgtgtgtgtgtgtgtgtgagtgtgagtttaggtgcacatacaccatagcatgcctgtgaggtcagaggacagctctcaggagtcagttctttccttctaccatgtggatcctagagattgaacttaggttgtctggcttgatggcaagcatttttatcctttgagccttcttgttgacccctagaggttgtgtgtgtgtgtgtgtgtgtgtgtgtgtgtgtgtgtgtgtttcttttaaaatgtataaataccgctgtctcatcacagtgaaaaagagaaggcaaatagctaggcattctctacctcttggtgattcttatttgagctgtggagcatagaggaccctaatctgagggcttgtggaagcacataaggatagaagcgaggtgggcaagctgctgtgctttagttgcatgacctggactccccagagcaaaggcaagaacgccctaggcctgcccagctcctgcaccgtggcacagacgtctccactgaaaacctaagggactgaagccctagtccagctttcacgtggtggactgtcagaacacatgaggacacagatcctaggacatctgccccacacccatttctgcccaagaagctgcctaggatgttcaagggcaagttgaagaagcccttcctttccctgggactcccccaacagagctgagagttagaagtaagaacagccaagttttatccacctgctggaatccatggtggcctcatggaggaggcaacgtctgccctactactggctgtcattgggtgagcagtaaacaagcacaccaccaaggcagcaaggagagccagtagaaggatttcgcatagctcgagctgtgtgtgattcaggctgcgctggacctgaggctctgtgaactgggtgaggttctgggaggctccctggcccctcctgggaaaatttcactcaatcggaagacaagaaggagatttggagacacagggcggctccagtcacagctgcttctggtgcagacgggctttgatggcaagtggctggagatgctgtctcagggaacggtcactagcacgcttaaaatcaccagagctttgggcctctccaagagaagctatgcacatttatttttatgtaaaatctcaatattgaaagaatggatttaaccacatatggattccatcaaagcaggactgaccacagaggactccagtaagggacacttggtttgagagcccaggacacacccttaagaagaactccacatttcacacaatcctgaagagaaaacagaattaagaatgtttctaataaaaaccctcaggtcagaatggactaatggcaatatatgctcacaaagctacctgacatgacagattttgtgattctctccatcacaaagcggcatttgcatgagaaaccaatttttccaaggttaggaactgttaggttctgcagccgccacttcccatctgtggccagcccggccttcagtgagctgcagcagaatgtggcaggaaaagagcatcttcaggtggccaagaagcagctcgagcagatggacccagacaacgaggctacccagcaaacgcctgccctaatcaaggatgctggaggaagtggagaaacaccacactaggtaacagacgcctcctttaaaggcgtcccaagaaaccccaacggcaacttaatagcaaaatatgataattctctgctttccaatttatctgggtatgttcagtcttgcggattaaatttcaccacctgctaacgactgttctccatctctctcctttccactttggtttaaatgttacctcgttatgaattaataatatttatgccatatgccgaattgaaccaagtgcccttcacaggagcgcctcgaagcagacatattcctaacacagtgcgtgcttctatcacggctcccacacagacgcccgaagttgaactcaccttccgtatctgctacccactctctctctgtctctccacattccttgaagagaaggagaagggaagaaaataataaatggtcgcctagatttatttttggtgtccttctctcagaacttgccgcatagatcagcagttttcagagagaattatgctaatgcccacacggcatcttccactgttctcttcctccaagaatgagaaataacgaactgtcattctcttgtctagacgctctaaccagccttactggagtgccattttctcaggagctgtgtgatagttgcacatatcatcgccgtgaattgagctctttttattaattttttttatttttggaaaatttattttataacaattgcaaaggtgtggaggcttctatttctccaggaaatgtctaattgatgtgtcagcttatcagccttctttgagagaaatgtgtctgtattagtctcccaccaacatggctatctgggggcgggagacatcagatgtaattcacgaggacacctttcccatagcaccctgcattttccactggatgcagctgggggttcaacagttggccccagccaggctcactcctggcaaatggcagcccctgcactgtgagagcacgctttgaaaccccgctccaccactcttgttgcttctgatcccatgtcttcttttgaactaaaggacaagttcttccctttctctttccccacttcccctttattgtatggagatattaatgtgcttcataatggagagcggcaggggatttctctctaagaggcatggtctgttagaatgttctagaatagaaatataagaagacagctttcccctctctcattaactccttggtgactttgaaactgtccctctgtgactatccttcccagaagccttctgcacttcctctctgtagccttgaaagccatgaatagtttaaagcacagacacagagtccccgactcccaaatgcttagatagttgtaataaataaatatggctgtttgaataccttttaccttatagaaacctctctgggggtgggggagctgctctttttccctccacagagaaggatgagcataaaagaaattctataaatagaattttgtggagtggaaaaagttggtccctaaatttcccatgagacatcagtagttagggggaaatgggatgatcatttcaaatcctgctctattcgggctcctaatgagcttgaatgatttgtgattctctcccatcatgtgtactcagattccttctattgtggaaaaaaaaagaaaagggaaaaaaaaaagaaaaagaaacacacagtgatcagttctttcagcggattccccatcactggggaaggctttcattgccttcagcttctccaccagtgccgggcatggagcaccaccgccagggcattgtctggtgggtagccaaacaaagcccaagaatatgcggcaaagccaaggtcacaaaccttcatccttttcctagaaaatttctagcttctcacgtgcccttgttctcagagttctctccaccaaagaacttaccctttcacccattcactggacaaactttttccgaggcttaaggggattttgcgctccatggtgggaacagcctcgctgtcacactccaagtcccacatgtaaccccctgagagcatgctgccctgttactgggccctgaatactgctgcccaccacggcagaaggtaagttctgcgtttagtggctaggcaatcgtaagccctcattctagagactctatttgagctcacggagaatgtctggtaaccagaggaccaagctgggagaccctgcctgcgagaggtctgcttacctcacagaaagaagccttccgtcccaaaactccccggcgggcgtctaggcctgtggttagtaaactgagacttagtatcttggtcctaggctcctccctggacccttttctgggtcatagctcctctacctgctcctctgtctccaaggggacatggggtacagactgtgccctgtgatctggggcacgtgctgagtctctgtgcctcatcctccccacacccactgaaatgagaccggggtccctccctcacatacacttacaaggattctgagaccctggggtaagaaaggaccttgcagttgaatagtgcccgagaaatacccacagaatccaagttctcttagagcatttcccatctgctgcagctagtatggactgtcccttctctgctctgactgaagacatcgtaatcaaccgtatgtggcagcattgcctaggatgggttaccttggaaaggagattaatggagaattcttcctggtaaattacagcttctgctaaaagtttgacacttctattttcttcctgtcagggaaaaaacaaataactatataccagtggtcagttccgtttccgttttcgtcctttggtaacccatggagcaagccaggcagcaccccagccttcctgaggacacaggtgtagccactcggagacggcacgggcttaatgaagctttgggaattagcagcatacattgacagtgtgacgcaagagagcagagcactgtccccagcagaacccaatagagatagccatcttggtgacaggtgaaacgaaaagcctggcgtccgctgacatgctgtctctgaggctcaataactgtgtgctgatgtgctttgaagccatggcacttgtgattgaaatacggagaagggtgtgaattgatggtctgccaactgcagatgggtgggaagaaggtagggcagggaggggcaagcaagtgtgcagggcaggaaagcaatggcctcatccggacaccatgctgggtatcttcacagccaccatggttaaggagaggacctggatttggagaggggcctctgggtgccaatcatgcttgccaatcaaaacttcacccatccggcacctatgggaactttcacacagggaacaatgacaaatggcacatcagagaagcactttatcatcagctggggtcatggatgacatacaccagaactgtccaaagagtattagatacagtctcgacaccccggcaactggctcattgtccagtcttcaggattcctaggtagaccctgcctcccagaacagtcctatccaggagggggcttcggggaggcagacaggccaatggatccctaggcgcttttctttttgacctaggtttcattacctcaaaggggtgatgaaagcttggtcttgtggcctgagagcaagtggaaagtgagatgcaatgaggactcaggagccccatgggactctccgtaccaggcatcacacacatcttcagtagccggggggacaggtatcggcttcattctagagaccaggaaacaaaagtgtgcaagtgtgcagaggtttaagaaaaggacccacagccaagcatctagctgctgtaaatccagccacttttccagaccaactaagtcagtggaggggagggctccaaaggccacctttgtggcttagacggggaggatcactgctgacaccagactccccccgcacctaatcaaaaggagcatcagaagtatccaccctcctcatggcttcagatagtcaggagcaagcatggagcatggcgtggaagggcctctccagtgaggtgagcccagcctgtgttttccgttctgcaagtctgggcctgtgtgtggctgattcaggacttacataaaactatcaggtgacagggtaagagagtgaagtaaagagacatcaaggcccctgtgttcatgtctggcctcaaggattcatctggtgagatccaggaagaaaagcttccgcaccagtgatggcttcgtctgctccagtgatgagctgacaataccagatcatgtgaacgtgactcagacaactgccttgcactggcaggagagggcagagctcacaccctggttataatccgtaagaagatgaagacacatgcataggagtatttcttggctatgtggttcctgaggctagatggggtgtggcttcactgacagaatagtttcctagcatggatgaggcccgggcttccattcccagcatcactttaaaaaaacaggtgttcaaactacagcatctcacctgggcagcacagcagagctggctctggttacgggagtgagggtgagctggaccccaagggtgtgagagccggagagatggccctggtggtgcaggcacaggagagctggtgggctgaccaagacagcttccacccagccccagatccagggctctgagtgggcccaccacaacatctaccccatctacgtactgctggagcccacaaaggggccagtcctcagatccaaagctgcaggacctccatgacacagggcaacaacaggatatctgagaggagacccagtgagggtccagtattgatggtgtagcagaagccagaggcctcgaaccagattagtcatcacagtgagcatttgcaagtcaagctgcctggggagaagggtgcactgtgggacacaccgtgacacttggggagaagggtgcgctgtgggacacactgtgacacttggggagaagggtgcactgtgggacacactgtgacacaccgtgacacactgcagcttccatggcaagatgaatgagctgtttgtttgtttttgttttgggggaagattgcaagggcagagagcaaatatgaagggacaggcaagataagtggaattagggtctgcatgttgtgaaattcacaaagattcaataaaaagataaaaataaacaaaaacagtcatcatcaacaataacaacaaataaataggtgtaatctcagtactcaggagtggaggcaggaggatcaacctcagtcatattgtgagtttgaggctaacctgagctatatgggactctattataaaattcaaaattaaaataagaagaaaggaaaaaaagagagtctggtttctgtttgggagtgggctaggtcttccagattgaatgaggtccaactgacacaagaaaacactaaagccccaagggcagaaaggggagtggcctgcccaggctggttctcagtggcagtaagtatggctgtctttacagccttgctctctatagcccactccttaactccggaccaaagccatggcctctatccccaactcccatctgaaaccttctccccaccattcctccactaacctccaggaattcgggaaggggggtggtgatgggaatggggtgctgagcaaagtcaagttctccattggagcagctggagtggcttaaacatcggaggctgggagccagagcagaagtgctggcacatgggagcctgctaagggctcactctggctccctcatggctctctcatggccactttctccgtggtaaggagcagggagagggaggtgcacaagctctcctccccagtgtctttgtacagggcactaactggtctgctagggcccccacccatatgatctctgctccaaaggccgtgcttgtgggttttcgggggtgcacagatgttgagtctgcaccggcctgaggagtgaccgtcttcttccctgtcgcggcaggaactgcaaactcagcagcagcagcctgtccatggcagctgtggacatcctctacatagacatcacaaggaggtggaactcggtgaccgtggaccagcgggactcaggtatccaacggctgactcgcctgacaggcatggggagggggtctgtgtgtcttctgtctatcttccattctttcacactatggaggggaggagggcgaggaatggagtggaatgtaaactcttaggcattgtgtgctcccgaggctgggcaacccctccccaaatcccagtcccacacctagcctcccctttctttctttatcactactggaggtgggctgctgttcatctgttcatttgtgacccccacatatgtttgctgagcccacagcagccaggccttgggtggactagagagctcggctcttgctgggaaggagctctgtggagctgagacccatgtgagaagtgatgctgatggagcaggggctggggatggaccaggatggggtgttcctccccgcaggaggacaaaggttggataaacaagtgtggagggtgaggatgggcctgggcgggagtgtgagtctgcttatacatgaacacgtgggaaggccattgagcccaggccactcccaaccagccacaaagtggaagaacaaagtgggtgaggagatcgtgttgtgatagacttggaacggcacaccaaaggctgcgctgtaatagcctgtgctttgttcttgtctttttgattcttccgctaggggaacctacctttgagtggacgggtttccctttcccacccccatcctccgagcagtgtagtaagcgagctggctttgtataggccatcacaacgctgcaaagtgtcactcagtgtccctgtgacccagcacagaggcattaggggcctcatttcacagacagtgaccagcgctctagtgactgaggttttgaggtgaccgtgaacaaggtgtacactggcaccatccactcctgtcctctgccatgctgtcacccccacacgcggaaggccacacctgcgggggttggatggagaggatctgaagtcagaatctgagggatccggatgcaaactgattttaccatctcctgccatcatcgcccccggtcacctccaaccctggggcttttcagctgtgaatatcatgcttgtgctctctggatgtcccggagcgctcgtacgccagtggctactaatgcatttggggtcattgtcgaccactggggtggtaaatcctattagtggactagaaatgccaaccacaagggtacagccaggccatcctgcatagtgctgactcagaaatccatttgtttaatgtcacgtttgagaacgatgctacctgataccacttggtggctattgtctccatgccaaacattactgcatgcttggcatgtttgacaccagctacaactctggagacaggtctgattgtgtccattgtacagaggagaaaactgaggctgagaggcaatgaatggtaaactaataatcaaccatcagtgcacctgggcttcctatctgggtcaattcctcctacccattattgtggctggggtggggtaaggggggtggtaagatggctggtctacctgctgcttcccttaatttaaaagcaaaagtcagggatgccagcagtcatcaaatcaaccaggtgactctacttctgctggcgggggccttccagcctccctgtcacgaggggaggagggcacacctgcaggacatgtagacaggttaattgtcatttcgaggacggagtgagcccatgtggcagttgagctgcatagtcacatttttgctgacaccctcagaaagggaagaagagcttgttcctcgagcctaaagctgggtgttgtggcaggattctttgaagggggccagatgagtgggtgggggtggcaatggaattattaaatattgaaattgatcaggagtctcggcaggaagctatttatcatgttctattgcttccaaccagcattaccatctggcccattgttcatcccaaagagctttgcatgttttgtttgcttctaaaatggctctctgtaagaggaaggggggagggagggtatccacaatatcagctccccgaagggcttctggggtccagcttctggggtctgtcagggtctctcgactttgctgagcaagccaattaaatgaaaaatgttcttatatttagcacaagtggagctgggacagggatcccccaaacttctgcatctgtctgtgcccaaaacagtaactatagggcaagtgggacgttcgaagactgcttcgagagcatgtgtgtcgtggtttcttcttgtagctttgcagatgaggatcctggggttccaagagcaaaagggacttcagtttcatagccaacgagtgacaacagcaagattagaacttgggcctcggctatccggagtattgtctgttccccgtatgactagggaggggacagggcttgtgtcaggagtcagaggtgatgcagaggcagggaggtgtactaacaataacactgtatgcttcaaagagctggaagagaggactgtgcggtcctcacaacagaaaaatgacatgttggcatgagagatatgctaatctcccgaatgtggtgtcatgtgtgctcacatgtactgaacatcataagtatgtataaatattacacatcaagatcacctcctttagaaaagccacctcatccagcacagaacctactggagggacactagagtgtgtgagctggggatgtccttccaagctcctaccctcttccttggaccttattttcctgtttccattgttgctggaaagaagtggcagggactggggcctaagaaataggttgggcatcaaagccaggattggaagccactctgtgctggtggagagggaacccctcttgtctccccggtgttgccagccaggccattattacctcctcgtcaaggttgcccagcaccccgactctgagcaagaaaggacagctaaagccagttgccttacaaggaccaatcaataggctccctgagagcagcagaaattggtgcttgggtgtggttcttgcttttgccaggaagcagcagaaataccagagagtgagtgagtccttctctgtccttcctcccttcctcccttttttcctccttccctcagttcccttccttccccttcccctcccctttcctccttctctctctccttcccatatgtctatctcttttgttccttcccattcccttcctgttgtgaagtcaaggaatcttccggcctccattccagttatatgttggccagtgtacgtctgtgtgtccaggtttctctgtgtgtctcatctgtacctctttgtatacctatgtctgtgtgtactagctagtatttaataggttgacaaactgaaaccacatactcaagacagaattgtgagtgtgagaaccacagcccataggagctgcggcctctctgatggggtcagtgtccctgatggggtcagtgtgacacgccagccagcccagttccacagggttgccctccactccagcacctgcagtgtccaagtcctatcaggtcctccctttcctcaaagcccaccagattcagtgagagtgtgctcaggccacgtctctggcccttgaggccatgggaacaatggtcacctacatcaggcgaccttgctactgatgtggaggagaaaagcggtgctggaaacacggcttggagagaagccagaagtagaaagaaaaagtactttctgtgaggaaacgtgataaccctcaagccatcctctccctgctgggcctctggtatgtgaaagcggcctcagcaatgtccatggactctgagtcatctctgccatgtctgtgcccagcctgctcctagctggtctttgtaataggtatcagcacctgtgtgcaggtgtgtgttgtatagtgtgtgttgtgtattatgtgtgtgttgtgtagtgtatgtgtttgcgtgcgtgtacgtgcgtgtgtacatgtgtgtgtgtgtgtgtgtgtgtgtttgtgtgtgtgtgtgctgttgtgtattgggtggcggctggggtaccctgtctgaatatgaatatggagaacaaaggagaccctcagctgccattcttcaagttgcacccacctcaattttctggagtagcttacaataagctggccagtgagccccagctatctgtcaatctcttactcatctcttcctcgttactgcaatcacaagtgtatgccaccacctggtaggtttatttgtttgtttgtttgtttgagatgcattctgcaggatcaaactcaaagatctctctctctttcttttttggtgttttgtttgtttggttggtttttttggttttttggtttgttttttttttgttttttgttttttttttttttttggcttttcgagatagggtttctctgtgtagccctggctgtcctggaactcactctgtagaccaggctgtcctcctcagaaatccacctgcctctgccttccgagtgctgggattaaaggcgtgtgccaccaccgcctggcctcaaagatctcttgcttgccaagcaagcattttactgactaagggatcactccagcccctgtaatgaggtatttttagtcatggaataaacagccagaagactcttcacccaaaacagaagctaaaccttcacagaaacatcctcagacatgtggcttccaccttggctagctccctcctctccccaccaggagtctgcaccctggattctcctcctaaatattctctctgaatgtcacgtctgctcaggagcttggtggaacttagcagtgtgcggctcacactctccggcttgcttgccagtgtaattgtcttcttttttttctccccaaatgaaggattttaatttccaagcttagaatttccagcagaatatgaaagtctcaatgaggactttatcaacaaggctgggatgccgcattttttcttcagtcagaaccaagtgaagaagtgtttgtggacagagatgcagtgatttcacatcaatcgcactcatgattccggcatccaatggcacatctctgtggtgagaggtgagggcagcacgcagatctggcacctcatcaccagagccacagttcacctgcacgggagcactgggtcccagcagctgggcatccaccctctaacacaatctgtttcctgtctaagaatgtactacgcaggctggagggatagctcagtgggtaagagcactgactgttcttccagcggtcctgagttcaatccccagcaaccacatagtgactcacaatcatctgtaatgggatccaatgcccctttctggtgtgtctgaagacatataaattgaagaaagaaaagaaaaaagaagagaagagaaagaaaaagaagaaggaaaagaagaaaggaaagaaaggaaaagaaaatgaaagaaagggaaagaaagaaagaaagaaagaaagaaagaaagaaagagagagaaaaagaaaaagaaaaagaaggatagaaagaaaagaaagaaaggaaagaaagaaagaaaaaggaaggagggaagaaagaaaagaatgaactgtgccaggcctagcagcatacacctgaatcccagcctgtgctaaacagggagactcagtctcattaaaatgtaatacacacatacatacatacatacatacatacatacacacacacacacatacatacatacacacatacatacatacatacacacatacatacatacatacatacatacacacacacacatacacacatacatacatacatacatacatacatacataccagcaaaggtggtgttaaaggttctccctgggacttaaaggggaaatctaagaatacatagtttaatatctgatgtatgctagggatgtttttatcaaatacacaatttttcatcccccttctgagtccctgagtgtgcccctcaggcagtccggggtgtgagtggctatctttttcctttttcagacttattcattttattttatgtgtacagatattttgcccttgtataggtatgtataccatgtgtttgtctggtttctgctgcgttcagaagagggaattggatcccctaaaactggagcaagttacagatggttgtgagccatcatgtagatgctggcagtcacacccaggtcctctgcaagagcagcaaatgctcttattttttgagccatctcttcagcctttaaatgacaatctactcaaagccactgggctctagagtcagacaaatgggggactcaccctgggcttgataacttgccagctaggtggcctggagcaagctagctgcctgatgtcctccaaggcccttgtccaacatctgtgaagtgagcaggatcctggtgcctgacacacacacacacacacacacacacacacatgttatggagtgaagctgccaaccaagtctgcctctgtgctcagaaaactaactggctgccattatgatgtagtgcgccccccaggaaccctttccaaggcacacctgctcctctcaggtccctgaggtattagggagacaggtaggaagaaaagcttcctagagtagtcttctcagaagggtgggacatggccgctgcaaggggctttttcaatgtctgacaagagtccaggtggtctcacacttccttcagttcagacaaggaagtcagtcaaggacctgtctggctccctggggacattctgcttctggtgaggggggtattcactcactctaggcaggatgccagctaccccagttcttcaccagggtccttccctctcccagagatcccctcctgtcacacacaaagccagggcccacctctcaatgccaggtcaggccaggatcctcttatctgctcatctcatggccggtgagtgtctcatggaacctttgtacagtatctgctgtcaagttcttctgtcctaccgaggcctaaggctgtgcctggcgcatggttgatgctccacacacatgcgtggcatggaccagaccctgcctgccagcccatccttcgggtgtctgcagctccctgctgtctctcaccaaattccctcagtcgacttatgcaaaccatgtgacgcctgtgctttcttcactgggacacgctcctactggaacgcatttagttgatgatgtactgaaatatttaaaagtatttttacttggcatgtttagcaagacctcccttatgcatatacatagctgccccacccttaggccagaatcacgaagcaccgcctggaggtgtcctggggccgaccactttcttcagccttgaagttacctcaaagtcagatggttctctctggatagatgtccatcacactcaaaaaatagctaagttttttgagtgaagcaggagaatgccagcctgtcttcccccggctcagatataggtcttcaaggccttcaggacacaggctgcaccttccggtctcccttatcctcagtcacctaggcaaaaaaggaaacactgcatccgagcaccagaactaggcagaagggagaaagctggctgcctctcaccacctccctgtgcctttggttcccgtatcatgtgggaactgccaagcagtagtgttcagcatcatgggacaagccagccggccgtggagtcagagatctctgagaggagtcacctctcctctgggggcctcagcatcctctgcaacagggcctgtgacatctccccggggatggtgatatcaagatttgtaaggacgaggggagccgatgtgtcttctttctcttcccagccaactggcatcactcctgatataggtgtgctgtgcagatgagaagactggctccaagctgtccgcagggtgccccattcccaggttccaagatgtccgcagggtgccccattcccaggttccaagctgtccgcagggtgccccattcccaggttccaagctgtccgcagggtgccccattcccaggaggctccatcttactcctattccagaggaggacactgaaattccaagaggtcaagagtaaagagaaggctctcaagaacagagactactcacatgggccgtggggaacagaggccactcgtgtgggccatcaaggatgacaaggaagcagtctgagttcagttcccagaccctggaaggcacgagcaccagccccgcccacctccccacacattcccagtgaaggagctgggagagcagtatctggtgtgacagtctggttcctggacttggcagaggccactggtgacaatgacagacatgtagaaagcactcaactatgacttctctcttccaagcgcctccttatctgtcacttgccagtcccagaggagccagtggaatgtttgcatcggtgttactgtggcaggaaaaaaaatgttctctggtatgtgcccaactgtgctgtgggctgggattcctcttttctgttcaaagctggagaaggaggaccaggcagctgcggaaccacctccacaggcactcagctgatctgcagcagcatttagacccacttggtctaaccaaagattctgccataggccacatcctaacctgagcacaagtgatcggcccagatgtgagctacgtttatcaagcacctaacacaagccaggctctgcaagcaccaagcagacagtacagagactcccctccctctcctcatacacaggcacccaaatcctgccactgatgagcaagcagtcatctgttaattccattattccatatgataaagttcacgcactacagggtggtctattcttttcgtattgcacattctatgagtctggtttttttttaatctttttattattcttttaattcttcatttttgtactttatatgtatgtgtcttttacctgcttgtatgtctgtgtgtcacgtgtgagcctgatccctaaggagatcagaagagggtatcagatctaaatggtgttgaacagtcaagcaggcgctacaaatcaaactcgggtcctctggaagagcagctggtgctcttagctgctgtgccatctctatccagcccacattctacgtgtttaacaactgcatgaggacctgtaactatcagccctgcattgctcaggaggccccaagcctctctgtaccctacttaccactccctgactctgtctctctgtctctctctgtttctgtctctgtcgctgtctgtctctctctgtctctctgtctctctctgtctgtctgtctctctctgtctgtctctctgtctgtctctgtctgtctctgtctgtctctgtctctctctgtctctctctctctctctctctctctctcacacacacacacacacacacacacattcctggagcccttggcaaccactgtgagcttttgactctatgtaattctgctttttccagaatgtcgtgactgttgggatcatagtgtgcctagcctgttcagactggcttcttccaccagcagtatgcctttaagatcctctatgcctttttattccttaatagttcattatttgagtctctggttagccatccattaaatgggcataatcacaatttgtggatgtatttaccttgtaaagggtatcttgattgcttcactttttggtagtgggggatgaattgactatgaatatgcatatgcaggttttgtgtggacataagtttttttacatggatagacaaatacccatcaatgtggctgttagaccatatggtcgtggcgattaattttggctgtcaacctgactagtctaaggaacacctagagagctggtaaagcattgactatagatgtgcttgtgagatgtttccagaggagagtgggttagtggactgagtggggaaggttcacccttgatggaagcaggtcccacccaatcagttggggacccaggaagaataaaaatggagggtgggagccagtggggtgactcacgagatcaattcctaatgacctgaattcaacctcaaggtagaaggagaaaacttactcctgtacgttgtcctctgtcgtccacactcacatgatagcataaatgacagattagagcaccagacagaagcaggcatcagatctcattacagatggttgtgagccaccatgtggttgctggaagttgaactcagggcccctggatgagcagtcagtgctcttaaccactgagccgtctctctagtcttgacaaatgcatatgatactgctaagttttagtcttatgcaaaacagtctgtcttccaaagtggccgtgccatttgtgttcctgactgttattctacatcattgtcaacacatggaatagtcagagatattaaagaaaaaaagttttgttcttttatttaaccctcttcgtggatatgaggcaatggtaaacacctcgctgttttaatttgaaatttggtacacatttttaatattaatcatattttcttatgcttctttgccttttatatacattcttaggtggggacatcacttcagatctttgttccttaaagtttgaattattttctttttattgagttttaagagttctttgcatgttgtagacacaagtttttcattacatatgtatttaaaaactgttttttccagtctatgatttgtctcctaactttgtttttttaatcttcccccatgctgagtttgaacttgaggccttgtccatggtaggctagtctcatccactgatctagactcccaaccccattttaaaaataatatccttatcaaagcagaggttgttaattttaataaagtccaactttctttgtttcattgtttctttaatagattttgctcttgaagttgcagcaaaaaaattcagagcaaagtcacctagattttttttttcatttttctctgaagtgacatgttggtatttgaaaatggagttattagctaaatatgcattttaagctaggctagcatggtgtcacatacctatggtccactctttagaatgataggaggagggagaggcggacggaagaaagaagaggagagggagaaatcggaggaggaggaaaaggaggaagaggagaaagaaatggagaaaatatccatataaaatgttctgcttgaaaccaaagccagcagatttcaagatttcaaaagaaaagaaagatcagagaaaatcaatagaaaacagttgcagccattacatgtattaatccaattatatcagccatgagtctaaatgtgagagcctcaaattgcgggtccgagtccgtctgctctgccactgggcacggcctcttagggagtcggaactcggggagtttgactacatttatcccatgccactcttggacatccacgctccataccatacccacttctcagagtaggcttgagattaaatacctttgcagggaggaatgtctgggagggaagcttattggctaagccctccgggcctctaggtacctcattagcatggagaacgctgttgatcataggacacatttatgtgggaagcacttttatgtgagaagcatggcatgtgttccaagtcagaaatctggcagggagctgggagtcgcctaagcctcaggtgtgtgcccacagagtctccaggtctcaacctgctcttccttaccaaacttcctggcatggttttacatcccacatcaaatatgtcaattaaaatgtggaacctgttgagaagatcttaaaaaacaagaaaacaagccaggtgtagtagcctttgcctttagtcctagcacttgggaggcagagccataggcaagtggatctctgagtttgaggtcagcctagactacagaggagttccaggacagccagagttactactgatgatgatggtggtggtggtggtggtgatgatgaagatcatgatgataattcaaaagtaaatatacaaagagacgactctatgatatttatgaaaaccccatttaaaccttaaaaacacagagagtcaaggaaagaggtgaagacacacagacagacatatactcacacaaaccaaatctgggatggtgtgcctttgtcaattctggacaaagcaggctctagaacaaggaaaatggccagagatgaagatgggccgtaagcacagggtcagtcctctagttgcacataacagtgccacacatgactgcagctgacagcagcgaggcattgcacctgcagctccactgggagacagtagcagccccatctgcacctgacaggggagctgcccaggaaatgggtcagggtacaggtggaccgaacgcttgctccatgggcttgacctggtagatgagtttagtatgcttcacgcaataagactggaatacacattcttctccattcttagggaatattaacccatgcgtcatattagtattacgttaaacctccattaatgtgttttttaatattgattgattgattgattgattgattgattgcaagactggaaattgaaccaagggcctgcttgctacatacacagtagacaaattctctcccacagagctgaacccccactactgtttggtttggtttggtttggtttggtttggtttggtttggtttggtttggtttggtttggtttttgagacagactctcattgagttgctcagattaactagccttaaagcagctgggtagctggaattacagacctgcagtgtcagaaggcagagaattcgataaggtgttatcagactacagggggataatactgaagtaagaacaaagaaggctgggaagcttctagaatgctacagagcacgcgcctgaacacctgtgctccgtctctgttctaaacagtctaacgtggcttagctccattttcttttaaacatctgggagaactcacagtgaggagccctttagggcctggtgctttttgggggcagggaaagctgttaattattcatcaactttctctaggagctattaagttcgttggattatgagtttccttatgtaaattttggtaaattgtcacctgaattactaaattcacaggcataggtgtcatccatgacgctcatgcgtggccctaggtggggggtacacttctgatgctaacattaggacccttgctctggttgctgatattagtaatgtataattagtagttagcgatcttctttttctcctcagttaagctggctagaggctcatcagttctattgatcccccatccccacccacaaggataaactcctctgttttattgatttttcttgttgatttcgtgtctaatttcatagatttgttttctgatttttaccatatctttggccattttgaatttgctctttttctgtttcctaaaataagacttttttcttttcctgtaagacaggatttctctgtaaccctgactggcttggaactcactgtgtagaccagactggccccaaattcacttgtgcctccacctcctgagtgcagaagtcaaggctgtgagtcaccacacccagcctgaaaacatttctttttccaatttcagaacgtcttgcctaatccatgtatttgattctgcaaatctgactacactgtgtcccacacacttcagtgtgttctgttttcatttttatttagttcaaaatatttttaactctctttcgagccctcctttctgagagttttatatttatcttgcctgggcccaggctgtgttcactgtgctgtggctgccggtgccagaggcctgggtttcctcttatgccattggctttatttttctccccccattgcctttgggtttttctgaagtctccttcctaaatggagcctgataatcccccacctgtgtgctggggtcccgggctgagcccgggcttctattgctgtggagaagcaaggtaaccaaaagaaagatggggagggaagggtttatctggttcacacttctgcatcacagtccaccgatgaaggaagtcagggcaggcatctggggcatgagctgatgcagaggccatggaggggtgctccttaggagcctgctcatcatgctttcttatagcgcccagagccagggctcgagacatggctcagtggctgagagcactggctgctctgcccagcacccacatggcagctcacaacggtctgcaactctaggcctagaggatctgacaccctcacacagacatgaatgcaggcaaaaccacaaatgggcatgaaattaaatacattattaaaatacaaaaagacaggaccaccagtcaaggggccccaccacccacagtggtctaggccctcccacattaatcattaatttaaaaaacacagtcagatcttttggatgcagtttctcaattgactctctgaggactctagcttgtgtcaggtcacaagccaggtttattctacatccaaaccacaagagccttccacttgggtggggaagataacccaccagatgccgacattgacacaatggtgacctgcgaggatgaggcaggaggatcacaagtataaggccagcctggactaccgtggggccccgggagcctcttccatgaatgcacggcccccacctggaacttgggcacactcagctccatcagtcagcacctaccatgaatgtgtctcacgaatcactggcagaggctttctgtggaatcttgcgataaagctgggcgtcctaaaactcaaaagtgctatctgatcggtctgcacgtgggctctcggagggtcccagctagaccaaggtctccagcagagagcacagtgccaaggtttccttctcaagtgtgcattcattccactggaacagaaagtcacagggcttaaagcccgagccccaagttctcccagggtgtgagcgtgtctggtcaccactgtgggcagaactgtcaccagcatctagcaggcagtggctggggatactgctaaacccccatgatgtcctgggcagccccagcaaagagctactcagctccaaatgccaatagcaacaccattacccccttgggcttcagaaaagacaaccactgagtctctcagaagttccctgtacccccaccatggctatgcgccacagctgccatccaggtgagggtgagggaggttgtggagcctcccaggaagagtgcacatccctgctggggcagacctgacatcacccagcagcttcttggtggctgtgggcgtctctgcccctgcttttcctgttcactgcttaaaaagaggagggagccttatgtaatcgcagcctcatagaaccttctgtcattttggcacccttgggctgggaaaaccccctccctcctaaaatcccatggggcatggaattctttctttctgttctaagcaagctctacaggttacaaactgggcaacagcagagtgaaagagcagcctttgaaggcacctctgctggctgtctgcactctctgcattcccatcccccatccctccaccattttcccctgccatgggcacctttattatagactgctggtccccatctctacccccctgctcagatgtttctgcctgcccggaattcctcccattcccaccattttaacagccttgaccagaccctgtgaaacccttcctgcctaagagttcctgcagtgcccatccctgatatcagccccagcactccctcccctcccctctccttccnnnnnnnnnnnnnnnnnnnnctcctctcccctcccctccccttcccttccctcccctctgatacccacaagtgccttcctgccagatcctggttctctttgggggcctgtgacttagttctgtgaagtagatgtgctctaaaatagatgtgactaagcgtccacaggaacaggcggctcttggttctcagagcggaggcttccagtccccacagtggtttccaggcactccttaggcactcctcgggctctctgaggcacgtgggatggatctcgaggcagtcacttgctctctccatcccgggcagcaccacctggcagccaccagctgccatgctaagggtgtgtgactagagaagatgacaaaatcctaaagttcaagtctctcctcactttccccagtgcgctccaggacaggattgtgcccaggcaccgtacaagaaagaaactggtttttcagattttcgtgcactaataaaattaccttctctaaagaaggcaatttgcatgttaatgttttgggtaattctgtgcagctccaatgcccccagggctgcaatttctctctgacagggtgacaaaaataaactccagcataaaggagcatttcccttcctgcctctgagctccatgtgacgttctaatgcgagtcaagctggaacccactgctccatcttctgacactgatctacctcctttcacctctcaagtgacaggcaggctctgaagagcgcctcggggttgtctccttgaggacagggctgggaccccttgtgagtggacatcacccctacagcccaccttctcccccgaggcccagccttcagcttctctaaattctcaaaggtgcagctaggtaaaagggcaccacccaccatcttggggtgtagagggccaccacatgggtgtatggagtctatgcagctgccctgcaagggacacgctgtcccatcaagcttgggtccctctggtgacttaatgaaatcaggaagggagcttaattcacaggtgtcttctccaggccagacacattggttacacatacatacatacacacacacacacacacacacacacacacacacacacacacacacagagcctacctgaggcacttcccgtcttcatgcatagtgactgatagcccaagtaggatgacagttgtgctgtgtgtcacacaggtgttgctcagagcagccaggcagacatgtaacacagaaaacttcctgtaacctaagtattatagatagatagatagatagatagatagatagatagatagatagatataattctgtaaaagaaaatacctttcaatgagcatagcatagagtgatttctctcaggaggtggatcagggaggtgcaactgaaaaaaataaactcactatggtcaatagcaactgagattagaaagatgcaacgagtcaccaggcgggatgcagggacagggcattgtaggcctagagagtgttctggagacagaatggggtggaatggtaggaagggaacactgctgttcaaacccactagagaaagggatgagggacttaggagagtgtggattccctcctgagtttcagtcaggggaatgcagggctgacctggtctctattaggcagtttcggaggcaggagggcaggtgaggtgggcacaggtgtcccacagcccggcagaggtcaaacatcccagcaggtggagagcttggcttgctgtgtttgatgtacagaatgaagtgtttcaggaagctgaggttgtaggagagaagtttcaaaactgacccggggtttctgactcctgaaagtaggtaggtggaggtgccatttatcaaggtaggtaaaaaagacaggataggaaagcccacaacagattctttgagatgctaatgaggtattccagaggcaaaagcccctgtggcctgcagataaggactgggaggaatttagatggcatttcctcactggaggtatttaaaactcagctaataaatgacagggaggacagggaagggggcaagggaggagcaccctgaggaccccagcacaagggaaccaagcagccaagggggcagggggatggggagctgccactcagtggatgctgcagagggaagctgacaagaggtgagaggtggaaggggaaggaagacacccactccttcaaaaagctgtgctagacctgaggggcccagagcggtcctctcctgggcctggaaggagggtgctgcagaggcgtgcctgcacctgggaggtttggctgagagggatgggttgaagagagaagaggaagagatagatggcacctcaggcagcctgttccactccagaggtcaggctgtcctgtctggtggctgacaatcagagaagacctgtgctggagcattcaatcaagggacagatttcaaaacacctgtctctcctctcatcactaccaaagaccctttcatagatagcattttgcatgaccttactcctcattataaaacatcttcctctggagctggagagatggcacagaggttaaaagcacttttccagagatcccgagttcaaatcccagcaaccacatggtggctcacaatcgtccgtaatgagatcagatgccctcttctggtgtgtctgaagacagctacagtgtactcatataaataaaaaaaatagtctccctccagaggatgtagctcagttggtagagcacttgcctggcatgtacaaagctctggggttgatgcccaacgctgcatgacagtaggtacctgtgacctcaactcttgaaggtggaagcctgaggatcagaagttcaaggtcatcgtcaactatacagcaagtttgagaccagcatgcgccacacaagaacttgtcactaaataaataagcaagtaaaaagaagaccttcctgtgcagtgtctcccactgttccctcagggtcccaatcccaggagactttggcaggatgtgaccaggaagtgtccactggaagaaaggcatggctccttcaagtatggcatgttctgataggtgtgcaaagatgtttgttacagcatcatgtgaacataacattagtaaagaaaaaagaaacagaagtgtcccactgtagtgagaggggctttatagctcatgatgtgtacgcactaggaacgtctgtgcagtctgggaaaaagcgagtggatatgtatatgcagatacagggaggggtcactagtacactacacgctcagtgtggccgtccatgctcagaacccgaacacttgggagcctgaagcaggcagatgagaatgaagccagcctgggcttcacagtaaaagtctgaaaagaaaaagagaaagagaaaagaaggaagggatggaagagagaaagcaaaggagagcataaagtacaatactcagcccaggatcatacagaagtgttattgatgtgcgcagagccttgtgaattccatttcacatggatctatcagagatggcaatcagcacgcacttgtggcagtgtcagagaggacgtcctgccactcaggacctcacaggacaatatatgaaatcacagttcttttcctctatgcttgccccaggcccctcctcccctgccttgctggcaggcgggcaggtgccaggaagtggcctgcacctgcgtggtgggctgaggttgcaggtcatcaccagcttcccatcccttaaccaactaacaaattagaccccaaacccaaggcttggaacagccaaaggaagaagggggaggggaggaccctaaagctcctcccacctagaattaagtgagctgcgacatgtgctggatgcatgtatttctccttcaaggcgtaattgctgtgcaaggtcctgggacaatgctgtctctgacattctttctaagtcagagatgttggcagcttgctggggaatgagtttggagcctcagaacacccatgaagccactggtcacagaagagatatctggaatggcatgaagcagggaaggaaggatgatcagttctcaggcgccatcttcccagtgcgtctgaagcatccgtctgttatggtggaatcaggggtgatgtcagatggaaggagactgggaccacgggtctctgccagggccagcctgtgacctgtgattaatgagagatggaatgtttactttcacccttgactgtttgtcactggtgtcgcgggcttctagggatagtgatttttctgcacggtctatttatggctctgtctccacacttactcatttctccatccagacaaggacaaaggtggaagtggcgtcttcctgctgtgacgcttgtaggcagtgaccgtgcacgctgcgggaatattgcagacttgctaccctttagtccctgtatggctgggccttggggggtctttcctcctcattccggcttgagagaaaatgaggaaagggcaatggtggggaccccagcactacccctatgttggttagttttggtcggtttgatacaagctagggccctcaatcaaggaaccgcctccattagattggactgtaggcaaagctgtaggacatttggggggcggggctgatgtgattgatgtgtgggcccaacccattgtgggtggtgccacgcctgggcagatggtcttgggttgcacaaaaaaaaaaagcaagtagctccatgagtagctccagtaagcggcaatcttcaatggcctctgtttgagttcctgctctaagaactgtgagctgaaataaacccttttcgctacaagttgcttttgcccgtggtgtttaatcacagcaatagaaacccaacctaagacaccacccatgtctgaaatgtggccttggccaagagaacgtgaccacctgccttgacctctctagttgagcactatggcctcctcaatatgaagagtaatcatgccagcctctctggactaccatgggatctctggaagagatggggtcctagcaggcagaacttactaatgattgcatttggtgttgttttgttttttatcacttgctttagttatttttctggtgttcttataaaatgagaagagcaacttaaagaagaggaaaagttgtcttagctcactgtccaagatagtctaggcggcaggaacctgaagcagctggttgtgtgccatccacagtcagaagaggcaaatgaatgctacatctcagctcattccacttacacaattcaggacccctagcacagggaatggtgccacccacagtgggtgggtcattccaccttagttaatgctgtcacgataattaattcccatggcgtgcctagaggtccatctcccaggagattctggactctatcaggttgacagtgttaaccatcactttaccattgtaaacatccagaagatacagtcaatgaccagtattgctagaatccctagagaccctcatctacagaaggggaacatgaggcccatggcacaaagccacaacgtacatatatggacagagaccactggaaaggctggtcaggagacctgactctgtgatctcatgaagctcagataagtagggagcccaacgatgggcaaccagcggtagaaggagaaacaagagtcaggagcgagcactctaggcaggcaagacaggctagatctggaaatgcaagtgaaaaggagacagacaggcccatggccagcttctggagtcctttgttcatccaggtgactccttgtaaaagccactcagggcagatgttattacccctcctttatagatgaagaggcttggatatagagaaaaagaattctttgatagcttggtcgttatagagatggaatatggacatagagtcagtcaccattcactgagccctttgtcatctcttaggaactgcctggatttgatctacccagcatgagacccaagcattaggcctgggggacttgggtgacagtcagtgggttcatgcaactgaaggccaggatgctgggcaccacaggaacagggagaagcctggaagttggtcatggagcactgaagtggaaagttatgggttctttggaaagtcagttgtgttggatggtgttttgctgaggcaaacacatgaaggagtgttttcctgaagtggacagagatgaatggctaaggcagactcataaaggaacatttagatgaaaggatattctactaaagtaagcacatggaagaacacgtgataaaggattctttgctaatgacacgcatgtcttggtctgccttacatttcgtagttgagctgcagttgttgggacttcatagagacaaatgcaccaaaaaacttctggtggtttgccatggctgtttttgccgcttccgcagactctgtgattggcagagtgatgtcagctaaggcaagacacacactgaggcaagactaatggaggacaggtgatgtttggagggactataaaaagtactccacagtgatgggagctgatctaggcttgcttatagagctggctgtacaacacttgttggtctttgcttcactgagagaggcacagcaaccaccactgctgattcgtgtttactatcccaactctactgaactggactgctggtgtatctgtgaaagtgtttgctagtggctggagctgctgctgctaacctgtgaactgccaatttccagacaaaacagatgggagttgctacaaagaatctttctaaacaggtccaccccccacccccccnnnnnnnnnnnnnnnnnnnncccccaccccccaacccccggcccatattctttctttttcactacctctggtgggtggtaggcaaaaggggaggttaaagcgtttaagaaccatcataaaaagtgagttttgaaaaaattaaagttacagactataagactctgacaagccttagcttaccgggggatcccccgaatacacaatgcagagcctggaatggatgcaaaaacaagaggagtttattgttccaatgtgttggggttgtcctgtacccgaaggagaggtggcgaccccaggtggccagttttcaggggtagaatagagcagcagccattaggcacaatgtgattggcagaatagtgtgacttttaaactgattggtccttagggaatgagatagcaaggggttcccttatctgtgggtggctaaaggttggtcctccctgaagaatgctctgggcttgcttccctcatctgcaggttggtcccccctgtggtctgaagagtctaattagcctcttttcccttctggaggagaagggtacctgtgttctctatgacctttctctttcaggaagggaggggtctggtggaattttccaaagttcctgagctaacctctttaagaccaccttggtaccttctctctcctagcggacagcccttctgggagctattgtagtatgcagggaaggaccactacagtgattctggcccagatcatcccactttaccttcaggaaattatctaagctgaacaggagtatgtgtgtgcatacttaggactcctgtgagacagaattctggttgagtatgaagaaagagatttgaatactgtgaagacagcaggcagtgactgaaagggggaggggggaaatcaatctccagtgtgggatgatatctctggctgtcaacaatgatttggatttaattacatcaaatatgcaaatgtgttctggaaactgtaaaataatacatagccatcaaatatggagaaagcttaattaggttgggaaaagaacacaggtttgactgtgagatgggtctgggctgaaatgctacctcttctgctgggaagtcaccctgcctggctgcttggccgctggtatgtgtccctcagcctcagatggagatctcatgtaccagtggccttttctgaacacttctcagaagtaggctacaagaaggagctgctgtgaccctggaagcagcacgaaggccttaagcccagaagacaggcttcctggggagtggccttgcactctgcaagtcagttgtgccccatacctctctgggtgggagaggatcggaccaagtaccagctggagctaggagggccctccatcaccggctgattgacagaatgaggccatgtcctgccggtggctgcagctcaatatgcaatggctatctccagtgagaggtgtgagtctgcaatcagagcctttcaaaggctgctttctcccatctgtcaacccacgtgaagtttcaaatcccactccacagcttatctttaggtgtggggaaaacatgttcgcaaacaccagtgtatctttcctctcattctcgacatctggcagagacggatggtgcccaaccattattcacgccaaggttggttttgcttctggaatttccttttcttccttaagtgtttcattgctgatgttgttgtttgtttgcagtcctggggccagatgtttgaagacttaacacagcaatggagaaaactgttgaggggttgttggcccgggtggcacctgccagcccggtgactttagcatggttcctgaatgtaaaatggctttgaacagcacctgctttatatgattttggtaaaatccaattgaataatgtgcaggcagtttttatctcagagttttcacgtaaaaagactcagtaaccgagagccaatgatgtttgtcacgttggctataacacgcgtgtaaagacactgatatcacgggatgtttccagtgcccaagcctggccttgaggggcctccctgcggcaggtggaggggcagggagagaggtgaggtggttttaacttcttcctaaatggctctgggactcagagacttagggagatggaaagagtattcccacatggcagggctgaagctctagactggatcacagcacccttcccccacctcattcaggatggattatggatcaaagagatagggtctctaaggaagtggctggggttaaatgagtcccctttccaattgtgctagtcccctagtcagaaaagacagcagaggacttgcccgttcactccctgacctttgaaggcacttaaggaagaaggtggactcccaagagcctgaccatgctgacacctagggttggaacttccatcctctaagtgtaaggtagtttgacaaaactgctctctgtcatcaaatctgtagaattctatggcagcctgggccaactgaggacagagatggtgggcagtgacactttaaagggaccttccccagcacctttccccagcatcctcaagggctcttcactgtcctgtcaaggccagtacatactgtcctagctctcccagacagcatcctctgggcttcctcactacactacctccagaagagtccttcaagacacagccacattggagtgttcatcccaaaggcccccaaatccactgtgacaagcacacttcctaatgctcactatagacagacaacacctccagaagaaggagggggaaaagtgcctctctggcaaggtcctccagttatcttgtgcatacagtgtttgaaaaccaaaggaagacctgtctcctggctctgttttgccaggactcttggttttcccctcacacctacatgtagcccttggggaggtcacagttcacactgaaactgctcttagactatatctagaaactgctcatccttagtaccttcacccccactgctatagcagtccaaggcaccactgtcagcctttgtttaaactggtgcagtatcattgtcttctttcacacacacactacataccacttggtctgagcatggagacaccactgtcttgttacttcacaactcccagctggtctctcatcttcttcaggctgaaaccttctgccatggcctacagggccatccatgacctagccttctagaaccttcttagcctattataccttagtaagactgatgggatgggggccaggagggatcaagaaactccccacttagtggtagatccgtgagcatacaagaatcaagagtgtgcagtctctcagaatccaagggagggttcaggacaaccctggaacaggtccatagtttctcagatctgtcattagactttaaaaataacaggttgggtttctcctaatcaatatcttaaaataaacatctttttaaaaaatgtcttcagcccaaagtcaagtttctcacttcaggacagtcagagcaacgttcatccagacaggactcagttaggggagggcttacctccagatgaggtccctggtccctagccctcagcagcaccccagaatttataaagacagattttcagaccccgccttagactccctgattggaagctctggcttgagggctctatctgaacttaattactatgttcctctcctggcccagtcaggggattgtgaagttcaggattccccagtcagaaccataccattttcacccatctgcgaatcttcataggaggatttttatggggctgtcccagctggtgtcagtgtccgtctgtcctgaacaatgaacatcataatgcctgtgtcaagtgtgcctccagaacacacagagctcctggggccctgtgaatgttaaagccagctgtaggacggaacagggtaaagcaccttcaagcgtgagcgcatgtgacaccatttgtaaaacacagacaagcttgtgaggccacggaagtgctgtcctgtgcggagttggcaaagaaccacctgtaggagagaatgcattgtagttccttctggaaggaatcatttgtttgggaaatttctaggtctgtcatcactgtgttaaatggtatagtggctgttaagcttctgccaaattgcttttcagaagtccacagtgatcgcaccacacatagtctgatggctgccttggcttagcttgtgagcaattaccccacagctttaacgctgttttacctccccattcctgtgttctgtccccgtgggtacttatgaggtcagaagaatttagatatgaacttaattactagatcaatgtaatacccacacacacccacacccacacatatatacacacacccccacacacacacatatatatatatatgttgttggggatatatatatatatatatatatatatatatatatatacactcaacaatcctgatatggaggagtattgttagtaaatgaatgagaaataaaaagcagttatgtgtcaattgcttattataccattctctgtaagagctagctaatatgagaagtcattgtccgagagggagtggtggagaaatcgtgcattaagacacaattttaatgaatttggctgtttgtttgttcaacaattcctgggctcaatgaagcctccagcttcagcctcccaagtgctgaggctacagttgtacaccgtctcacctggcctttccgaaacgctgtgctgacattagaatatcagtcctgaaggccgcacagcaacctggaaaagcatctgctcatacctgtaattcagacactgaagcaggaggtttgctatgagctacataatgggttctaggacagagtgggctacagagtgagaccctgcctcagagaaagagagagagaaagagagagagagcactcacagactctggttcatgttatcacaaatgagtggcactcacctgagtgctctgggggagggggtcagtaggcctgagcattactacagttacagctggcattgcgttttatataaagaataataatggaggaggaggataggctccgcctgctcccaggctagttaggaaggctcaaaaccagactggtcttccagcagctaggaattgctgctctcccttgctggtgggaacctcaggaccctatccctgctaaccctgactccaaccataaattttctcctgtgcaatccctgctgtcttcctcaattcgtcccatctgcggctccttaagccataagaaggttccgttctggggaagctgctgagcgctgacttgcgcaggccatcctactctgggcagcttgacaaaaagaggaacagagatctccagggactcagatgtgcttcggctgtcagggatcagaggcccctgtgactggtgtgctgtgcggggtgtgcctcactcccagtcctcagggccttccatggggagtccccacagggccagtggccaactaaaggctgccttctcacctggccccagctttaatatttttgcttgaaatttttctttccttttgttgtatttctctctctctctctcagtctgtctctctgtctctgtctctctgtctctctctgtctctctctctctgtctctctctctgtctctcattctgtcttttatgcagcaggattttgctatagagcccttactagcctgggactctccagacagaccagattggccttaaactctcagcaatcctcctgcctctgcctcccaagtggtaagatcatcagtcatgtgctacacactcggctttttcagtttttcttccgggagtaggatgctgtgtagtttaggagtaccctgtgctggatgtggagctggggtctggtcctgactgtggattattgactgactcggatgtcatgtgccaccaagctcttgggttaaaagacggtggcaagcaaggactccacagtgatggcagtgcccttatgggttgtaaagagccaagagtcctgtggggtaaacaggtctacaggagggctgtgagcttatgggtcacgacggcatgctgtgtgagtcactggtgcctgttagccttcacttctcttttccctcttatccaaagcctggctttcctacttctgctatcaacattggtcttaaaatactaagagaaggattgtagaaataaatagttcttacatcgtgaattatgtatccgaatcacatgatggaatcccaggatgacctgtttcttcccaccagaacccgtgaattgtctccctatccagtgtatccatactgtgtggactacctgactgttagtcacttaacaaccatctatatcaggtggctgtaacagcgtggctgtactggtgatgcttcagtaatcagtgactcaagggtagcatcggggataaaaaaggaagagatgaattaattctggtgctatgttgtgttgcatgcagggggaaaataaaataaagggggaaataaaggatatacagtacggtattggttcagcttcaggaattctctgggagtcttgaaacataccctcaaggataattggggaggggaactggtgtgtgtgtgtgtgtgtgtgtgtgtgtgtgtgtgtgtgtttgcaatgttttttcaaagcaacatatgtacccatcttcaaggtcagtgtcaccattaagaagcaggtgcccctgtagccacccttcatgcccactagaatttcccattgctggtcaagtgtaggggtgcagacatgcaatcacagcacttagtgactgaggcaggaggattgtacaaaattgagggcagcctggactacaaggcaagatcctttttcacctgcctcaaaagacaaaatacacttttggggcttatttttgcatacatgttcactctaggaaacagggaacgactgactaaaaaagaatccaaggatattgaattaaacactcctcctccttcagaatgtcctcatccaaataggtcagctatggactcttctccttgtcgtattccgtctgtgaatgacagctggcctcacacgcagtcttcagtggagggaacaatagggatattccccccaacatacaagatgctgtatatgctccttcctatcctgctcccctgtgtggccaccagacccaacaacatgaatgtctctggcctcaccccagagtcaacatttcaacaagacagtggggattaggacacccattagcacagagttgagatgggcttgagccagagtataaacggtgggctgctgccttcgtggaccaagactggctgtaggaactatcagctcaagtaaggtaagcagtgtgattgatgaggtggctgaatacattctggcccaagctccttctccggtcagatgccagagatgcacagcctcagactccgcctttggtgggccaatgagatagctgcagtttcagacaggcctcttggtggtccaggctttgggaagaaatgtttagctgggaggttgaagggtgagtgagcttctctggctgcaagctgggcatcatcctgcccagccaacgggaacacacacattcacatgcacagactcttatgctcggacacatccatggtcatatgcacagaacgcacccatgcgtacacaaacacaccacacagcatagcaagtcctagccaagaggtgggacatctctgcctcctgcatccctgtctctccacctctccacagcaggcttttgtttacatagaaaggattttccacaagactcccacactctttgctgtctcctctttggagcaaggggcttgtggggcatctatagtaaagagcagccgagtcaaaaaaaaactgatgtgtttggaaagaatcaaaagtgtgtttgacccactcacattcccaagtcaaaggtattttcgggtcccaggttatagctgtagctcggtatcggctgctgtggagcagcagaggcagggccagtgtcagctagcacaccttgtcccactgcctctggtcacagttgtcacctccctgagaatctccgagaaacacacagatctaggctctatggtttcttttcatgtggactcagcacagttggttttcaaactcatttcttcctacagcactattctctcagtgaccttatgaagttacttcatctctgtcttgttcctcatctgtagagtatagcaataataataacctctccgggatcccaagaggatcagtaacagtatctataaaacacctcggacagacacatcaattttcccacccattcagccagcagccagccagctgagcagccgctcactaatctagtgtgtctttaccaagcaccttctgggttcctgtcactgggagacaacgatgaactagacacaaagcagccaacaaaggatcacaaacctgagcacgctgtggcaagtgtcgccaccaagaaaagggcaaggagggcttggagggaaaacacttaggcaaaaactttctgagcaggactcccagcagcacaagaaacaatcccaggaagtgacaacaggaattccacgcaggtacgaggcttctgctcagcacagaacagtcaccagagaagagaacccacgcccactgtacatctgaccagagactaatttcaaacacgtatccattacaacaaacacaccaagccccaaattatccaatttatcagtaaatgggatgatgagttgaacaggcagatctaaaaggcagaagcataaatggccagtacttagccattagacatgatggagactggagttgggtccccaacacctgcaggaaatgccaccatggtagtgcaggatcagagtcccaaagctggagagggagagaggcagatccctggggctccctggccagtcaccttggcctactgatgagtcctaagtcccggtgagaaaccctgtttcaaaaataaaccacgaatgataaagagaacaacacccaaggttgacctctgacctctacatacatgtatattctcagtcacaaatacctgcatccgacattatgcaacccgcacaaatagtgccctcggctggagaccaagcgcctgcggtgtgtagggagggaggggactcacaacatgagttttacaagtaacaaaatgcaggaaccttaagatactgttgactgtgtatgcccacatcagaatggagcgttctgtggtcaatgatttagcaacatgatgcttctaatggtgaaagtttgggagcagggttttcatgggaacacagttcatcgtggtgcctgaaactaagatttggggcgaggtttaaatccaagcacaaccatttctacttcgacaatccccactgctctgagactctgtgaccccgtctctgagagagaaaacctacttcctggggccatttaagagcaggtgcctgagcatggaagatcctctgtgtgctggcctcatgtggcgcttcctgcgtgaggtacagtgagaagacaggcctggttgtcgctagtggctgtgctttggggttgagcatccctgaggtagcatgagctctctgacagcatctctttgtccacagggatgtgtctgcaggcatttgtcgaagctttcttcttcctggcccagaggaagttcaagctgcaacctctccatgagcaggtggcgtccttgattgacctgtgtgaataccacctgtccgtgctggatgaaaaacgcttgctgtgccatcggggccggcccctccaaagaaatccgccccagatgaaccgcccagagcattcagccacaggcagctctgcaccccgagtaatcggggctagcaagctctctcaatcctgacatgctctgtcctgaaggccactctgtcctggaagaaggcgtgcctgtgggggctgagtaccctgggctccccccacccccatctgttgggagccactagggttccagctgcaatcacctgtgcgtcctctctgtgttccgtagggcattttgcctcacacggccaatccttgcctgtccccttcccagcacttcatggtgacccaccctgtttgggaatcatcagtggatatatgacatccaagatgtgacagatggcaccgactattctgggctcctgggaagcaccaactggggcagtttttgctgtgcttggggcggcatgggaatggagggggaggggaaggtgaaggacagaccatcctaaggtaaagagctgtggatgtggagaacagtcacaccggggtctgagagcctgctggtcagagcttagcatcatcgcatgtctttccttctgcccattgcctgaaacgaagttgaaatacgaagaaggtggacacctccgatcatgtgctgcacgggtgtcctttacagacttacctcacttttttgttaacttgcctgttgccgcaatgtttaatactaatcaagaaataattaagaaataatacagtaaggtcttcagtctccccatccaggttccaggggacccctgcaacggtgggggactgacccaatggccaagagccactgtgtacccaacactgtgctgtgagccctgagtgaggggaggggcttcagaggggagagcataaggcccccatgatagcaggacaagcagacgtgtgtgtagagcatatggtagcctagaccagaacaaccagtgttctcgagtgtctactccgaggggcagaggtgaaaggccttggttgctgttccttggaacccaagtgggtttcccagaagtcccaaatgagaagtgtgtggggacattctttaaccagccttgagctgtacagctgtagaaagctattaaataaagctttgacttgacactgtttctcaaaatgagtctttagaaagtgctcgccagcttggagcagagtctgggggaggcacagagggggaaaaaacaggttcaagaggttgaacttagccagtacagcgatataaaaacgtcagcactcatggtgagagctggcctctacactatgcctgtcgtctggaggtaggctactgttggttgcacagtttcagagctgttctgtcctgggagcgggttcctgggtcgttgcacacgaccttggtgggctccataccctaaggatgtgactacatcatctgtgatggttacagaagcctgtcactgacaagttggcccctgtcccaggactgttggatgaattttgggggctgctgtactttgagagggaacaccaggagacttctgcccccacttccatttcctggatgcaccactgtgtttacttgctttggggactagcccctgctttttggaaggtgtgagagtaaagtgagagctatgcagacagcttctagcagggatggaactgagcctgagagcccaggcagacccagggaggcctctgtaagtgctgcatgctctgtgactgcctgtggtctaggtgccttctttgcaaagaccctagagatgcatcgcagcctgcagacaaggctcagcttttcctctgcctgagactggaccaaggacacagcattaagtgttatggtttaaatgatcgtcctccatccctcatcccagcacagcaaggcttcctgtagctctgcgcttccacgctccaaagaaatgttgggggaaaggggttccctcttaggaactgtatgtcttctccctagctcagacctaagccagttcctctcagatatggccccagacccctgtatctcttcccccctaacatcctagagggagcaagaacaccagagagaaccttcaaggcctgctgaaactgccccccagcaagggcctttgatcaagcccctcactttcttccctatgaggaccccgaaatcctggttttgacactctggctccttagagcccttagaatcttttgtcaggaaaacagtaagttggaagactctgcaggccctgctccagactcctcaccagacccttgctgcttgccactacttggtccaatcagatccctctggctaacagaaagcaacttgccaggtacagttcaagcatcctgctacagcccccagccacccccattcccatccctcacagaatgaggcctcttctatgtatgtccaggaacccaaaaagcccccttctttgtcaaattcacctgtgggaacgcagctgcagcactgttggatgcaggccagttgctagtgataggaaactgagacgttcgcctctgcatgtgctgcaaatgcccttatgaatcatgacgttagaagcttcattgagccaactggctaaaaaatccccacattctcaattgtctgattcccttccccaagcgtggaggctgtcccgtgaacccatgaataggcaatgactttgctgacctttgagcctttccacagcctgatgtctgctgtggacataggtggttagggagtggggctggacaggcatttgaaaaccattccatgtctttctagattattctaaagactccctgtgttgtgtgaatgaacatgttctcagtgtttcacagttcaaggggttcttttaaatttattctcttgtctgatcctctcagctacccagtgaaagatgaggattgtcaccagactttctgacacctatccaaagcccagttaggcagacgtggcagcccatgctgccaggaaactgatcttccaccagagcatacctgggaattctagggacatagaccctctgacttattcctctattacacagactgtaagaaccccaggtcctcgaccacctaactgggcaataccccctctccatgtcttgggacaattaggtaagacaacaaaagcatggaagtgcagaagtatttatacaaaccatgtgctggcgggatgtttgcttgccttcacacttgcttctgggttctagccactgtagcaggacagaagtaaaagctttcttgaataatgtcaatcatgatgaatgaagcccgagtgactgactccctccctccctccctgctgcctttcattgacacaaacttgaaaccattcattgccgttcctcaaatgtctggagttggccttctgactggcagaggtactactccaaaaaacagcttgacctgtctgctttgtcccttggctaatgtccgttagtccccagctctgtgagtgaggattgggctggcagtgcttggctgccccgctttgtcccttgactaacgtctgttagtcctcagctctgtgagtgaggactgggctggcagtgcttggcactgggtgccctctctttaagctcgggactcaggagccctcatctcggagctgcgttcccagcagcggagaactgccccagcttgaatagagaaattcaccagtgagcgatacagcctgaaacctacctagcctcagttgataatgttgccactctcccatttcttttgatgaaattttcccacacactatttctcacaaaataatgcaatgtgtgtttcttgttctcagagacaaagaaattgctgggaatggacagctttccagttgccagttcttatgaccaaatcttgctttgctttaactggaaaaaacacgttgcctctgtttatacttacacacacacacacacacacacacacacacacacacacacatgcacatacacacctgtgtgcacttacacactcatgcatgcatagtcacacatgtgttcacacacacacaatgcttgcacactcatacatgtgagagcacacacacaggcacatgcatgaagtgcatacattcacacatgtgtgagcacacacatgcacgtgcacacacaaatgtatgagcacacaaaacacacacacacacacacacacacacacacacacactgaacaccattttcctcattgctggaatttctttgcttctgagtctgatctggaaaacagagaaacaggccctttgcctccccgtacagcaaaacctgctcaccaagaggcttctgggaaatgtttctctccacaggaagcatttgtgctgaatctaaccagggctgtggtccccagatgtcacgcctctctcaggcctcacttaggctactgaggtattttccctatttcacaccagaatggagaagccagcagagaccgtctcttctggaagtctcctaagagtctgaatttgcttggcctgtcgggtgagtggcctgatgggtgactctcactccctgacacttgtccctctcccgtgcatcagagatcacgtcaaaacggtcacaacgagcctggcatgagacttggcacctgggaactgtcttcacaaacgtctgtagagaaaaggtatggtgtccgtatgctggaagcaatggctgccaggaaactcattggcaggccgtgagccctggcaggagaggctcctggaagtctgtggagacctcaagcccacctccctccatcactcccacctcttaaaagcctttcagaattctttattaaattttcatgtcgcatgaaagtctctgttacagcctcagttgtcttggtaacgtcacaaaatacagtaataaaatgaggctgagtgttgctaaccacggctcactatataaacagctatggagtattgacaatttcttttatgtggtaattttcaacagcaaacctgctgggtgtgtgtgttgtggggaatggcaatgtttgttcatttggggtcagttggtaagaaaagggcacctttaatttttttctcaccttatggttgatatttacttgagagatagtgactctagggacccatgaaatcctgagggagccagagagagaatttaggaaatcctccaaacctgcctgaagaaccgtctctcttagcagagagggccctgttagaagttgaccccacctttcagagactctaggagggatgcctgtcccgagaggtttgctctctgtgctccttctatgtgaagtcacctatgtagctcctccccagagcctgaagtgctgagaaaacagcaaagaggtcatcatgaaccccgctggccagcatnnnnnnnnnnnnnnnnnnnnnnnnnnnnnnnnnnnnnnnnnnnnnnnnnnnnnnnnnnnnnnnnnnnnnnnnnnnnnnnnnnnnnnnnnnnnnnnnnnnnnnnnnnnnnnnnnnnnnnnnnnnnnnnnnnnnnnnnnnnnnnnnnnnnnnnnnnnnnnnnnnnnnnnnnnnnnnnnnnnnnnnnnnnnnnnnnnnnnnnnnnnnnncagcctccttccccccatctcccccccccgcccgggtgcagcatatgttcactctgaatatctcccagactgtggcccacccggtgggaagtgggaagcagatggcctggagttaaaaataaagtgagacccccagctccctggaaatctccacccccagtggcttcagagaaacatttgggtttttttgcacagccctctgccacttagggaagaaagccccttaggcaggcagtgcccactgacaactccctggtcctttggttgctatttcacagaacagtcacacgccttgtcctcaaatgctgggacagccttcttggcccaggctttggtgtcacaggcctcggctctttagggatgagagagctgtcactccacgtcttctagagagacccaggtttgcctaccaggagtccctcagcctagtagagaagaaggcagcacacctgcaggcatggcttcctgggtcctctgcaccagggtgcagctttgaggcttggaattgagactcttttcacccggcagccttcccccagcaccctgggcatttgatgagaatccctggggattggggtccacatttgcctttaatcctagccgatccaacatcaccccccccaatcatgtaaggggtccgctgtaaaaaaaaaaaaaacaaaagacaaaaataaattattcttttacaaacgagggagcccaaagggggatcttcttgctctgctttgtaaggtgggagtgtgaggtaagcctcttcatgaagaagctcttagcccatcactttagcaagtatgccccgtggagtcagcccaggaaactccagggtgccactttcaaaactggactcggtggcagcgatgtcaccgtcattgtgctctgcttctgcagacacaccagcagcacgagcctcccatgcttccatcacctctgccgctcttacctgtgagcctgtgaactccaggcttttatagcgctggggtcccgggagaagtacccatccaagttcactgccagcctctggaatccagccatgacctatacctctagctccaccactgtgagtcctggagcgctagcctcttgcaggctaaggtgtacggttatcaaaattggtccatgccacatcccagggaagaagcttggttccagatgggaagggatgactgaatccatttagctcaccgtagcaaaataccataagctgaagaacaggaattttattccttactgttctaggattccgagctcaggatgccagcatagtcaagttctgatgcgggcccttgaggctgcagcctgccctcttccttctcattgaacttttctctggcaggaagagcatgggagagcagtctagggtcctttcagaaacgttccagtcttgtctctgatctaatcacttcccaaatgcccacctcctcatatggtcacagctggagtgaggagttggacaggtgagtttcggagggataggacgacaatattcagtccatggaaataggcttctctctcccccggaagagcggttcttggggactcttgaagcctcaggctgtgtctgccaccctaatcgtcttggaagcagtaacgatttgctgtctgagcagcaactcagtcagcattgccgtggacctgccctgagccattttcagagtcgtcagcttctggccacagttggacacagggtctgtccatgactgtgttggggcaaagcaggccacagattgacaggtcagaaatagtcacttacttgaagtttcatgtgttagcttgaaaagccctgtcaattttgcattctgtacagcaccctgtccatactttcgccagcctaggtagaatagaagtaagcaagactgcaggctgcagcagcttccctaggaggctcagttcatgctcacatagtcgcacctagtaggccaggtagcagtccagggtgactctagctgcttccaacctgggctctgcttccctctccagagaggcaggaggtcaactgggttactgttctggccaaagccagctctgtctctgccccacatgccttggccatcaccttgtcatatggccctgatcccatggctgctatgatgggaaatgcacttgcctgtacactcgagagagtaatgtgggcccacaatcactttctacaagctcagttagggtacccatgcacactaacctatgaaccacacctgcacaaaacctttgccacagcccaccccactgcaacatggccacgtgttcttactgccccgggtgtggcatatgcccacccacaccaacatatgcacacctgtctcagccagacagtcgtccctgaaatccaaagctgattgattccaaggtcccggaagataccaaactctgaggatgttcaagtcgattatgtaaagtgggtattgacgagatgtaactcatctttccatatactttaaatcccctctagacttcgaggctttaattcagtgaaagtgctggagaaagagttgttaactgttgtagggggagtaacgaccaggagagactcatcccttctcaatagttacactcattcaggaatatgctggagtatttgttggttgaaccttcgtgggagtgaatgactggctgtactcacaacttcaacccagtgtacatttggggaaactgaggtacaaagctgagacgacataacttgcccgtggtagccgtgtgttaatgccagagctggtctcagagatggacctccagtcacataattgactcaatagattaagaacctggctgccaaaccagatgacctgtcctctgactgccccatgtgtaccatgctatacccccacatacgaatgaatgaaagaaagaaagaatgaatgaatgaatgaatgaatggacaactgaatgaatgggttgttttaagtggtgaagctccggcactatcagagcagtgtgagggtccggcgaagtccctccatagcagcatgtcagagtttccagaagccctcagctccctgaagccatctcaggaacatcacagtccctgcagcctgcaggtctccctgtgctgagttttacctcatatggagctcttgaagtcagccatggggcttagccttcagaaatggctgggcttgtctgcaaagtgaacaccaaggggaatctacaacctagggttccggcaatctggctagccctgtttctaacccgatgtgcctggctgtgacaggaaacgtaagaatgtccgataaccaggttcattgtcggctgcagccacccagacatcaggggactgcaatggcattgttcccattttacagctgagcagatggagccactgtcccctactactggccatgcagccatcagagaaggtttgactgcagagggtacagagttccttgtgacaatagacagacgaaagccactgctcttgttactgcaggtcaacgagtccctagctccaagcagagaggactaagacacccaccgacttggtccccaagcatggcccctggccctgcaaacagtggactctatccacacagtgtaggctcccaactgctgtccctgtgtgctagtctgtccacgtctctctgtgttcacacgaggcctgggaagtgtccccttagctgaggagaaggacaaagttcttgttcttcctagagaagtcttagggcctgcaaaatgttcagtggatgggggcgattgcaacttgtaaaaactcagtatttatacattagcaccactgaggaatgtcagggcaagaactcaagcaagagcctgggaataggagctgacacagagaccatgaagaggtgctgctcactggcttgctcccccttggtttgctcagcctgctttctaatacggcccaggaccaccagcccatgggtggccccatccacaatgagttgggccttttcccgatctgtcattactccagaaaatgctctgtaggcaaatctgatggagtcattttctcagttgagttttctcttcccacatctagctgtgtcaagttgacaaaaagacgacatgatacatggagctaaaacaaagtacagtgtaaaggcagagagtgacaaggagtgtccccatcccccctcattactgttggcaggtttccgtgtctttttaggcagcctgtgtacatttaagaactcttaggcatgtatgtggcatgtatgtgtgtgtggggggtgtgtatgtacatgcagggtgtatgtgtgcatacatatatgtgtgtttttatatgtatgtgtgcacgtgtgtctgtgtgtatggtgtatggtgtttgtgtccattcttctgttttgtacacaccaacttgttctctgctttttcaacccaacactttttggtacatacacaacactgtatcatggtacacacctggaagtgggtcttagctttttagcaattatagaatccagtacatgatatattgtaattacatagtatatggctcctttcttcattggttcttaatcaatatatcttcatcttgccaggtctgtcactaagtgtcacagggacagctgtcacaaacacactcactttatgtacaagaatcacgtgtcctgaagggagaattaccaggccaaatggtacacgcattttaaaattacaccaatgtggttttgttgatcttcaaaagggttaggcactttttcagccccattaaacctgtgcgaaagcgccaggctggcatgtactgtcgggacgcaactgttagtccattggcgggtaggaaacacagtaccatctcattacagatttaattttcacttcgagactcttctctgtgtggagagccatcagcaattcatgttctgtcagctgcccgccccggcccccacccccacaccctcatcttggcttgctggtccaacacgcttgctcttgatttgtaacactatttgccgatgaaaagaattggcctttgctcatagctctgcaaaatccctcttctacatgagctgtcttctccaagccagacaactctgagtgcctcagccttcccacagtgccttgtctatactgcggagcccaccactttgctccctgggaagatgtaagccacaggccatcagcacatgcagtcactaagacaagcccccataggcatcaatggagaatagggaagaacctaagaacccccccacaccggaagccatgaacagccttgctgagtgctcagaacccccaccccagcccagcccacactttgtgccattccacgacccccttccctgttccagtgctagctccagtcagctcctaacccccctctctgctatggttctggagaacatgcaaagcccccaagttaaaaaccaacagatgtgcaaggctgaccctgctccctgggcggatccctcctgccctgtggctcctgaaggccccatgaagccctgtcatccactcagagtgattctctttgttgtctaccccagggcaggtctgcaccccttcaagaccccactctactccctgcaagaagacattcgtaatggggaagagggaaggaagggaggcgggcaagtgggagggacatagatcccttccagctacagaactcagtggacccaggggcaaaggcgaaggcccagaagcccctctaagacttcaatttgcccattgggctgtgctttcctgtaaacacccatcaacact

SEQ ID NO: 132 - DNA, 2993 bp, Mus musculus
ccgagtcgctaccggcggagactgagaagcagcagggcgtggacgctggcgcggccggggatccagagcgcctggagctggaggagcagcccaaggacgtgggccggatcccgaccccgacgcgacgccacgcgcccgaggaaggagaggcccgcgtcgtccggcggctgccaccagcgctgcccctggcccagccgaggccggcggcgcgggccctgagccagctcgtgaaggcacggggccggagccggagccgggtctaccggcggagcgcaggctcgatgcggccggtcaccgtggacagctccaaggcccgcacctccctggacgcgctcaagatcagtcttcgccagctcaggtggaaggagttcccatttggccggcgcttgccttgtgatatctactggcatggagtttcatttcgtgacagtgacatactctccggtcaagtgaacaaatttccaggcatgacggagatggtgcgtaaggtcaccttgagccgagcactgaggatcatgcagaacctgtttccagaggagtacaacttctaccctcgctcctggatcctgccagaagagttccagctctttgtgtctcaggtccaaacggtgaaagaaggtgacccctcctggaagcccacttttattgtgaaaccggatagtggttgtcagggtgatggaatctacctcattaaggatccctgtgatggtcgcctgactgggaccctccataacaggccggcagtggtccaggagtacatccgcaagcccctcctcatcgacaaactcaagttcgacatccgtctgtatgtcttgctgaagtccttggatcccttagagatttatattgccaaagatggactctctaggttttgtacagagccatatcaagaacctaacccccagaatctgcaccatgtctttatgcacctgaccaactactccctgaatatccacagcggcaagtttgtccactctgacagcgccagcacgggcagcaagaggactttctctagcattctttgtagactgtcttccaaaggtgtggacatcaagaaggtctggtctgatatcatctccttagttattaagactgtcatcgccctgaccccagagctcaaagttttctaccagtcagacatcccaacagggaggccggggcccacctgcttccagattctaggctttgacattcttctgatgaaaaacttgaagcctatgctacttgaagtgaatgcaaaccccagcatgcgaattgagcatgaatacgaactctctccaggagtgtttgaaaatatccccagcctggtggatgaagaggtaaaggtggctgtgatcagagacacgctgcgcctcatggacccgctgaagaagaaaaaggagatccagtctcagcagatggaaaagtctttcacttcaaaggaagatctgaactgtgacccgactggtggtgactccgagcccaaccctgaagcccatctgccctccatttgcctcaagcaggtgttccccaagtatgccaagcagttcaactacttgcgcctcgtggacaggatggccaatttgttcatccgatttctgggaatcaaggggacgatgaagttgggaccaactggctttcggaccttcataaggaactgcaaactcagcagcagcagcctgtccatggcagctgtggacatcctctacatagacatcacaaggaggtggaactcggtgaccgtggaccagcgggactcagggatgtgtctgcaggcatttgtcgaagctttcttcttcctggcccagaggaagttcaagctgcaacctctccatgagcaggtggcgtccttgattgacctgtgtgaataccacctgtccgtgctggatgaaaaacgcttgctgtgccatcggggccggcccctccaaagaaatccgccccagatgaaccgcccagagcattcagccacaggcagctctgcaccccgagtaatcggggctagcaagctctctcaatcctgacatgctctgtcctgaaggccactctgtcctggaagaaggcgtgcctgtgggggctgagtaccctgggctccccccacccccatctgttgggagccactagggttccagctgcaatcacctgtgcgtcctctctgtgttccgtagggcattttgcctcacacggccaatccttgcctgtccccttcccagcacttcatggtgacccaccctgtttgggaatcatcagtggatatatgacatccaagatgtgacagatggcaccgactattctgggctcctgggaagcaccaactggggcagtttttgctgtgcttggggcggcatgggaatggagggggaggggaaggtgaaggacagaccatcctaaggtaaagagctgtggatgtggagaacagtcacaccggggtctgagagcctgctggtcagagcttagcatcatcgcatgtctttccttctgcccattgcctgaaacgaagttgaaatacgaagaaggtggacacctccgatcatgtgctgcacgggtgtcctttacagacttacctcacttttttgttaacttgcctgttgccgcaatgtttaatactaatcaagaaataattaagaaataatacagtaaggtcttcagtctccccatccaggttccaggggacccctgcaacggtgggggactgacccaatggccaagagccactgtgtacccaacactgtgctgtgagccctgagtgaggggaggggcttcagaggggagagcataaggcccccatgatagcaggacaagcagacgtgtgtgtagagcatatggtagcctagaccagaacaaccagtgttctcgagtgtctactccgaggggcagaggtgaaaggccttggttgctgttccttggaacccaagtgggtttcccagaagtcccaaatgagaagtgtgtggggacattctttaaccagccttgagctgtacagctgtagaaagctattaaataaagctttgacttga

SEQ ID NO: 133 - protein, 663 aa, Mus musculus
ESLPAETEKQQGVDAGAAGDPERLELEEQPKDVGRIPTPTRRHAPEEGEARVVRRLPPALPLAQPRPAARALSQLVKRRSRSRVYRRSAGSMRPVTVDSSKARTSLDALKISLRQLRWKEFPFGRRLPCDIYWHGVSFRDSDILSGQVNKFPGMTEMVRKVTLSRALRIMQNLFPEEYNFYPRSWILPEEFQLFVSQVQTVKEGDPSWKPTFIVKPDSGCQGDGIYLIKDPCDGRLTGTLHNRPAVVQEYIRKPLLIDKLKFDIRLYVLLKSLDPLEIYIAKDGLSRFCTEPYQEPNPQNLHHVFMHLTNYSLNIHSGKFVHSDSASTGSKRTFSSILCRLSSKGVDIKKVWSDIISLVIKTVIALTPELKVFYQSDIPTGRPGPTCFQILGFDILLMKNLKPMLLEVNANPSMRIEHEYELSPGVFENIPSLVDEEVKVAVIRDTLRLMDPLKKKKEIQSQQMEKSFTSKEDLNCDPTGGDSEPNPEAHLPSICLKQVFPKYAKQFNYLRLVDRMANLFIRFLGIKGTMKLGPTGFRTFIRNCKLSSSSLSMAAVDILYIDITRRWNSVTVDQRDSGMCLQAFVEAFFFLAQRKFKLQPLHEQVASLIDLCEYHLSVLDEKRLLCHRGRPLQRNPPQMNRPEHSATGSSAPRVIGASKLSQS

SEQ ID NO: 134 - DNA, 139326 bp, Homo sapiens
  misc_feature (1)...(139326): n = A,T,C or G
taacaaagcaccattttgcatttccaccagcagtgtgagagctgcagtttctctacatcctcacacttactgtctttttgattctaactatcctagtggatgggaagcactatctcactgtggttttgatttgcatttccttgatggtgaatgatgtggaggatctttcctgcttatttttatttttatttatttatttatttatttatttgagatggagttttgcttttgtcacccaggctacagtgcaatggcgcgatcttggctcaccgcaacctccgcctcccgagttcaagtgattctcctgcctcagcctcccaagtagctgggattacaggcatgtgccaccatgcccggctaattttgtatttttagtagagatggggcttctcgatgttggtgagtctggtctcaaactcctgatctcaggagatcctcccacctcggcctccccgagtgctgggattacaggcatgagccaccgtgcccagcctcctgcttgtttttgtaaataaagtttggaacacagccatgctagctcattcatttacatggtgtctgtagctggtttctcatgataatggcagacttgggtggttgtgacagaacctacaaagcctaagatatttattatatagtccttacagaaaaagtttgctgattcctgctctacactacagaggcttataatcttgctgtgaaggtttgtttatatcaagttcccaatatactggaagtgttaagcaaatgtaagtttcttcctttcctccatctttccctcccgccactcctctctctcttcctttctttcctagggctctttctcagagcagacaagattaggcctccatctgcagctccaatttctccctaaagctgtcttcacctccctccggcctgcccctccaggtatgtctgtccaccaggtgccaggtgtggctgcccaaagatacctctgtcttccatcagccttctccaggaggcttcccagggcaggggctccacaggaggtgttgctagtctggaggtctcctagtgaccattcatccccccaagacaagggggtgctatccttgaggctgatggcagcttcaagctaatctcccagggacagggatgccctggaggaagaggcccagggggaaggaagccaggatcacctccactcatcctcaggataataactagagggggcaggctccccagtgcttccagagaccctttcatgaagttgttgagccccagggtacagaccagggctgtgggaccccagacttactgccatctcctaagcttcttccttggcaaagtgaaagcattggaaggatgagtcttttggggacagtgaggagggaggaggaggaaactgggagtctctgaaatttggctggtgagaggggagcccagtccaagctcctggtgcctgaggaaagggcaatgctgatgagcctgagcagcaggaagggccccagttccctcctatctcggtccccttcccacagccgccccccaccacctctgggctgcttaactgcagtagactcctcactggtctcctcaccccgattctgcccccaagccctcttccaaggtagaataaagttaggggtcaggctctgggcccgggttggcatatgagctccagaacttccagctgagtgactttgggcacccacttactttccttgtgctgcttcctgatctataaagtgggagaccactgctgtctacctccttagttgctgtgagccataaactcaataatccacgtaaagggtttaggacaataaatgttaacttacttttatttctcaacgtgcagagctttatttctgaaatagaaatctgaccagtcagtcctctgctaaaaaccctcctagggacccctgaagctatgggaaggagcttgttttgtttttgtcaccaggctggagtgcagtggcacgatctctgtcacccaggctggaatgcagtggcacgatctccacttactgcaacctctgccttctgggttcaagcaagtcttatgcctcagtctactgagtagctgcgactacagacatgtaccaccacgctggctaatttttgtacttttagtagagatgggatttcgccatgttggccaggctggtctcgaactcctgacctcaagtgatctgcctgtctcggcctcccaaagtgctgggattataggtgtgagccactgtgccggcagtgaaggggcttgttctgaccctgagcttgccagcctctgcatgtctttaccacacccctcctgcccacacccagcacccccttacgttccctagttcacctgtcagggcctttccctgagtgatcggttctgccaggcgccctgctcttgtccctgtcccctcttctgggacgtccctccttgacttccacgcacagcatggacacatgggtgtgcagaagtggaaaggggtactcggtgcacagatatcatatggcattttgcaagccatgaagcagggccccaccccagtgggctgttggtcactgtgggtcccactgtctgctgttgtgtttgaaaatagcctctggccttatgcctctccacctaagcacataatgtatgacgtgggttcttaaaacttggaatcagttaaaatgtatcttattttaaacaaaactaatccatgctattagaagtcaggaaagcaattaccctagggtggggcttccagggtgctggggatgttctgatttttgatctgggtgttggtttcttcggtcttttcagtttatgaaaatccatcgaagttttctgtgtgtatattaccctccaataaaaatgtcaaaactctgttttgtttcggtaatttcctctttcacccctatatcccttgacatacctgtagatacagaactgtaaaacctaaggcaacaatgcccaggctaaataattcataatccaattccataagtgccatttactctgtgctgggccctgtgctggggccccaggggactgaatcaaccacagcccagtcctccagaaactcctggtctgtggggatggggaaatgcagcctagcatggggtggagaggtcataaaagcagatccaagaggaggggatgtcactgctttctagagaatcataaagccaagagggacataggggcataacagagatcaacaggttacttgagggtttggtatatgccggccgtttctgttctaaatgcttttccatgtggtggctaacttaatcctcaaagtaacaggaacaccgggaggtaggtactatcattttcaccttttcacagtgaggaaagaatcacagaagagccaggtaacctatctaagtataatcagccagaaagtgggagagataagacttgaacccaggctgtcagcttcagaactcaactcgtgctcagcctccaggctaaactgtgctgtggggaaaataatgttcagttaaatgcccaaatacacaacgaggctcgacatacagatgtgctccatgaacaatggctactactgacaataagaaagaaacaacctattagagaaaaagttaacctgaaactgaacatgacgccttttgctcattcattaagatcggccacgccgccttccgggaactggatgcccccgggagctcagccataccctaagaaaaggagattttgtagctgggcctgaaggataaactgagcggattgggtcaggtgagctgtgagggagggtgcacccagcagagagagcaatagtggcaaaagcccagaggtgcaaaaatgtgtgtgtttgcaagcttagctgggcagagctcgcgattcagaggcgcttcagccttctccctcttaaaaactggacctcgggcgccacctggtggcgacctctgatactaatagggcagaaacaaccagctggggcaaaagttccccacacccttctctcctggaccatttgttcctcctgtctctttccccacaaatggatttgctgtaaaatggacttttacagctgttaacgtcaatttaaaaatttaaaaagtcaattgactttgacagctgtaaaagtccattttacagcaagtccatctgggggaaagagacaaggtgttgggatgtggatgggatgggagtggtgaagacatggtgaggtcagtgtcaaaacaagccccttcccggcgcagtgtctcacgcctgtaatcctagcactttgggaggtcgagatgggtggatcatttgaggtcaggagtttgagaccaacctggccaacatggcgaagccctgtctctattaaaagtacaaaaattaacccatgtggtggggagtgcctgtagtcccagctactcgggagactgaagcatgagaatcgcttgaacccagaaggcagaggttgcagtaagtggagatcgtgtcactgcactccagcctaggcaacagggtgagaccctgtctcaaaaacaaaaacaaaacaagctctttcccatatagcttcaggggtccccaggagggttttaaacagaggactgacatggtcagacttctattagagaaagaacactctgagcattgagaaataacaactaaggtaaaattttaatttaaaagtacattgattttccagttattaaggcaacgcgtgctcattgtagaaaatgtggaaattatagaaaagaataaagaagaaaataagtcacccttaattccatcacccagaataaccactactaatattttggcatatctgcctccagtgtttttccctgcatataattttcacagagctgaggattaaactcgctggtgtttaaatgtatgttgagtatttttgtggacaaagtcttggtgtgtgaataagtgtgggtgttgggagctggtgctggtgtcagaccactctgagtttgaatcctgtctttgcctttactagctgtgacttgggcaagcgccttctcttctcggagtagtagccatttccttcaccatctgtaaaatgtgattaacaatgggacccatcccagagctggtttacagattaaatgacatgatgtatgcaaaatgcttaggacagtgcctgtcgcagagaggttactcaccagtaacagattactacctaaagctttgtctttccgactcttatcagcagtctctagaaatgagattgatttcaaggttcaaggatatgaagagccacaaggttgttacggtttgccaaaactgagtggaaaattttaagcaagatctcgtgtctccggcaccacagctgttctcatttgtctctatattcttccaggccctgtttacgcagagcactttttaagcattgtaattgcaatgcttgcaccagttcccttaatgttacatcatcaacattttcctaagcggctgaagctgtcattgacagcgtttgctatcattcacttaaccattttttaattgttgactatctgggcagtctaatttttcattcattcattcattcattcattcattcattcaacagttccagaatgcctactctgtgccaggcactgaactaggcactaggatattgtggtcagcaagaacaacacaccctttatattctggcacccagactctggctggcaagacaggctataacaagtaaacaaacaagtaacactccaactgtaaactatggtgagtgctgggaaggaaaaggagagaactcccggagaactttattttcacatttgtgtattttttggaagtaatcctagtcctgaaatctaacctgcttttgcttcttagcagacacagctaaagcttttcttgaagaagtctcatgtgggtttggattttccactaacacattttagaatttcctgagaagtcaagggtgccatggtattcaaagacctgacagtcgggctcaagtgggccttgtttcctttcttttctcccttgctcagaggcttgtatttcaactggtccagtctgctccctgccctcttgaagaagcagatgattatccccttcttaaatcttgcttcaccttttcttcatcttccctctcagtacagggcctccatgagccctgggagtctttaagccaatgggcaaaagcacccccatcccatggccaaagccatgatgggtgaggctttgcacacattggatttcaacgcccgcaaggcctcttgcatgactgcagcagccctatccatagctcttcagtgaccaccccacctagctttctatcaacctgattcctactccacctcgaagactcagcttatagtctctctcttataggaagcctggtctagctttctaattcacagtaaattctctatttcttgagctactggatgaattttattttttactctttgcctcattggcacttaatcatatactccctcatgacacctcctattttcctctcttgcataattatttcatctgaataagtctgacttagatgaagagatcagaggtatctgtgcagatgtatcatttacactgaataatgaaggagcagtagccagagatctaaagaaaggcagagggcatgtgcaaaggccctgaggcagaagaggtctcgggatgtgaagccaaaatgaatatttctatatgggattgtccttacagatttgacatatgaggctgaaaatgactcattcattaatacatccatactactttgttcatactaccatgaacaaagcaagggccactgtgttccaagacccaagagatggggatacagagatgaatcagacaagatttgttcttgcccagactaatggtggaggctgagatgatttctagatagtgtgacagacagaccagggttgagagttgtggatgagaattatgggtgtgaatagaagagcacagagagtaactatttctgcctgaggcactgggaaaagtttgtctaagaacagacatgaaggaagggaagtccagacagaaggaacaatgtttacaaaggcatggaggcagggagaggggttgatttcagaaattgtaatcaggaagggcctcttaggacaatcaatgttcttggactttatctgtagatggtgacaaaccaggggaggtttctaagcaggagagtggcaggtctggtgtggagaatgggtgggtgtgtggcagagctggaggtgagctatcagcagaagcctgaattggggtggtgatgatagagatagataagagaggaaagaggagatctctctctctctctctctttttctctctcgaatgagtctcgctctgttgccctaggcgtgcagtggcgcgatctcagttcactgcagcctctgcctcctgggttcatgagttttgtgcctcagcctcccgagtagctgggattacaggcatatgccatcatgcccagtttttatatatatatatatatatatatatatatatatatataaaaatatatatgttttttttttttttttttttttttttttgagaccgagtctcactctgtcgcccaggctggagtgcagtggcgcgatctcggcaaatttcaagcatggatgactgaatgaaggtagtgccacttgctgagatcaaggacaccaggaggagggacaggatttggggggtaggtttgtggagagaaatggggggacagtgaggccttcttactgataccacggacagctccaagaatttccagaggacttgcatcagactctatgagtggttcttgcctccgctgccttagaatcagcggaggagctaatttaacatgcagattcccaggtccacccagatgtgctgcatcacagtctctgggggtggggtccaggagcctgcattttaaataaacaccccgggttgttcccatgcaagtggccagacgaccatgcttacagaaactctgaaacaaagtcatgaagggaacagatgcgagcgccctctgctgctaaaaaggaggtttggatctcttaagtttatgacttggacatttcaaggcagtttattcagcaagtgaaacccctggactaaagcaaagaaacaagacacctggagagatgagagaggaagaggggccacgttccttgacaacttctgtgtttctttcaccctgtagtgtcgagcgaggcaaagttcccctgtgtgcagtcgtggccgctgtggtcagtctggggtgctgttacaccttctcaaccccacttcctaaaaaaacaaatgcggctccctcaggtgggaggggagagctttctccttggtttggctttaaaatgatggcaactcccaaaaatggaaagcaggggctcaaacaggtatttgtataccaatgttaaccgacattcttcacaatagccaaaaggtggaaacaacctaagtccattgacagatgaatggataaaaacgaggtggtgtatgcacacgacgaaatatttttcagtcttaaaaatgagtgaaatttggactcatgctacaacatggagaaaccttgaggacattatgctacgtgaaataagccagacaaatactgtatgattccactgacatgaggaaccaggaatagtcaaattcatagtcagaaagtagaaatggtggttcccagggactaggagagaagggaatcccgacttattgtttcatagacacaaagtttcagtttggtaagataaaagagttccggagacccatagtggtgctggttgcacaacaatgtgagtatacagaatgccactgaattgtacactaaaaatggttaaaatggcaaattttgttatattttaccacaacaaaaaaagtgatataagtaaaagcagtcaggctggacgtggtggctcacgcttgtaatctcagcactttgggaggctgaggcgggtggatcatctgaggtcgggagttagagaccagcctggccaagatggtgaaaccccgtctatactaaaaatacaaaaaattagccgggcatggtggccggctcctgcaatcccagctactcacaaggctgaggcaggagaattgcttgaagccgggaggcggaggctgcaatgagccgagatcacaccattgcatcccagcctgggcgacaagagcgaaactctgtaacaacatcaacaacaacaacaaaacaaaaacaaaaacaaaaaagaaaacaagagacgcggtggttctgcttgtaatcctagtactttgggaggccgaggctggcagattacctgaggtcaggagtttgagaacagcctcggcaacatggcgaaaccacgtttctacgagaaacacaaaacttagccgggagtggtggtacattcgtgtagtctcagctactcgggaggttggggtgggaggatcccttgagctctggaagttgaggctgctgcagtgagccgggatcgcgccactgcactccagcctgggcgacagagagagaccctgtctaaaaaaaaaaaaaaaaaagaaaaaaagaaaagaaaaagaaaaaatcgttaatatcctcaactcgagtgggaatctatagggggcttacccatgcccatgacttccccatcccatcgggagctccctgagaacagggaaaagtgcctcccctcttatctgggggcgctcaaaggaccagcagagggtttcttcagcggaacactctctgctcccctagggcctgggctgctcacatccatcgcactgaggagggtcccatccattgcactgaggagggtcccatccattgcactgaggagggtcccactggggggctcctcctccgtcctatcgagagttatcccagcgagtgttggcggggactgagcctcctgcttgaggtagttgtttttactcccagtccccaggctcacgagccccacgcgcgctcaatctgccctcccgcttctcctcgccactccgagttctgcgccctcgagatccagcgcatccgcggggtgggcgggtcctggcggctctttgccctcttccaacatggccgccgctgcctctgtgacaggcagggtcacgtgggcagcctcgcctatgaggtcgctggggctcggccggcgattgtcccttcccggaccccgtctcgatgcggtgactgccgctgtcaacccgagcctgagcgatcatggcaacgggctcgggcggggaacgcgtggcagcggctgcagcggcggcagtttggtggcggactggggcggcggagcggcggcggcggcggcggtggcactggcactggccccggccctgagcaccatgcggcggggcagctccgagagcgagctggcggcccggtgggaggcggaggcggtggctgcggccaaagcggcggccaaagctgaggccgaggccacagcggagacggtggcggaacaggtccgcgtggacgcgggcgcggccggggaaccggagtgcaaggcaggggaggagcagcccaaggtcctggccccggccccggcgcagcccagtgcggctgaggaggggaacacccaggtccttcagcggccgccgcccacgctgcccccgtccaagccgaagccggtgcagggcctctgcccgcacgggaagccccgggacaagggccgaagctgcaagcggagctcgggccacggttccggcgagaacggctcccagcggccggtcaccgtggacagctccaaggccaggacctccctggatgccctgaagatcagcatccgccagctcaagtggaaggaggtgaggcccggcccgacccggccgcgtgggcacagtggggtggacaggacgacctcagaggtctcggcacggcccaggtcaggtcggcgggcgagggctgagctcctgcggtgcaccacgctcgggcctgcttgtcagccgcaaagtgctcatccttcaaggcctaccccccaaaatcacttcctccaagagggccccccagacccctccaggtcaagttagccactcactcctctgcctccctgcagctctttttatgtctcagccatcagcatttgcctctgcttgtagatatgtgtacgtctgtctcctccaccagcttgtaagcccctggggccccggacccgctctctcacttcttcattgaagttatatttgtttagcacttgctgtgtgactcttgggcagaggaacagtttttattttggaggcagacaggcctagggtctcactacactttgctacttagctgtgtgaccttgagtaagttgcttcacctcttcagcctattaccttctctgtaaagtgaggccaattatacttatctcatcatcttgttagcattagaagactcactacttagtgttttatagcacaagtctgcaataaatggtaacttacgttaccaccttctcctttctctcttcttccaccatcatcaccatcaccaccaccagcaccaccactgtcctcatgatcagtggtataaaatcaggcactgtattttatattccaggcttggcttacggcatgtgtcagtaagcagtgaatgaaagggtgaatgaatacatgagttatcatccctgagcccattttagactggcaggggatggaatgtagcaccagtgactctagaggtgtctgttgcaattggctacgtggataaagccatttgactttatttgcagcatataaggtatttaatgtgctttcaggagtgtcaggagtttgattaaggatagctgagtgtggacacagccagtggtaacagggatctgctgcgggtaacagaggactcaggttcttagccctgtgccttggctatggtagatgctcggtaatggtttcattaagttggaacatacagagagatggccacagaaaggactgatgtggtcagagggttgatgtcccaataggaaaaagtgcatttggtttggagggaagtcaaggatcaggcagaaccgacttccaggtggatagggtgtagccgttggggaagtttgactccaagtgtctgggcccccagccttggggcttgggattcagaggggaactttcatgctggggaaacttggggaaaacaaaggcaggctctcagttctaaagtatctgggtttctaggcagggccccaggtccaggccagagatatgagggctagaaaaggtacaactggacaacttgtcagtgccgtggtcttaatgaagggagaatccagcaaataaaaccaggctatggagtcaggctaggcagattggcccaagtggggcctccacttagcttatccctgtgggagagagagacataaagcaggccagatctcgtttgctcggagagatggggccagatggactaatacatcccagcccaggttcgttcactcattccgtaaatgtccactttggaggtgccaagttctttgctgggccctgggaaccaaacatacttaagatgtgacccttgcccccaaggacttcatggttcaatagggaataaaacacaagtaaaggaataattgcggtcattacaggtcattacattgctgctgcatcctgaaattctcccttttcatttatttgcatggcttactcttgtcacttctttagatgataccttccccatcaatctccagcccttggtatttattttttttccatagtactaaacttcgccaggcattatattatgtattgcttgtttattgtcgtttccctcactagaatgtaagctccatgagggcaggggctttgttttgtttattgctgtacccgcaggtacttggcacacagaagttgctcaataaatattcgttgaatgaatgaatacattatgtgatgagtgtttctgtgtgaaaggagaaatgctgcgggaggtagaggaggggcacccaggaaggacttcctggaggaaataaacccgagctgagttgtgagtgctgaaaatgaactggagttatttagggtcatggactttggatccctggttgcaggagtggtgtgggcaaagcagaggccctttcaggactttgagtatggccggatcatagcgtgggaggtggagtggtaagagatggggcttcagaaatgagcagggatcagatcatgtgccatgcgatgggatttggacctgtttgggggaggaaggctatgtgagccattaacagaattttgatgttcttccatttatcagggcaagtcagttaaacccttgaggcctcagtttgcttatctgtaaagtaggggtggacagagctaattcagcagtttccagtctttctacttcggtagccgcataatggtaatgttgatctactctctacttcggtagccgcataatggtaatgttgatctacatgagactgttgcactggtcacccccagtgggtaggctttttccaaggcactacctgtaactgcttcttccacctccaaccctgccctttttttcccactcagagaacacattggcatataggtggagatgtttattctagtatattttaaaacataattcactgaatgtggtggctcatgcctgtaattccacctacttgggaggctgaggtgggaggatcacttgagtccaggagttcaaggatgcagtgagctatgattgtgccactgcacaccagcctgggtgacagagcaagaccctgtctctaaaaaaaatattgaaaattaaaaaaacaattcacttgcaacaataagactctactattaggcttgtgattattactgtcacccttcctcattactgcatgaagtcctgagggcaggggtggtatctgacttatgtccctaatgcacagcatattctaggtgctcaataaatattcatcaaatgaattatggaatatttgcaagagagcttacatcacatcttgacaccctagtgtggaggttgaaaagtgccagagtagctaaactttaaagttccttcctgctttaaactatgattatagtattcttagtacctcctacaaagttgactgcatgaaaactaacatatatatatatccctggtactaacaaagtgcaaacacatgacctttcttatgcctgcctttccccatctgttatgaggtgatattggatgagatcatcttgaactcccagcgctgttttaggagcaagaacttctactgggggctgtggtgcaagggtgtgagcaacagtatctcttgcagcccatgctgtgttgctgtgggtttggggagtactcaggtggctggctttggtgggagtggatgagtagcccaggtaagaaataaggtcatgaacaccaaccagagtgagagctgtgtctccttttatgggtgcatagtgaggagctatatatcaccgtccactttaacagggtaggactgagccagcatgtgaattcagaagtttgctcagctgcagggcacacaatctcgcttcctttttcactttttttttttttttttttgagacagggtgtcgttctgtcatccaggctggagtgcagtggtgctatcttggctcactgcactctcactacaacctctgcctcagaggttcaagcagttctcctgcctcagcctcctgagtagctgagattacaggcatgtgtcaccatccctggctaatttttgtatttttaatagagatggggtttcaccatgttggccagactggtcttgaactcctgacctcaagtgatctgcctgcctcggcctctcaaaatgctgggattacaggcgtgagccaccacccctggctcctttttcacttttccttattccacatatatttaacaacaacaacaacatgataataaatctttatatagctcttactctgttccaggtgctgttttaagtgctctacatatatacaattgtttgattctcccaacagctcagtaaagtaaatgccttattgtgtccgttctacatatgagaacatggaaatacacagaggttaacttacctgaggccacatagctagtaagggacagagctagcatttgaaatatgcattccatttgaaaccaggcttcaattctgtgctctctattggtaaacactgggctggaggtcgcagatgtagatgtgaacaggatacactccttgccctccaggagctcctggtgtaggaggaggaatacatgcaaacaaacagttacagtttggtctgggaggtgagtgattcaaggatgttccatacagagtaggaacaacaaggcaggcagtatggaccaggttttacatgcaggatgggatgatggcagctgagggagcatatgggggagtggagagcgatgaagaagccagatcacagagcatggtgaaggccatgccaagaagcttgcgcttctgactgaatttaatcacagattgcttgccatatatagacccggcctcccttgcccactctccttcagtcccaagtgaaccatgccagccctcagatgattcagtttgcagtcatacccgttctggccaggtctaatttaactgcgtccacaatgttaaatttgtttctgaaagggaaggatcacagatgttagctctgtaaacttgtagacaagactggagttactctcaaatagcaaaatcatgtttacagagtcaccactgatgttgcaacatgaaagaaaggcatggtttctggttcaccgcagatgctcaatgtttatggatttgtatggtcttcttcccgtcctgtgaagactccccatctcccatggatgcttctgtcattttgctaccctcatgaaaaaacaccttagaggaaagacaccatagagagtagacgccacttttgttgtgagctgccctctttggagatgtaggttgtgtttatgtgcacagtggtgccatggccaccagctaatgtgaatgagggccctgagagatttcatagcgggacctttgttgatgatagtttgaataagcccctgtcctgagatctattatagtataaagtctttgtttcagagactccaaatcatgcattgttccctgaaatttatccagcctttctttagaacaagtatacacttactatattgtcctacttacaacttgtataatattagttactgtttattaaataggggttatgtgcaaggcattgtactgttttatgctcgtgaaaaattgtattgagaggctgaggcacgagaattgcttgaacccgggaggcggaggttgcagtgagctgaaatcgcaccactgcacttcagctgggataacagagtgagactctgtctcaaaaaaaaaaaaattgtattgagtatttactatgcattatttatttaatccttgcaaaaaccctctaaaatagactgcactgtcatcttcaacttacagatgagggaactgaggcttagagaggggccggtacagggccagcccatggccacacagataaccagtggcagagccatccagggcctgggcttgtagccagttttcaatcatataccttcttctttgctaatcctttgcaaaaaccattctgcaaggagttattctattatcatcactatcatcattactattctcaagtaacagcagaagaaactgaggtgggcacagcaagtaagtgagaaagtcagggttcaaacagtagcctttttttgttccaaaacccacttttaagtgttttatgattctctacttcttaaccctcccattcctcatttgacccataattcaagtgaccttggagttggtcagaatcaggagagcaataatgcaaataggacttaaaataaaacacactgaaatatatcctgcctggcagagggagcatttggtgcctgcaccttccaaatcctgtcttgctgctgcccacaggggagatgcaattcctgtgccatttgactagctgggttgccttcctcctctgtggaatgtgagcctgctatttgaatctttctgtctcagattccttctggaagaaggtagagtataaaatgaaatattgggtagtctaatctttcctccctttctattttcaatgaccgccattgcaacttactgcccatttaaaaaaaaagcaccatatttaaaaacactatatgccctactccatcaaatgttctccttccacagatacattattttaatgtctaatctattggaatttttcctttgcaagttaaacttgtcataacataaaaatcacaattcactaccattgttatttgaacgatacaattcgggtaatagcttcatgaatccacaccaactccttaaacagtcctttaaaagacaataaattcaaggggctcacattcaagctctataactcctataaattaaaatcgtgtctgtgtgtttttaagcaggtgttgtaatggttaggctgttttctgtgttataaaacatacagtgtattgtgccacaattttggtagtgttttggattctggttttgtatcagcagaagtttaaggcaaaaatttaatcatgcattttattttttatttaaatctgttcttgaacgtattgtaaaagtaatcgaccactgtttaagtgccttctctcaaggggaagtgttgtattttgtagttggcatgggctttgaaatcagacagatgtgggttaaaatccttgcctctgattgcttgtgtgactaaactctgtactaaatacagaacctctctgagactcagtttcttcagctgtagcaatgggctagtgctatctatctcacagaatttttgtgagagtaaatgagggaatgtatgtaaattgacttaacccaatgcttggcacactgtaggtattcagtgttgattgttttctttctatcatgtaattacaggcttggttatttgatctattttttcttaaacagggggaaaatttaatataaaatgtagtccatatatgtatgttattggttagtcagagcaggtgtgaccagctaatttgacttatctaatagatattttgagatctactttgtgccaggctgtatttgggatcttggggatacagcagatgacacagccactcacagatggctgcagcgtaagggacagttgcattttgggtgaatgtcaacttgatgtagtctaggtttaagatgttaaaaaataatactgatttcatgtttttttctttttaaatcaattatacttctaaagtttcctaagtctaattgaatgttttaaagtctccattctggacctggtgcctatgtcatactttgttttttgtttgtttatttgaaatggagtctcgctctgttgcccaggttggagtgcagtggtgcgatctcagctcactgcaacctctgcctcctgggttcaagcgattctcctgcctcagcctcctgagtagctgggactacaggcgcctaccaccatgcccagctaatttttgtatttttggtagatatggggtttcaccatgttggctaggctggtctcgaactcctgacctcagatgatctgcccgcctcagcctcccaaagtggtgggattacaggtgtgagccaccgcgcctggcctgtctcatacgttggtatgttaattatgtacatcgccacgggaaactcgttttagccgtttaagtgacatcagtatcttgactttgggtttcacagggaaaacagatgttattctacatgaaagtacccaccagctgtgtggaaaagatacaaattttctgggtcacgcagtggctccgtgcccctggacaagttgctttacctcatctctaagactgagtataaaatactagctagttgttgtgaggatgaagccagaaaatcttaaaagcgcctggcactttaaagtaagaatacatgttggtttgactttccctctggtgaatctctatgacatcttaattaaattttgtaacagaaaaatggatgatgtgaacaggcagatcagcttgccatcctctaattaggtttgaacccctcctttccttgtggttgttcctctgaagccgagtcacgtccctgagattcctccacagaggttattgttttgctggagagaacgattaggtttctctattccaggaggacttgcatctctccttcctcctcgtatcaaattgtgccttgccagctgctgccgctgccatttgcatgcgtgtttgtttccctgggtgtttctgaaccattatctagtaatttttataaatgctttataagtacttgcaggcatttctggcggcttccttccctctcccatatgcttctctgtcatctgaataaaaccttcgcacccttaatgaagctggaagaataggcagtttatctcctgtgtagtcttccctgggtgcggttttgcttttcaaataagttcctcagtacatctgcctagaactctgatgaaggccagttttcctattttgttctttatactcatagggagattctatttctcattgtgtcagaactgtgggttattggaattttaaaaaacaacagtggaccattttttggacatcttagattatgtataaataacttcgttccaattccagaaataatatatgcttataaaaatttacactgttcccaagcatataaaataaaaactgaaacaaaccacctaccccatccccctccctttccatcctcccctctaattccacttctgagaggtgacaccagaatcccaatttgatatgtatctttacagacttctttcttttttttcgagatagagtcttgctctgtcagccaggctggagtgcagtgatgcaatcttggctcactgcaacctctgcctcccgggttcaagcaattctcctgcctcagcctcccaagtagctgggagtataggtgcatgccaccacacctggctaatttttgtatttttagtagagacggggtttcaccatgttagccaggctggtctcgaactactgaccttgtgatctgcattccttgtcctctcaaagtgctggaattacaggtgtgagccaccgtgcctggcccagatttttttcttattcttgtacatatcaggatggctaaattgtgctatggtaagaaccataaaatagcagtggcttaatacaaccaaagtttatttcttgcccatgctttgggttcaatgtgggctggtggggttggggagcaggggtctctcatcatcttggttattgagatcgtggtctcccattgtgacacctgctttcatgagtcactgagggagggaaagagcatgtggtggtgaatttgcactggtttttaaaacgtctacccagaagtgatgcatcacttcagctcagatttgattcgctgaagcaggttacatggtcatggctaacctcagagggatgggggatgcgcagtcccaccatgagggtgtaaagaggagaatcaggctatttggtaaactgtgctaattaccatcatgatatcatatgtagagatacaaatatatactgtatataaatataaatatacacatattttattttttctttctagagagggtcttgctctgtcgcccaggttggagtatagtggcgcaatctcggctcactgcagcctccacctcctgggctcaaaccatcctcccacctcagcaaccctcgccccccaggagctgggactacaggtgcacaccatgcccagctaattttttatatttttttgtagagacagcattgtgctatgttgcccaagctagtctcctgggctcaagtgattctcccgcctcagcctcccaaagtgctgagattacaggtgtgagccactgtacccagcagatatttcattttttaaaatgctgcagttataccacgtagatagtgtttggcaactgctgttttagcagtacctcatatacatctttctctgttaatatatatagattcatttcattttaacaacctaatagtccattttatataccataatttattgacggatgttgtttctatgtgttttctttgctattacaaagagtggggcaataaacatcactcttcagattcttttttttttttttttttttgagacagagtctcgctctgtcacctaggccggagtgcaatggcactatgttggctcactgcatcttccgcctcccaggttcaagcaattctcgtgcctcagcctccagagtagctgggattacaggtgtgtgccactatgtctagctgttttgtattttcagtagagacggggtttcaccatgttggctaagctggtcttgaactcctgacctcaagtgatctgcctcccttggcctcccaaagtgttgggattacaggcgtgagccactgcacctggccttttcagacattttaagtgtgtatttgtgcaaatacttctgtagaataaattcctaggattgttgggtgaaagggcatatgtactttatattttgattgttactatcaaattgccctcagcagggtttgagactgcctgtttttgcatatctgctccaatactgtatactattcatcttgtgtatctttgccagactgacaggtaaaaatgtgttcttttaatttacatttctctgattgtcaacaaggttaaactttttgcataagttaatttgtcatttgtcttgcttcatctgtgaaatgactgaatctattttttgttcattttatcttttggattgttttgtttatgttttttctcattggtttgtaaatattatggttactttttatctcatatgcattgtaaatatttccccctgttggttatttaaatgtctaccaaataatcatttgccttgcatgatccacattacaattaaaaaatttcttcttctcattcactaaaaacagtccttaattacttttgacttgttagctcaagaaggcagaagaaacacagaattctgccttcaggtgctgtgaaatacccagtgaattaagagattgtgtggagaggcttagagttttacatatccatggaactggatattttatatgaaactttcacatagatttatctaacatgactttggctttgtgcagtaagtatggtagatttcattatttctgttgtacagatgtccctgcatctatagatttgggtttgaatccccaccacatattagttctgtcacatggggcatcatggtacttagggggttattccatgttaatcatataggtaacatgtatggcaaagtcagtacgcaatcagtgtttgttctctttcaactcttccactcttcagaggtgttaagagacacacagcttagatctagaggctggctctcctggcttgtaggccaggtcttgttctagtggaccgtattgctcctctgaagagagcgtgagttcctggcccctttagaaataagaacatcacagttagtgtttacataagtccttcagtgcaggactgggctttgagcctggacgttggttttatttaaaaagcacatttctcacttatataaataatccttgtacattgcttaaaaatttggaaaaaatatttttaaaacatttatagtcctaccattgagatggaatgactgctttcacgttgaagcatttctttccagtatttcttctgggcatatatatttttttgttttacaaatctgatacaattttattgtatcattaacattaatgtccacattataatttaaacatttttccttgctatacaactttttgttaatgtcattttaattgctgcaaaatatttcattctgtgggttgtatttcattatttattttcctggtattaaatgtttagattgaaccctctattaaaaattattcaggaatgtgcttccttcctatatttcatgttcttttctttttctttttttttgtctttagagacaaggtttcactctgtcgcccaggctggagtgcagcagcatgaacatagctcactgcacccttgaactcctggcctcaagtgatcctcccaccccagcctccaaactagctaggactaaaggtgtgcgcccccatgccagctaatttttgtatatatatatttttttttgtagagatggggtttccatatgttgcccaggctggtcttgaactcttggcctcaacgatcctctggcttgagcctcccagattgctaggattacaggtgtgcgtcactgcacccagcatatttcatattactttcttaagctaactttccaaaaatgaaataattagaccacacggaatatacattttaaggcttttggaatatatggccaaattgctttccaaaatagttttagcaatttatgctcagctctgagggttcctataaatacttacttttgaagaatataatgacaaatactggagaagagagtgaaacaaatgaatcttctccaacctatgggccctgtcttcaccaaatacttaattctaatcataagtgcatagttcaaagtggggcattttgatatggctattttggtgtggccattatgcctaatttgaaacagccatatcacaatgtaaactcactctttttaatattcaaataatgtattcagtagacatgcttggctttctctttatccttgaccttctttttttatttttaaaataaaaagaggtggtgtctcactatgttgcccgggctagtcgtgaacgcctagcctcaagtgatccttccacctcggcctcccaaagtgctgggattctaggtgtgagccactgtgcctggctcatccttgaccttctcattagttctaactccttatgtcatccctgatcttctacccagaggtagggcttaagcatttcacatactttggcagttttattgccaaaagttttgataggtgatttctttttttttttttgagacagagtcttgctctgtcgcccaggctggagtgcagtggtgcgatctcagctcacagcaacctccacctcctgggttcacaccattctcctgcctcagcctcccgagtagctgggaccataggcgcccgccaccacgcccagctaattttttgtatttttagtagacggggtttcaccatgtcagccagaatggtctcgatctcttgacctcatgctccacccacctcagcctcccaaagtgttgggattacaggcatgagccactgcacccagccagttttgataggtgatttcttaggttttgtcaaaatatttctggagttaaaaaaaagggggagggggttacattaagagctgcattaaaatgtcatatgccatcattagctattagggaaatgaaaatcaaaaccacagtgaaataccacttcatacctattgggttatctataataaataagacagatagtacatgttggcagggttgtggagaaattggaaccctcatacactcttggtggggctgtaaaatggtgcagccattttgaaaaacaatttggcagttcctcaaatgttaaacatcctagcagttctctcctgatatatacccaagagaaacccaagagaaacgaaaacatatgtgcacataacaacttgtacactaatgttcatagtagcattattcacaatagccagaaagtggaaacaatccaaatgtccaccataaggtagtatgcaacctgatggaagctgtaacagtactctaaactttcttcgtaagaatgagctttgtttttttcagggaaattttgaatattttcctgaagaacaaagttcagactccttatgaaggctccatatgatgcttttcacaacccaagatgcattatgtcttggtgggtgtaagcatgagctttagacctacacagataggggtttgaaacaactcaatgtgtagcttttggcatattttgctctgaaactcagtttctttttctgtaaaatgggcataatacaaccatatttcatggagttatttattgccagcataaaaagctataatcatgtaaagtgccaagtacataatgaagactcagttgaatatttaaaaaaattaacacttggccctaaccttctctaggcttatttcccatattccttgaactttatgcactactgacaccacactgcatgtggtttgcttgagccttcatgctgtgctattcctcttgacctttgttcatgtttttcctcctctgaatgctccctccctttgtttggctacctttttacgtatccttcaagaattaagttttacctcatcttttccatatatcttccctgactcccacacacatgccccaggctaggctaagtccccttccttgggtcatttagagtattttatatgtatctcaatttgattagttttttcaaagaagcaacttttgactttattgatcatctccattgtatctttttttctatttcatggcttgctgctctttattacttcttctcttctactttttgaggtttattttgttgttctttttccaatattaagttggctgctttgctaataaaagcactcaagactacaaatttgcctctaactactgctttagctacacctatgagttttattatgcagtatttaaaaaatcaccttgtagttctatgtattttacattttcatgaagatttcttccttgacccatgggttatttagatttgtgtttcaagaacatttctaagcaaataaggttatttctacttatctttttgttattaatttctaacttaatttcattgtggttagaggatgttttttctttccttcctccttcctcccatcttttttttttttttttgcaggtttttgctttatggtctaatacatggtcagtttttgcaaatgttccgtgtatgcttgaaaacaacatgcattctctagttattgaaagcaatattttacatatgtatgttagattaacttatgaattgcattatataaattttgtagccctgatttttgtccaatattttacatatgtgtgttagattaacttgtgaattgtattatataaattttatagccctgatttttgtctgatctattaagagttatgttaaaaatttcttctgtgattgtgatttcatatcttttttaattgattttttttcttgttcattttctccctgcactagtctggaagttacatattctatttttattcttctattgattaccctagaaaatttaatatgtgtgtataatttcacaaagcctaaggttactgtctttattctctttttaacaatgcaaggatctttagtatgctttttcattttggccacatcacttccaacatatatgcgtttgttgtccaatattttagtcctatcttattcttttttgaacttcacaaattaggcgttattggtattttatatagtctgtgtccttttgagttacccacatttgccattttctttgtttgctattctattttacaactcagacctaccttctggggtcatttcctttctcttggaagtatgttttaataaactcagtttttatttgtccaaaattaccttcattttctcctcgttcttgaaaaatagtgttgctgtacatactgttctaagttgatagctatagggtctcagcgctttgaagatatgccactgttttttcatttccattttgctgttgagaagtcagttgtcagtctaattttttcttctgctagtaaaatgtctttcattctggctgtttttaaaatccctttgtcttagatgtcttcgctgtcagtaagacatttctaggtgaggatttcttctgatttattcttcttgggatttgttgggattcttgtctctgaggtttggtgtcttatcaattatggaaatactgtctctcatccactctcttctgtctttttggaattctgatttaggtgttaggccttttttttttttttgatggtgatcttatgttccttggaactttacttgctgatcattctttgaggcttaggtttcaagttagaatcttccttttatacagatgcctcagggggctctactacccagaacacttaaaactacattttttggtgttagacttttcttttggttataggtgtaggatgaattctgactccatacttggataggaaggtatcatggttagacattctgagcagagacttattccttttatttcccctttcctgaggcaaggccaaaacacagaaggtttgcttccagtttcacccactgaggatgtggcatttcagagggcctggcttggtatgggaatttccagtctgattcttgccttgccagcagacactcgggggccggaccacatgcagaggccagaccactgccaacatgtacagggagcaagataactacacttttaaaaagatcgctctggttgccttatggaggatggcttacagacggcttgaagagtggaggcagagaggcaagttaggatgctattataaacctcaggagagaggtgttggccctgggacagacagaatggtggtggatggggaagattattgattaagatgatctgtctcttcccatagactgtaagatacccagcctcagggtgagtatcatcacaaagatgttgtttttcatctctgagtccttccagtgcctggcacagagaaggcattcacagatgctgattgaattgaactgtggaatcaataatggttctagagctgatttttttttctaccttctaaatgactgttttccttaaagggaaatgacatgaagggattccaggcagtgaactcatgcctgtctctggcattgcgaagcccagtccagaaatagagagccagctgtttgtaagcccaaaagccttaggttttggaagggtttactttccatgataacatagctttctttagcctgtgcacttgttccttacttaaggagtctcagactctgcttgagattacttacacaaaaccttaccatcttactggatttttatggcattttcttagaaattactaaactttatgactctctaggcaggttgcaaagatgttcctctaatgatatattacagctatgaaaacttcttcctcctaaggcgttctttttggaaaaatgctctgtgtttagagaacgaagggagaggcaagtggttcctgctgtgtgacagtttaataagctttagctggtcactaagaactgttattctaagaatgtatgcaacacttttccattaactgtgcagaagtatttctagaaggtatggtaaaataaagcatatatattgaggcctggaagttctttattattcattcaacaaatatgtgttgaatgtctgctgtggcccaaggcctgtgcaaggcacgggtgatcactatcagacaccatccctgtgatccctactcgcccatcatgttttgtgtgaattagaaaaaggcacccattcctcaaggaaagaatattaaattcatcaatatagtacttacatatcaatagcaaatttgttacaataatggattattaatgataaatgaatgttggttattaatatttatatagtattgttgatttgaacttgaaattcaaaaatattctgccacagtaagcaaacagcagattattgaattacaatatgaatgtgaatctgataccaatgagggatttttaaaaaaatttaaagggactcatcaatcatctatcaaatgtcaaagcagatccctatttagaaatacagactattttagatatgattacatcaacaaggtcttttttttttttttaagagaccagggtgtcttgctgtcttgcccaggctggagggcagtggcacaatatcaaattcctgggctcaaaccatcctcctacctcagccttccgagtagctgggactaggctcatgccaacccactcagctattttttttttttttttgtagagacgaaagtcttattgtattgcccaggttgctcaaactcctggtctcaagcaatcctcctgcctcagcctcccaaagtgctgggattgtaggtgtgagccacaatgcccagcacatggtctcttgattattgaatttgtcaaaggggaacaatacatactggcttattaaaataagacatgactgccattgccagaaaattcttgttgtaaataaaaaaaccacccaaatataaaatcatctgatgttagtttacaaaaccaaaatatttctcaattcccagtttaaatcaacaagtaccttcatgatgacaatatgttatacaataacttacatttgttatcatgaataatccatttgttatacagcttataattgtaaaaatattccatatgttaaagtgttaaagatgtttacctgtgaacagcatcatggtactcttttttttttttttttaattgagatgaagccttgctctgtcgcccaggctggagtgcagtggcacgatctcggctcactgcaacctccgcctcccaggttcaagcaattctcctgcctcagcttcccaacttgctggtattatatgtgcgcaccaccacacctggctaattttttgtatatttggtaaagatggggtctcaccatgctggccaagctggtctcaaactcctgacctcaaatgatccacctgcctcagcctcccaaagtgctgggattacaggtgtaagccactgcgcccggccagcatcatggcactcttgtacatgacttaaaaagccacacatggtggccttggatgctctgtgctgggggaagcagacgtagctgatgagtccactgtgggctgctaagagccctattggaagtatgtacaaatatggtgggtgacagaggaaggcaagatgaggtcagcctggaggtagagaaaggcttgtgtgaatgagaggcttctgggcaagtaagggccatggcctttttaacatattttggctgtaagtagcctttaagccttctttcctggttctggctactttctggatacatgagatagctgtgttccagattggtgaggtgtttctatctttagatagactatctgatcttctttctgcctgcctacaacttcccctgtcttcaggtctcagcttaaatctcactttctttaagaagccttcccagctccttccttccccaccttgggttgatgctcctgctttgtgctccttcagaccccatcatagcatgaatcaactttattgtgatgattgcttgtttgattttctttctttcccacaagattttattttattttatttcattttctgagatggagtctcactttgttgcccaggctggagtgcagtggtgcaatcttggctcactgcaaccactggctcccaggttcaagtgattcttgtgcctcagcctcccgagtaactgggattacaggtgcatgccaccatgcctggctaattttttgtattttagtagagatggggtttcactatgttgcccagggtggtctcaaattcctgatctcaagtgatccgcctatctcagcttcccaaagtgctgggattataggtgtgagccaccacccctggcctcccaccagattttaaattcaataagtgcaagggccacatctgtcttgttcattattgttattattggatcctcatactgcacaatgcctgatagacgatataatcagattttgataaatattggctgaagtaattttctcattcattcctcaaacattttctaagcccttactttgtgccatggaccctgccaagcacgggcaaacaaagaaatgacaccctgtgtgtcccttccccggagagctccctctctgcttattactatccggtgtaggaagcgcgatgttacagggaaggaggaggggagggacggctggcttaggttaagggtcagaggggttctcctctaggatgcacctctgagctggatctggaggatgaggggtgagcaaggtagcagggggcaggggctcagcatggattgtggcatggtggcaagcgagaacactgggtgtttaggagactgcaaacttttatttttttgagacagagtcttgctctgttgtccaggctggagtgcagtggcacgatctcagctcactgaaacctccacttcccgggttcaagcaattcgcctgcctcagcctcccgagtagctgggattacaggtgtgtgccatcacaccctgctaatttttgtatttttagtagagacgaggtttcaccatgttgaccaggctggtctcgaactcctgagctcaagtgatccacccacctcagcctcccaaagtgctaggattacaggtgtgagccaccgcacctggctgactgctaacattttactccggctggatcacaggatgtgggaggagagtgaagggaatggatcagagaggtatgcaggagccaagtcatacagaactgagctgcaagcagagagctctagggagccattggaaggtatctattttaaacttttagagactgggttttgctatattgcccaggctggcctcgaactcttgagctcaagtgatccttctgcttcagctttctgagtagctgggattataggtgcataccatcatgcaggcctacactggaaggttttaaacaggggtgtatgtgtgtgtgtgtctgtgtgtgaaaaatctgatttgtatattagaaagacccatctggctatggtgtggagtgtatttaggggttgcagtggtgagctggaagtggggacaccctccttgagggcagagagcattgcttcctcctcagtctctaacatctggcgagcagctggtgtccagtaagcactgaagtgatgctttgtgatggagtcaatctgcagagacagcaaggtaggattcaagagtcctttattgcagaatggcagcagaatcaccgctgtcactttactgagtctcccgcaaccctctgagtgagtaggggaatagcattagttccacttttcaggccaggtacctgatcaggcctgaccagaggacatgtccctggtcacacaatctttgtgggtggcaggtcaagcaccttctccttcatcccgtgctgcacctaggggctgggctggggggcggcagcagtgctggggagagcgaggcttgctggtgtctctcctctctagggaccaccctcctcctttctgctgagggagtggcccaaagaggcatctccaggtttccagccacagagggccatctcacttgtcccctctaggcagtggtgccccctttcttgcatctccttccaggcagagagagacagcgacccagggggcagctgaaagctttcttcaccaaagcagcggggagagatttgtgtgcggctcgcattctcattgcctgggtatcatgctgctatttaataaaggcctcattgcttgaagggccattaagtaaccaatgacatatttcagcctcaccgaggaggaaaacacagagttaaatcaaattcagaccgtgtggaagtaaaatcctaaagagactattcacatgcacgccctctcctaaggggaagggaacaagccatggggtccactctaagccaggcactggatagatgcttttgcattagttttcttgcttaaaaagttccagcaacactgacaagcagagactgtgctgtcagttttgtaggtgaggaaatggagtgcccgagacactggccagttagaggtagaactatcctctcagcccttggtctctgatcacacggtgcctgctccttccatgataccatgctgccctcctatggagcctgtcctctccataagacaagcagtgattgcttttcgtgccaaggctgaatggcagggaggtcagcagcctgtgcccgtgtacaccatacaccgcccgaaggtaggaacccctctgtctgcctccacaccctggcacgatgctgcacacacagccggatgaaggctggtaggttcttcctgccctgaggaggggagcgctggcctttgctaccctttcatcacattccttttgtctgtccttccgtctccttcattcctctgtcccctcagagacactcgtccagccctactggaagatcattttgagtccatcccaagacctttgctgggtagtaatgagcaggtagatgaatcaggttgtgattcttcctcggggtgtcacatttaaaaggagactctggatgacaactttgtctgcaggggccgaggggacaaggtacctcaggtgggatgagggctgtggagttgatgttctcacactcagtttttgctcatgtcctggaaaagcacctcaagccctccctagccagcctcacccctgccaggcttgccactgcccccaccccctgttgtgctgtggcctaacagcccgaggtagttgtgccaccaacctttgctcacacagagctcttggcctggaataacttttgttaccctgactccctgctggctgaattggagcccctttcaatatccagctcagttatgagctccatcttgaagcctcacctgccctgcagaaggagccacttcttcctgtcttgtcagagcccttggtgtgtccctccctctatatgttgctcttcatgggggataatgatttgcttaagagccgtgtctctcactaaaccctaagaagtttgaggacagagatagtgttctggtgtgcgtgtgtgtgtgcgcgtgtgtgtgtgtgtgtgtgtgtgattctctatgcctggcctagagtaggtgctctggaagggattgtgacccaggagaatgtgagaatgtataaggtggggccagcggtgccatgatgagcaggagcaagtccagtcctattattctcctctctctgtcctctggcctccttctaggaaaggctgtttttgtgtggggtcacactgctgggtcttctctggggctgtccagcaggggtcttcacctaccctcacctgggagagtgaccagactccactccctcggagtcccatcccttctggcccttcttttgttgttgctgttgtttttttgagacggagtctcactctgtcgcccaggctggagtgcaatggcgcgatcccactcactgcaagctccacctcctgggttcaagcgattctcccgcctcagcttcctgagtaggtgggactacagggatgctccaccacacccagataatttttgtatttttagtaggacgaggttttgccatgttggccaggctggtctcaaactcctgacctcaggtgatctgcctgcctcagcctcccaaagtgttaggattacaggcgtgagccaccatgcccagccccttccagcctttcttgtcttctgtcctgaacccctggctgactagcagtgaacaaatgaaaactggccacgcacgctttgctttgaaatgtctctgacctagcctgaggaggtagggcttaagtactcggggagtctcccactgcacaggtagggaccatgctattcatctctgtattcccagccccttagaacagtgcctgactcacaggagttgctcaatgttgatttgttgaacacaaaggggttttgcatttcttggtctcttgttttctttgttcactgtgtgtattcacttgagtaggataaacggttgtaacgagtaggcccaaatgtgtaagttctcaacatctggaagtctatttcttactcttgtgatatgcgccactttcaccttggcagggtcgtcattcaggggcgcaagatccgtccatctgtggctctgtcattctctggggtctctgcatcacccacacccaggcagcaaaaggggacagagcatgaaggagcacatacaggaggtttttataagtgagcccaggaagtggtgcatgtcacttctgtcccatcccactggctggaactcaggcacctggtcacacccaagtgccagggagactggggaatgtagcccagtgttttgtccaggaataagaggaaatggatttcggtgaacaccccccagtatctgccacaatgcagtgtagaaaaagcgcaggatttggagtcggccaaaatcaccttcaaacccaggctctgcttcttactagctgagtgcatttgggtgagtgatttaacttctttgagccttagtttcctcagctgagtgatggggtataataacccccaccttagaggagggttgagagataatgttggaacagtcccaatggtacataataagtatccaacaatataactattactattaatactatgtggacttttatctttattattactgtatatcccagttttattgattagcaatttaataacatgcacgtgataatgaatttacatagtagaccagtacatcccacctatagttcccttcctcagaggcaaaccacctggagcagttttcttggtctgtttccagaggtatacatatctaggtatatattgtataaatagccctttttatgtacctaatgttttaatataatccactcgattctgttccttttatataatttagtaatataacttagctattgttttgtatcgttatatattgatttactgcatcctttttcatggctacatcacattccataatacaaatgtaccatcatttacttaattaatgccctattgacacacccttggctacctacagggtgttaccactgtatgtaaagctgcaatgaccatatccttgtatatatgtctttgtgtacttgtgtaagaatatcgtaggataaaaatctaggaatgacatcatgcatttaattctcttcaaaactaaggtataaaatttggaatgttttcactctggtaactattgtggagtgaaagaattaggacttgagatttggcttgtcataagaagtgggaaattaagtacattgtttacatttaaaaccttttgctcaggctgggcatggtggctcacacctgcaatcccggcactttgggaggcagaggtgggtggatcacgtgaggtcaggagttcaagaccagcctgaccaacatggtgaaaccctgtctctactaaaaatacaaaaattagctgggcgtggcagtgggcgcctgtagtcccagctacccgggagactgaggcagaagatcctggctgcagtgagctgagatcgcgccattgcactccagcctgggtgacagaacgagactctgtctcaaataaattaataaataaaaaatcttttgctcacatagagttttgtatcctcttctcatggtgccttggatttagattctgcagcagtaatattggcagatttataaaccaatgcaaacctactcttagtttatcttcccacatgaataagttgtctaccagctttccgaagcccatacctgtcaaagaagtcagattcaccgtaatagaaacaaagtgcctcttttgtttttgttttgagtggtagagaagcaaacacatttgaggacttttctgtgttagggagtttttataggttattttattaattcttacaaatcctttgaggtgcaattattattcctgttttccaaacaaagaaggggatgggttcacaaaggttgagtgacttgcccaaggtatgcagaactaggatttgaactcaagtcttgatgtcattatgatatgggctggctttgtgtccctacccaaatctcatcttgaattgtaatccccataatccctatgtgtcaagggagagaccaggtgaaggtaattgaatcatgggggaagtttctcccatgctgttctcatgatagtgagtgagttctcatgagatctgatggttttataagggtctcttccccttttgcttggtacttctccttcctgctgccttgtgaagaaggtgccttgcttccccttctgtcatgattttaagtttcctgaggcctccctagccatgctgaactgtgagtcaaaccttcttcctttgtaaattacccagtctggggcagttcttgataacagtatgaaaacggaccatactactctggacttaattaggggattcagcagaacattcctggatatcaaataagttttaccgattgtgtagacatttgctgatttgcagtgcttctgagagattctgtggcctctctaagcttagtggagaaagggagtcatgtctgttatggccccaaacttggtttttagcatgcttagtcctaaagtcatggatccagcaattctcaggtgaccagtcctgtcttcacagtcagctctgctggtttccatctttccgtggtctccaccccttagttctaaggcaagattgctgtctgtgtgaccctggactctggctcagtgatttttttttgtccttccctgttgtctcccactccaccccctgcacctttgattaaacttctcttcttgtgtcttctctctcttagtaaagggaaatcatttaaagcactttttaaattggatgacattattatcactaagatgacctataaaccctacaagcctaccaccaccaccaccaccacacaccactaacaacaacaacaacaacaacaacactctgctccccagtccaccagcctttgagctggtgtcacttcagtctgtagtctgctatcatttttggaacatgcattcagttcttacagcttccaggaaatctattacctaagaacaaaattagcacattaacactccccctccttctactccacccccatttaagaacgtcctacccagagaaccaaactgtaattcaatccactgtacactgggaagggcctgtttttctgcaatatagcttagaatcagtactttgtgcctgtgagtgtctctttttaagatttaatatgtctttattaactgctgattacatattagtacagtccctctcttgctgggctataaattcactcttgttttattattcattgacaaacatttgttaatgacctgatagtgtcaggccaccccctccattatctcacctattcctcagaataagtctacgatggaggtaatcattagccccatgtgcagtttgggaaaatgcagctcagagaggttcattaatttatctatgtttgtctagtaagtggtaggtctgggatttgaacccgggttgtttggattctaaatccataacctctcccagctgaaagccaaggcttgtagtttcttattatcttgctgcttccgtgagtctactcaagtccttaattagtgatgactggaaattagtagtgtgttactgagcctcctggtgtgggaatcagttttgttttgacagaagtcacataacctatgctaagaagacattacttaatccagaatgagagactgtaaaaacccataggaaacccggaagaaaggaggggcagcatttttatttgactggctggctgattgacctccagaggtttttattttttacccattccttttcttcttgcgaggctaaattacttcgaggaactctacccagttcttaaaattggccaggagattgcagttaagtaaacgattgttttgggttttaggtttcctggagccataacttagcatctcccaaacttgtctgatcctaagaatcacctggggcatttgttaaaatgtgatttcccagtagggatgggacctagggactatttattttttttaacaagcccctttacgtgattcttctgatcaactagtttgggagacactgagtgtcaccactgggaatttggtcccctttgtggaccatcctctttagaattgaagcaccaaggctcacattatcttacagtggagggaacatgaattttggagtcagaaagcacaggtctgagaaccccaagctgccccttataaattgggttaatcttggacacataactgagtgttctaatcttaagacctctgtgtgccatttcctctgcctagaaagaaaaaattgttctcctttctctccccacctcttccctcctcctttgtcttcttactcttcagctttcaggaaagcattccttgattcctcccaagctgggtcactcgtaattatttttgtaatgagttcttgtgtctatcatcccccactagattctaagctcaacaaaagcagaaaccatggctctattgtttattattgcacacccaacacctagcacagtgtagtgtgaatgactcagagtctaatttgtttcatctgtaaaatggataaatgctattgatcaacaggcatatagggagattaaaatactgagcatgagagcaaccaatatacagtagacatctaataaatgttagtttttgccttcttttgaggaactcatttatgattattgtgctgaatagaatggattataatcaaggctttgagggtctttgcttgacccgctatcctaaaaagtttccagtattcttaacattttagaatttagccttcttttcctcccctccccctaagtcaaaagaaagtttttcactgtcttttaactttgttctggtgacccattttgaggtctttaataattttacttgatttcctgtggatagcatatctttaagatttctttattcagtttggtgctgagaaggaaaatgatataattgtagattaaacttaatattttaaaaagattatggatggcagaatggatttcaaagatagctttatggaatctcttttcctggaattctttagaagagaataagaacattgatgtgtgaagagtctctctaatccattatgaaatccaggctgatattaagtgaactaaattcagaattttattgtttcctaacacttaggaatacctttcagatatatgactgcctttgaaatttaaagggtatgagaaagacttgctgttaataggctcttccttccatacattggcaaaaggaggccgccccattgctagggtgaccagctgtcctggtttgcccaggactgagggggttcctaagacactggacttcagttttaaaacctggacagtcctgggcaaactgggatgaattggttggccatcatattcttggagaaagaattggagcaacagtgaattaagcattagcatgcttttctgttgttttaagaacaaaacaggaaccataagaagttaaaattgcctttaagaaattctgtgaaagtttttgaaaataaattttgctttaaagccactaaacgaaatacaggtgatcttaaataaatgtaatggtttttgcaccatttttgaactctattagtgatttcaaaataaatagtattgtattttaaaacgcaatcttattttttctgtacctgaatggctacagctagtgacctgttttctagcattaatataattttcactgatatgttttgaatagttcatgtttgaagtattttcttccagttaaaaatcaacaatagatctgatgttatcatatatggatcttcaaataggttgattttgaagtaagggtcttaactcacctaagttttatattatttaaatctcacaaggtaaaatgtaaaattattttaatatgtatttatgcctattttgttccccaaaagtatgtaaaatggctttcaaaaagacacacattgttataagtttttggtttcttgacattcaggtaaaaaaaattcgggcaaaggagcaattaagatgatataataagataaactcaggccaggtgcggtggcccaagcttgtaatcccagcaatttgggaggtcaaggtgggaggatctcttgagcccaggagttcaaagccagcctgggcaagatagcaggatcctgtctctacaaacaataaacaaaattagccaggcgtggtggcatgcacctgtagtcccagctattggggaggctgaggtgggaggattgcttgagcctgggaggtcaaggctacggcgaacagtaattgtgccactgcactccagcatggctaatagagtgagactccatctcttaaaaaaatctggggaaagttaatatctagaaatgcataatatatcatgcctgtaatcccagcactttgggaggccgaggaaggtggatcacctgtggtcaggagtttgagaccagcctggccaagatggtgaaaccccatctctactaaaaatacaaaaattagccaggcatggtggtgggtgcctgtaaacccagctacttgggaggctgaggcaggagaattgcttgaacccgggaaatggaggttgcagtgagccaggatcatgccactgcactccagcctgggcgacagagcaagactccatctcaaaaaaaaaaaaaaaaaaaaaaaaaaagcataatataaagatcttgcacagttcttataatgggatacagatttggtttggagctctctggttaccaaggaaaaacagaaatgtaccaagtcgtaggtcatatctatcagatcaaatagaagatgttgaagagaagcttggcttttcctagcactgaggctgggagaaactcccccagagggcttcttaaaagagcccctgtgtgatgtggtgaatagcatcctccaacagcctcctctgatcagtgcagtgtcacagttttgtaagagatcgagcccctcagtgcactctgaggtataataacaaagtgcccatgagattggctactatatttaatatagcaggatgtgcccagggtgtgccccaatggggctgtgcctcaggctcccctggtgagtattttaacatccagattcctagttccctgacaggattacctgacagagaaccacctatttagaattttcaaaagaaattcaaagaggaaacccaaatgtctaatagacacttgaaaaagataattcggctgggtgcagtggctcacacctgtaatcccagcactttgggaggccgaggtgggcagatcacgaggtcaggagttcaagaccagcctggccaatgtggtgaaaccccatctctactaaaaatacaaaaattagcagggcgtggtggtgggtgtctatagtcccagctactcaggaggctgagacaagagaatcgctttaacccaggaggcagaggttgcagtgagccaagattgcaccactgcactccagcctgggcgacggagtgagactccatctcaaaaaaagaaaacaaaaaaagaaaaaaaaacatttagtcttactagtctaatcatgaaatgcaagttaaaataacaatgagctaccatttcacatccatcaaattggcaaaaatatttagcaatatttagtggtgttaaaaatgtatctactcttcaaccccaaaaattccacttctagagaaattcttgtccatgtgctcaatgagatacaataaggatgcttattacagtgttctgtgtaatggaaaaactggaaagcactgaaattccatcactagtgggatgcatacatcaatttatgtataggggttgaattgtgcccccccaaaaaaagatatgtccaagccctaaccagtatctgtgaatatgaccttatttggaaatagtctttgcagatgtaattaaagatcttgggatgagacgatcctggttttagggtgggtcctaaatccaatgacaagtgtctttataagagacagaaaaggagaagacagacatatggagaggggggccatgtgaagacggtggcagggattggagtgatgtgtgaacaaggcaagtgatgccaagggctgctggcatccaccagaagccaggaagaggcatggaatggattctcccttggagtcttcagaggaaatcaaccctgctgacatcttgatcctggatgtcgggtctccagagctgtgagagaataaatttctgttttaagccaccaagttcatggtaatttgttatggcagccttaggaaactaatacactgatcttctcccataccccaggaatacctggaagagggcatagttatacagttcttcttcaacaagaaaatggaccgttggagctaataatctcccacagcatagttgaaacagtcttgtcctgatttgaggctgaaagagcccttggagaccatgtagtccaacttctccccccattttacagatgaggatacccagaaagaggaagtggtttgcacaagacctggaactaatgggtttgaatccaagcggcaaaacttggattcaaaccaagatctgattcctgtgttcttcccacttcagtcaaggcactggcactagcttgtgtctggtccttttggatctatatggcagcacgggctagaggaaggagctcagatgttggaactggaaggcttaagttaacgtcttggctttcccatgctctaccagcatggcagggagcaggctatgtaacttctctaacccttatattcctcttctgagcagtgaagctaaccttttctcctagagcactgggatttctggatggtaaggctcatataagagactacatgtgaaaaggtatttattaaattgtgaatcactatacaaatagttagctatcatcattgtcatctagtctagcctcaggaaagtgaaaactcagcaagtgtggtgggaagaattctaagatgaccttgaatgatactctgccttgtataatcctcttccctttgagtgtgggtggaccctgtgtctatgataagacatcgcccctgtgaccatattacattgtagggtaaaagggagatatccctggggatctaatcaggccagccctttcaaggaagagttttctctggctggttgcagaagaggaagtctgagagatgcattccagccagtcaggaagaaagcagatacccatgttatcaattacctatgggggtcactatgacaagcagctgtggggagtctctagttgctgagtgtggtccctggctgacagctagaaggaaaataaggatctcagtcccgcagctgcaaggagatgaattctaccaacaaccagtgagcacagatgatgaccctgagcccagatgagtgccataaacccggcaacaccttaatttgagcctcgtgataaccggagcagggaacagagaaaccagttacaccatggtggattcctgacctaaaggactgtgaactaataaataggtgttgtcttcaggcaccacatttgtattaatttttttgtgcagcaatagaaagctaatacaggttacacattttttttctgaatcacagagcattaagtgcacatgtgtacatgtctgtgtatccctccaagaaacttcaagcttctctagggctagagctgcatctcattcatctctagagtcattttggctgggtttgttcctggctctgccacttatgaggttgaaaactgaggcacgttacttgacgtccctgtgcctcagtttcctcatctgttaaatgggtatgataatagcgcttacctgtagggttgttaggagttttaagtaacttcatacattgaaagtgcttagagccatgcctggcacatagtaaatgctcagcaaacatggcaatagtgattttattttatatcccagcacttagctcagtagctagcacgtgataggcattcgattaatgtttgtcaagtggatgaattaattaattaggactagaatctcagtttcctgagtcttaatcccacaatgtttcttttaatcattatttgcaacaggatacaggcttttccaaagctaagttgactggcttggtttcttcaaggtgcaccgagaaagcatcagatttatcacagcatggaaatgcagaggtgtgtaagccagtcccagagtgcttaaggacctgcaggctgtggatgctgactgaaagccgtacgtggcctagctctgccttaatagaccacgccagctgatcagggtgacacacacttaatgcaattgcctcattatctggtcatcagggaaatgccagctgtcattgccaactgagctgggccatcaatcagtttgttctgaattcattaagtaaattaaaaggtattgcttaaatacttagtagaggaataacagctctcatctcaaggagctagtgaaagcactggatttggccacagctattagctgtgttgagctgtgaaaaatgagaagatttggaacttatagctcaacatcagaaacaaaaggaggctccaaaatttgataaagatggccatacgcgctagtcccctctcccatcatatttgagcagttattgctgatgataccttttgaaattctaaacagcagagtggactctccctcttgcatccgggagctggcccatccctcttgaaattagaccccactgtagtcatatatttcctttcccctgtggtgaggtggacatgaacgttattgttaaatccttgcctggagaaatgaaggaccaaatctgaacatgacagctgtaggcttgagcagtttcacattaaaattggtcttgaggcttatggattctgtctccactgagttccctgtctgttgcaaagccccgtgggcaggctttcctccctccacatggagctacatgccattaattcctctagcatctgtttcacgcctactccctcccaggcactgggctaggcaccagcagtatggaaatcatgaaggtgttcctgcctcgaggaaacctatgatcatgctcctcatggtcccgtgcccacaccactttcctggcttctagacttggcaaattctacctcacctttgacatttcttccaaaccacacctttccttccagcagaataactcatgctctgcttcatgctcctgtagccctttggccctcacctgctagaacgtgggtgaatttgcattatcatttgtttacaagtccatcctgaagacagggactgagccttattcttttctgaacccctcagtgcctgacactgagttgatgcataataaagtgggcttgaatgagagactaagttcataaaagggcataactatttttatgtaaggtctgtaggagggtggaggtggggatggagccagagaataaatgtgctttttaaatacctcttttaccaccagagggagaggtgtgtttataaatatccctttatgtaagccttttggttctgtggtctcaaggccaaagagaagctcagggcctttccaagtgacttctcaaaattttaagatgtttttacttcaattaaaagtggatatgattggcggggtagtggctcacacctgtaatcccagcgatttgggaggttgaggcaggcggatcacttgaggccaggagttcgagaccaccccggccaacatggcgaaaccccgtctctaccaaaaataacgaaaattagccaggtgtagtggtgggtgcctgtaatcccagttactgactccgaaggctgaggcaggagaattgcttgaacccgggagccggaggttgcagtgagctgaattgttccagtgcactccagcatgggtgacagagtgagattcagtaaaaaaaaaaaaaaaaaaaggatttgagcttgaatcatgtcaccttacagcagatcactttctattttctatttttccctggaacactttgtcatttcttgttctttcttactggaggtttaggagtggtagtgggaatttattcaccgatttaaatctacaggcagtaaaatgccatcctccctgaacacctttaaaacaataatggggtttaatgcaatatttgttcttggcgcccactgtctagggcagctgaaaggagtctccttcccttcccacctctggctttgctgtttctcagcaatcactccaagaacacatccacccattcagcacttctttcctctatgattcctctgtgaagcagacacatgcccttcttgccttggcttctctctactcccattcctgaatttccagttcctgtgggatacctctgaatgatgtcctgttatcccctctagctcagttcttctaaaagttaattttttctcccgtttatactcccattcccaacactattgcattagcggttctgttggtcactgatatcaggaggtgaggcttgacatagacatggacacccaggtggaagatgcagtgctttgagtgggaatgctgtggcagtctgttcagcactctggagagctcctaggtggggccaggtccctcccctgactcttctcccaagaatgggcctaggaactcagtacacaccccatcatcaccgcagttctatgacagttaaaggaatctcatccatttctcctaggctcagttccatggggcctaaggatttaatgaggctgggttctagtccttgttctgccacttactagatgcagtaccagagggttaaataaaccagttatttaattgctctgagtttaggtttttcacttaggtaaagtgaaaataatatatctacctatttcatagtgttgttgtgagagtgaattgagatagcacgtgtaatatacacagcacataaatagtagccattttcattattattacagaaattattggtacaatattaatttttgttaatatgtgattgtatgactcgagtctcttgtggcagtggcacatctctgggaatttcaggctgggttttgggatcaggaggagcaaatgaatttggagggggcaaagccgagtcacctttagttagtcctctaggagacctcttctctctcccttgggtacgttattttggcagcagtgcatacatcaggctcaggacaagtcattgtcgattgctggaaaagaagagcagccccttgcagatttgcagaatgggggatatcctgcatatggcaaatggggaaataggcttgaagaggtctgtgaatgcccgaggcagctccgcaagttagtggccacacacaggaccagcaacttgggctcctggcttctcgctgctcagtctttgcccatgcagtttgcttcctcctgagggaacaccctccctcccagtcttttggtaacttccctttttttcgtcaagagtcagttcaaatggcttcaacctttccgagccttggttgctccttctgtgaaatgaggatatgatggctatttacaaggtggtgtggagctttgactggaaatttgacagcataggtaaaaagcttggcttagatggtgactgcaggccttatttatctgacttgtccactggttcattcatcctcctatgttcccttgtgatggttaatactgagtgtcaacttgattggactgaaggatgcaaagtattgattctgggtgtgtctgtgagtgtgttgccaaaggagattaacatttgagtcagtgggctgggaagggcagacccacccttaatctgagcgggcaccatctaatcagctgccagggcatctagaatataaagcaggcagaaagatgtgaaaatcctggaatggcttagcttcccagcccacatctttctcccatgctggatgcttcctgcctttgaacatcggattccaagttcttcagctttgggattcggtctggcttccttgctcctcagcttgcagatagactattgtgggaccttgtgatcatgtgagttaatacttaataaactcccctttatctatctatctatctatctatctatctatctatctatctatctatcctattagtcctgtctttctagagaacccagactgacacatccccccttcagctttgcctgtcaccactaaccctctgctcctgtgtgtggaatttctgagcattccccaagcatactgcctggctcagaggcatgacttgcttatgtgttgaataaatgaatttatggaccggcaacaccatggtgcctttagaccaacgctctggtgggactttttattggggaaagtactgaattggactgggttcctggataactggggaaaagctgccctaagagaagtcaggtgtgactttggataaagttgtctgatatcctgggtgggaggtaagtgttgctgaaatggaaacctgatttgcattgtttccatttcagttaataaaccatttaaagtttcgatatggaagagtctaggtaatttgaggcctagtggtgaattgatataatttaccaactgtgaggaagtagagaactgggagattactgttgataatttgcagggtataatggagttcatttataatttataattgatattggaactcttttccatgggctgaattatgttggaatggagtaagagtcatttaaagagattattttgttgtttgtatcaccctcatgaattggaaagtggaaaaagaacatagtgctaaattcgtatctaatcttttcagagctatttgctaaataaactggaattttaattaaaactgcaagccaagaggtaaatcgctttagaagtttgtgaagtttttctttttctgttgcctaataatataattactactaataaagattctttatgggtgggaaattagatagcagaataaataactggaggagattgctatggtacgctgaaattatgaaaggggcaaggttatcttcccctcctactaatgggtttttttcctccccattgttaaattgtttggtaacaattttgatctcattaaaagtattgcaatcacaagcggaagcaaggcggacgatgggcctcaccaccgctcttccagcttccattcatatgagtcaattataatgaatggatttaataaaaaatacaacatgctttggtgattaactcagtgaaggatgaatggcacgcttacccggggtatcatatttgcaataatgaagaagaagtgaacaggaaaaggaaacttcatagatcacaagaattgctactttccagcaaaaggttgttaattacttatcctcttgctatatttattggctctattagaggatgagtaattattgtgttcccgggaaacccactggagccagacggcgcctttattacattggaaggctcttcagagcgctagttatctccgtgggagcctctcccttcagattcccaaacgactaggaacctggcggaggtgagacaggaatgtagcccacaggcaggagggaagggcactgtgaagtgtgtgaactgtcagagcagtccttgcacgcggagccatgactgcctttactctcccacgccttcccccagccctgctccctgcgcatacttttttctgggcccagtccccacccatgctccctcccctttctcccagcctaggtcagcttccttatggtcctggctgctctcagtctctctctactcctcatccactctccattctgccctggtctgacacagccctgcttgggcacttcctccacctgcagagtcaagctccagctccgcagcttgccctgtgagcctaccgtgatctgtgtgggctgtgtgggctgcgtggacctctccaactttggctgttcccctgccccccaggctccaggcacgtgggacatctctgctgtcctatagtcctctgcctgatttcccttcgtctcttcctttgcgaaggcctacttcacgccccgctccagtggcccctccttggttaagcttttctcatctagaccagaaaccactgctcctccctctgggctctcacacagcactttgacacgcagagtgcatttgcagatctgcccacacatctgcctctaccccgacgcggctcctggattcctggtggaccagagccatgcttgatggactttttcctgaggtgggtttgtggacggccagcttctgctttctctgccagcaggcatgtctggggactcttcctctctgcctttctcaccaagggacttaattaggtgaataatccaggaggcttgctttcaatattctctaattggactaatttgactcctactgtctgccaggccattcacaaacagactttcacctatgcggttgttttcacctttacaacatcccctgtgagggaggctctgctactcatctttctcagatgatgaaacccaggcccttaatagttggcagggctgagatttgaatccaagttcctgaactcgagggaaggagcctttctgcacttgtgggctttctccagaggttacgtgcctacccatgaagactcacatggctttaataccctgattgtaccatgtgcacatttaaacttaggctagtcctgcaaaacacccccatctcctagctcttttgggtaacagaaagatggatgaaggaagagtttttaaaaatcttatcagtcaataagtatgaggtgaagaatgataggaaagaatggaagagaagaagaaaccagcattttttgaacacctgctatgcatcaagcattgtgtgccaggccccgtgctaggtggtccaaacatactattaatccttgtaataacccaatcaagtcgacattattgttcccatcgaggaaacagacttggagttgctcccacaggtgggcttccccaccagccccatccaaagacactgcagtcgggaagctgtctggtcccttgctggcatggggaaaccttttctcaccagctccattttccataggcaagagtgagcctggaatcttcctgagcccctcagttggggtggaatttctcctctgtctggggagcagtgctgttcactgagatgtgagcagcaaggcagagaagtgagcgggcctccctctttcaggcctgaaagggacatgccttcttttgatgtgctcacatttggcagatagaactgtgttccatctggtcacacccttcaggatttcatcaatttccaccagtattttcttagtctgctttttttcttgattgaggaagagtgatagtttttttttgtccactcttgaagggcagttgcttagtcctttctttgtcttaattggcctcttctggacttttctgtgctttgttttttcttttatgatttttattgttttgggttctttctaatttggtctcgaggtctctctgttgagcgtagccacaggccaagatagccagtctccaggagagccctgaccaaggggaaagttaggtttgggtgtgtgtcagataagacacaatgaggaggtgaaacagaagaaatttattactcagaggatccagagaggttaggggcattgactggggactgtctggaagtctggaggggacagagagctcaaccagcgagtgggaagtgagagcgagtgagtgagcaagagagagacacagagagagagaaagagagagagaagagagacagacagactctggtgttggtgattaggttttgttgtggtcagcagctgtgggtgtgttgggttttgggtccgtgggatgagcaacaagcaggcagtatcacaagcaaccacatgggagggaaagttttaactaggccaaaggcgatgtggtatgactgggtttcaaataactttatgctagaccacaaaatggatgccaaggcagaaactgcagggtatgttaaagaaatttatgatatcttctttgaagtgtttgtcacaactctctgctgtatgtgctcatttcatccatccatccatccatcccccttagtcgaattgaaggaatgcagtctttggagataaaccaacatggcttcaaattctgggtttgtcacttattagcaatgggattatatttctttatctgcaaaatggaggcatttatgtaagatacctggcacattgttaagtactcaatagtaattattatattcattatattataaggatatattaatcttaaattccttcattctcagaacatgttctttctctgggaccttgctctaaaactgaaatggtgcattcattatctattgctgtgtaacaaatttccccaaaactaagcagcttaaaacaaaaacatctatgatcttacaccatttttgagggttaggaatctgagtgtgacttagctgggtggttctggcttaggctttttcatgaggctacaatcaagctgttgggcagagccgcagaccctgagtacttgactggggctgacagatccacttccaagctcactcacatggctgatggcaggtgactccgattgcttaccatgtgggcgtctccctaggcattcccaaagcaaagggggagtgaggagactaaggcagacaccgtagtctttttataaaaatatcctaaatatcagaagtgacggcttatcacttctgctgtatgccattggtcatctagaccaagcctgtgacaatgtgggagaggacacacaagggattgaattccaggaggcagggatcactggggaccatcttggaggctgcagaccacaggtaggggagaggatagaaagaagaataaaatttctctcccctgaagcatctgtcaggtgagggaggccgtcatgtaaacattaatgccccgtaagacagtggctatattactggcaccaacagaatgccaggggaacattggagagaactctattaacctgcctgaaggcatcatggaaggtttcccaagtgcacgcacaccgcagtgtccttactcaagagctgtcctaatgacacgcgatatttggttggtgtctttttaaattgaagttacttgttgaggtgatttccttggacattaaaaataataacttgtctcatattacagcaatgtactgtttgcaaagtgctttcccatgtgttatcgcagtccacataacagccctgggaggtggacaggttttattactattgtttttctcagttgtagctgagctgcggaagcaaagtcactgctggagtctctgagtggggtgtggtgggttgcggcttgagctggggtctcgctggtccacgcttggtaccttagccatgacagcaccttccctgtgtttcctttgagtactttggacccctcatcttagagcagccatttggaccatttcccccctacagatgcattgcacacagacttgcttatatcaaagcttatttgccacctttatcctcagtcagttgaaatgctttctgttcatagagaagctttatgaagaaaatcattcacaaagtacagaaatgtgaactgtgctttcatcagcattcactgtgaaatttcattttgcaaagtccccagggggacttgaaatttctctttgggccattagaagagggacccgaacatcaattccttaaacacagatttgctcaaagaacatttaacagcttcagttctcatttgaacatgactattttgcaagtttgtttttagttcttctggtcaagagggaaaagatttcgggtccatccaggtgtatactctgggggaggaactttctttgtgacaaagatggtagcatgtagggtgagggttacagttattcatgcgtgactagtaaataagactatagcagtctccaaaaagacatctgtagtgcttaagtgcatgggccttgaaactgcgcagacctggatttgatcctgcctctgcccttactataatacctctgtgaccttgggaaagttatttactctcctagcacttggtaccctcatttgcaaatagggttaatagtagcacctatatcataatctttatcatcgggttaatagcacttttatcatgtttgtggattaaataaggtaatacatgtaaagtgtttaacacatagacataggaataagcattacctaaatgctaatgttagtggtgatgatgatgacatgtatttgagtggctgctctttgtgagttcattcattcatgaaacattactgcaggcattgctaacactggtatctgagaacaactaggggctgtagggagtctttgaatctcctaagctcatgtggaagattttgtgcatgtgcgtgctttttttttttttctggcacgaatctcaaaggaatttatgacctcagaaaggttaaaaacaaagcctacagggtgctgaagccttggtgttagggatacactgatgatcatgggctctccttgtgcttaaggagtttgcaaagtggccaggtggacagatgtacagacaagatgttgcagaatggcctgtgatgggtgtagcgacagaggccacagacaaagagagctgagagatcatcatcatggagggggagtggatgggcaagcccagtcagaagatcccaggcggaaggaatgacatgaagaaacccaggccactaaataataaagtgctgtatccttaaaggatcgaaattagtcacagtgacagtgcaagtgcccaagagttaagtggcccaacttgaggtgggcaggttggcagaggggagtctgtgaagtgtctttcagatgaggcttggagcttagccttgatcctgtggtcggtccacggggaggcattgaagagttgtagcaaaggagcaatatggtcagagctgtgtttaaaaataaaaatctgggctgggttcagtgcctcacatctataatcccagcactttggaaagccaagatggtaaaaccgtttgaggccaggagtttgagaccagcctgggcaacatagcgcaactctgactctacaaaaagtaaaagatatagtcaggtgctgtgccatgtgcttatagttccagctactagggaggctgatgcgggaggatcacttgaggctaggagtttgaagctgcagtgagctattatcacaccactgcacccaggctggctgacagagtgagaccccatctctgaaaaaataaaaataaaaataaaaataatgaaaataaaagtctctcgtcctgctgtgtgtcaggtagactaaagaggagaccctggaggaagggagatgggggaggaggctggtgagagatgaggccctgaagtaaggcagaggcagtggggattcaggaaggagaggaaattaaaaataagctaagagatcagccagagggcttgctgcccagtggatgttgaggagggagaaggtgacatgggtgattctcaggattatggcttctaattttcctgtgggcctgggacctgccagatacctggttacaccccactggagacctgagacacgcatatcaaattgtccctagccctagaaatgcatagtgttaatgaaggagataaggattacacatgaaataactaaagaacagcacaggcacatcctaagcatagtaagggaatcaggaaggtgatggtgtgaactggagtggttccaaagctctctgtggtattatatcaaatgagcagtttttaatgttcatcttgtctgacctctcagcttcccaccactcctttagtcttgaaacacttttcccttgcttttacaacatgtactctctctctctgtggtctctatttcccagctgggtcgctgggttcattctcttctggggagagggggtgggggcatgctccagcacagggtgcagccctacctgagctgccccctgctgaagtctcatctccaccacttccctcttgtcctctctgctgcagccaccctgaccctccatcaggctttgccttgagccaatgacagtcctacctctgtgcttttacacatttattttctgtctgaacacccttcttccctcatctcctagtcaactcccattcttccttccaatctcagctcaaattgcccatcctcgggaaaaggttgaccattttatttattgcccaaactgggatacatttgaaagtgcaatgggtgttatgaacaatgacaccaggacaacaggcatatgctggaaacttctggacaaatgggcaggtggtcacctgacacggggtggccttctcaggctccccagatgtgactaggtcttcctgtgccctcgttgctctctgggattccttccacagcccctaccatggtttatagtgatacctttgagcaccatctggcttatcatcttctcccccatggaccatatactccgaaggcagacatttcccattgtgttgttggctcctgagaccctttggcgcgtaggaggtacttaatcaacacctaatgagtacctgaatcaatgatggaactcagattgtgttgttctgtggcatgtactaagcccttccatttccatatcttggttggttctcctcgctatcttgccacgtttcctcatctctatctcctgaggatagaggcttaattacaatctcacagtgagtgccagagacaagtctaggactctcaggtctgctgatcccaaatccagtgctttttccaaaagtgtctgaagaagagaaaaggaaagatgactaccagatttagaactcgggaaactgggaggatggtcaggactggaaaaagatggagaatggggatctgagaaccatttgtcagctttcaatgctccatgacaatctgaacagcattctacactgcagacagctcagagtagagccacaaatggcccctcagctgcagggggcgtattagtctgttcttgctataaagaactacctgagactgggtaattgataagggaaagaggtttaattggctcatggttcacaggctgtacaggaagaatggctctggaggcctcaggaaacttacaatcatggaagaaggcaaacaggaaggaggtgtcttacatggctggagcaggaggaagagagagaaggaggggaggtgctacacacttttaaacaaccagatctcatgagaattcactgtcacgagagcagcaagagggaagtctgtccccatgatccaatcacctctcaccaggcctcttctccaacactggggattgcaagtcgacatgaaacttgggcggggacacaaatccaaactctatcagggggcttaagtagatggtgttttgtttttattgtggtaaaacatacatgatataaaatttaccattttaaccatttttaggtgtacagttcagtggctttaagtacaatcacactgctgtccaaccatcactgtcatgcatctccagaactttcttatcttcccaaactgacactctgtacccattaaacactaactccctatttctgttcccttcagcctctggcaaccaccatcctactttctgcctctatgaatttgactactctaggttcctcagataagtagaatcatacgatatttgtctttttgtgtctggctcattcacttagcatcacatcttcaaggtacatccatgttgtagaagaatttccttcctttataaggccggataattttctattgtatttatataccatattgtgtttatttcttcatccactaatggacacacctgggctttttctacattttggctattgtgaatatgctcctatgaatgttggtatataaatatctgtttgagtttctgctttcatttcttttcttttttttgcgatggagtctcactctatcgcccaggctggagtgcagtggcgtgatcttggctcactgcaacctctgcttcctgggttcaagcgattctcctgcctcagcctcccaagtaactggaattacaggcgcgccacgacgcccggctaatttttgtatttgtagtagagacagagtttcgccatgttggccaggctgatcttgaacccctgacctcaggtgatctgcccacctcggcctcccaaagtgctgggattacaggggtgaggaactgcgcccagcctgctttcaattcttttgggggatacacccagaactggaattgctagatcaatcagccagtgatttttttttttaactacagcagctttctatattcttaatgtgcaagggttccaatttctctatatacttgtcaacacttaggtcctgtgattttttttctttttttttagatagggtctctatcatctaggctggagagcagtggtgcaatcatagttcactatagcctcaaacacctgggttcaagcaatcctcctgcttcagcttcccgagtagttgggactacaggcatgccacgatgcccagctaatttttcaggtattttgttgttgttgtttgttagatgggggccctgctatgttgctcaggctggtcttgaactcctcccgcgtcagcctcccaaagtgctgtgattacaggtgtgtgccacctcgcccagcctgtttttgataatagttatcctaatgggtatgaagcagtttcttatgattttgatttgcaattttttaaatgattaatgatgttaaatatcttttcatatgctcattggccattagtatatcttaggagaaatgtctattcaggacttttgtccattttgtaagtgttttttcattgttgagttgtaggagtttaaaaatatattctgctcatcatcactggccatcagagaaatgcaaatcaaaaccacaatgcgataccatctcacaccagttagaatggcgatcattaaaaagtcaggaaacaaccggtgctagagaggatgtggagaaataggaacacttttatactgttggtgggactgtaaactagttcaaccattgtggaagtcggtgtggcaattcctcagggatctagaactagaaataccatttgacccagccatcccattactgggtatatacccaaaggattataaatcatgctgctataaagacacatgcacacatatgtttattgcggcactattcacaatagcaaagacttggaaccaacccaaatgtccaacaatgatagactggattaagaaaatgtggcacatatacaccatggaatactatgcagccataaaaaaggatgagttcatgtcctttatagggacatggatgaagctggaaaccatcattctcagcaaactatcgcaaggacaaaaaaccaaacactgcacgttctcactcgtaggtgggaattgaacaatgagaacacatggacacaggaaggggaacatcacacaccggggactgttgtgggatgaggggagggggaagggatagcattaggagatatacctaatactaaatgacgagttaatgggtgcagcacaccaacatggcacatgtatacatatgtaacaaacctgcacgttgtgcacatgtaccctaaaacttaaagtataataataaaataaaaaaagaaaagaaaaaaatatatatatattctgactattgatctattatcaaatatatgattttgcacatattttctgccattctgtgggttaccttttcactctgttcatagtgtcttttgatgaaaaaaagtttttaatttttatctttgatttacctattttgttttttgttggctgtgcttacgttgtcatatccaagaaatcattgccaaatgcagtgttatgaagcttttctcctatgttttctatatttctagtgttatgaagcttttctcctatattttctgtatttctagtgttatgaagcttttctcatatgattaggcctttgatttggctcatatgattaggcctttgatctattttgggttaatttttgtatatggtataaggtaaaggtccaacttcattctttttgcacgtggatattcagttttcccagcaccacttgttgaaaagactgccctttccctattgaatagtcttgtcatccttgttgagaatcatttgatcacacctgagaggctttatttctgagctatcctatcccactgtcctctatatctgtctttatgccagtaccacactgatttttttcatttgtttttattttcatttttaaagcatttttggttcacagcaaaattgagcatatggtgcagagattttcccccacctgcattgatagcctcccccaccatcaaaatcctgaatcagagtggtgtgttttttacaactgatgaaactacactgacatgtcatcatcacccaaagtccatagtttacattactcttcactcttggtgctattctatgggttttgaaaaatgtataatgacatgtatctaccattatagtatcacacagagtattttcactgctctaaaatcctctgtacttcacctattcatctcttcctcccctcgggcccctggcaaatactgatctttttactgtctctgtagttttgccttttccagaatgtagtttagttggaatcatacagtatgtagctttttcagattgacttattccatttagtaatatgcatttaagattcctccatgtcttttgtggcttgacagctcatttctttttagcactgaataatatttcattgtttggatatactgtagtttatttatctactcacctacagaaggactcacctactgaaggacatctcagctgcttccaagttttggcagttatgaatacagctgctataaacattcatgtgcagatttttgtgtggatataagtttttcaacccatttggataaataccgaggagaactaattgctggattatataataagagtatgtttagttttgtaagaaactgccaaactgccttgtaaagtggctttaccattttgcatttccaccagaaaggaatgagggttcctgttgctcgacgtccttgccagcatttggtatgtcagtgttttggactttggccattgtaataggtgctggtggtatctcattgtgattgtatacactatttgattactgtagctttgtttttggcatcaggaaatgtgagacctccagcctgggcgcagtgactcacgcctttaatcccagcacttggggaggccgaggcaggtggatggcctgagaccagactggccaacatggcaaaacccagcctctactaaaaatacaagaattagctgggtgcgctggcatgtgccagtaatcccagccactcggggggctgaggcagaagagaaagaatcacttgatccaggaggcagaggttgcagtgagctgagattgtaccactgcactccagcctgggtgatggaagaagactctgtttcaaaaaaaaaaaaaaaggaagtatgagaactccacttggttctttttttttttttcaagattgtttttgctatttggggtcccttgtaattccatatgaattttaggatggatttttttattttgaaaaaaagttattgggattttgatagagactgcattgcatctgtagaccattttaggtagtattgacatcctaacaatattaactcttccggtctatgagcataggatatctttctgtttatttgtattaatatcttctttaatttcttttacaaatattttatagttttcagtgtacaagtctttcacctttttggttaattcctaagtattttattctttttgatgctattataaatggaattcttttaaaaaaaggtcctttttggattgctcctcatcatgtatgaaacacagttgatttttatgtgttgattttgtatcctgcaactttgctgaatttgtttattactttgaatatttttctgtggaatcattagagttttctacatatgggatcatgtcatcaacaaacagataattttgcttcttattttctaatgtggacaccttctatatctttctcttgcctattctggctagaatttataatactatgttgatgtaaaataaaagtgggcatctttgtcttattcctgatcatggtggaaaagctttaaagcttttagtattttaccattgagtatgatgttagctgtgtaagcggacagtttttaaaggagcttaaaaagaggtaggattatgaaatcctgggacttaattaaaattatatcccccatattcctagcacctagtctggcatataataattactgagtgaatggacatgtttttaaaaatggtagtttctcaaaactgaatgagctaaaggtgcctctaaaagggggggcaatttggtattcatgagggtggtaagcattgaagagtgatgaaaaaggagataagagtcattgggttgcccactgacaaggtgttggttcctcattgtgggcaacaaagcaaagccactttaccctttgcttggatagcctgcttaattctggttattttctccttctctatattagcacttaacagctagaagaaaataacatatgttgtatctcattgtatttatgagtactgaattaataacttacagcccattgcataaaaagaaaatgagcaaaatgctgtaaattatagatggaagttgttaatgtgagtagagtgtacaacatatgcctcattgtgcacagctttgaaataatgtgactgatttaaatgacttgaggctggcttcattttaatgtggaatgtatggaaagcattgagtcaccaccatttcattagtaaggctatgttcttccattggaccttggcccctcaacttgaagtagataaaaattctgattacctatagtcctagaatgggaaaatcaaaagatttttatttaatatgttggcatatctatttgtgtgcacttttaacaagcaaattctgaatatgaactaacatggcctctcttttctcctttaacaaggtcatctgagttacagatttaaaaaatatgttcattaaatgcagagcttgttgataactttgagaagcaacaggatgtagtggaaagaacaggcccttttgtctcggtgagaaattttctggcttcaaataattgaaactctatagcttgtgccaaacaagattttagaagaccaaaaaggtattctcaggatacaaggctatcttacaggctcacgcgggtctgaggccactcagtctgagtttctagggctatgttgtctcatctctgctttccctcccacacctgctcctttcttgtctctcagcagactggctgtctctgctcctgtgcacatagccaagcacagctgccctgccctggctttttatccctgccagttcaagggccagcagaggctgcctggcatctctgatttccagattcctggaagagagaatctggttatctcatcttgagtcagatgaccactcctgatttgttcatttattaattcaggaagtctttacgagtttggggaactgttttaggccctgggattcatcttaccctcatggagcatatgtgtgtgtgtatgtgtgtgtgtgtgtgtgagagagagagagagagagagagagataagggaagagggactctgaaagcttattcttttgggctcggttgagggttgtaattttcagaggaagggatgtatgggcttggaatttggatagacctggactctaatcctggttcctccccttaccagctctgtgtgacccttgggcatgttaaattacctctgtcagccccaagttttgaatcagcaaaatgggagtaatcctttatagggtagttataaggattaaagtgaaatggtgcctgcaaagccaggagtgtagtatctgccacatgtaatcagagctctaccacttggaacaagttattaaacctgtttgaatctgttacctcatctgtaaaatggcaaagaatatcacttacctcatatgcgtattataaggattaaaccatggtaagtacaccagggtgccaggaatttgtacataatggatactcagtgtggtcactgctcttcttattcttattgcgagtcacattttttctcttctagttcccatttggccggcgcttgccttgtgacatctactggcatggagtttcatttcacgacaatgacatattctccggtcaagtgaacaagtttccaggtatctgctgttattgttgacatttaaacatgtttctagggccaagtctcagatacactcttctactaaaacatgacagttatttttgagatcagatttgaggactcttaattgggaattgctgtgttcactagccattaaggttttaaggattggagacaggcttttaaaggttcaaaggcaggctttcttggtctaatgccactggtggaagaacatggtttccactttttgggttatgcatataatatggggttctaatgagaggaatatattctgaaaatgaaaaaataatagaacatttcattcttgcgggaaacaaaagcaccaaaattctaggcgtatgtcatagaaatggggtatcagcttcccttttctttaagtattatatttggaggtaccatttttaaaaccaaatatactggtctccatattaagtactacaggctgcacacagcctctgccttttacctaatgacattatctcagcaagacttatcctgcaaggagaaatcttagtgctagaaaagcatcatagccagcactaagatatccctctcactccactaccaacctcccaatacaacttttttgttttgcattttaatctctaccacttttctgagatggagtctcgcttggtcactcatactggagagcagcagcacgatcttggctcactgcaacctctgcctcccaggttcaagcaattctcctgcctcagccttccgagtagctgggattacaggcctgtaccaccatacccggctaattttgtatttttagtagagacagggttttgccatgtcacgttggccaggctggtctcgaactcctgacctcaagtgacccacctgcctcagtctcccacagtgctgggattacaagcgtgagccactgtaccgggtctcttcattatttttgatggctgaatgaagaggatatttaagatggtaggacagcttagggagaaggagcactggattaagctgggtatgatgcagtcaaagggccttccacttattttttaaaatgttaatatattacacagaccatattataatgccataataaatactttctaaaaagaacatcaccctgaatcccatatctcatttaacaaaacagcaatatgaatatttctatatttcctcccaaaccttaagcaagtttactcatcctttttgcatggttgcagtcctagtgtagttgcctaaatatagggtgttttctcttagtattttatcaattttacctattttaaagggagaatcaatttactgtttccttgacattctatcccacgtctttaagaaaacgcattgcagaaaacacaatagccatacgttatacagggggtggtagttatgccacatccactaggggttttcacctaagcatgcagtcttacaagttcactaccataggccacacttagctcagattcacttagaaggatacagggcaggaaacacggcttgctggacagtcagtgtcaagcatttctcttcagtggagtatttgcaagagttccagagactagtctctggctcctcaagtgaaagctcaggtgcaaaaggacaagatccacattggtggatatgagtctttcttggcttagatgccccacagaagccagtatcttttagaactgctccatagtatgccttctaaggtccaagcaagggtcatattaagttacaagaatcatcgcactcagaaaagcctagagcaatgactttctactagatatctatgcaatttaccaaatcagggatcattttaaccatatgctttgtggcctagtaattcagctaacattctaccttcattgttttctaggggaactgagatagaaagttaacccaaggtcaaatttatccttagagaaggagaaagggttttgttacagaacaagaatgattcttgcagccagagttcttacccaacagtttaatgggatagctattattttttgtgtcttgctgctcagaaaaggatgctttgtgatgccacttaaaggacttattaggatattgggagaatacagtttggaagagaaaacgctttgaatgaggacagagttcctaagacatgaatcatcaaatgaggcctcatttacattttccccatttgctcatgcctcatctagtgtctcagagtaggaaagaagtagctatagatctacatttggaatacaaattagaaatatagaatgaagtacccacaaaggattagtttcataaaggtgatagaatgatattcattccaaagaagcaagtttgccccatcccatattccacatgccggtgattggaacatagacttttccacattattaacagaaattaattagttctaatgacaaagcagactcttaaacctctaggcagaggaacagtgctgccacaccctctaccctgtgaaaggtagtaatcctcagcagaggggtaattccagaacagtctggcctctgataccagtttgtgtccaagcttatcttctgtctctcatatatctcattattctaaaatgcactttctatacattgtatattacttagggtaagttctagtggatatcccaggcaagtgtaaacgctttatttgctgggtcaactgagaacggatatatacagatggaagtgattaattttgtttgtgtcagcacattagattttagtcacttttctatgggtaatttcctggttcaaattacattattatattttggctgatgaattaagactttctatgaaaataatctgatttagatacgtctaaagaaagtagattattagatatgtctactttctttagacgtatctaaatcagacatgtcagattagacatatcagatttagctttaagaaagtccaaaactgtccattctcaggttctgagcaggtcttttgctgagtttcagggtctgagatgtatggcatcacatggcaggtggtacctgagagcccacctgaggagggggctttctgctggagagggagggagcttcagtgaggaacctgtggggacagccatctgtcaagcattggtctgggctctggggctataaagacacagagaaaggcatgtaaagagagaagaaaaatacagcctaggggctttgctggaggaagctggaatgctgtgggggtccggagcaagggcgggcaacctaacccagatttgcccagggagcagcagggtgagagcttctggagaacaggactggcatggaaactgagcctccaggatggatgggcctgatccccatgccaaacaagggagcagagttggtgcaaagacagaatgccttcagcatattactcgttcatcgaagggcaagtggcctaccatggttagagggcgtcaggtgagcagggcaggggaggggtgatgagtaggaacccaactacagcattgttagagcctgaaggtcatagggagccactgaggaatttttaagccagacagtgacacgggtcagcttgcatgttagcaagatcagccagagggacacattagaaatgagatggctcagagaagaaacagagatgtagctaagagtctgctgcagcatccacccaagagatgaatgaattagtggcaatcagaatagagagaacaggatggatctgaaaggatttatttgttgtttggtggttctaatatgtttttgccaagaattattgttataaataatattttgattgaatagtgctccaagtatagctcagttttagtttgttttgttttacattaactgggttaagtagggctgcatgggcaaacctgaggttgaactgttatgctgtcagttaacttgaatggggtgagacccaccaggccttgagactccagcgtagcagacagaaaagcccaggcctcagaaggaggggcaggaggtaagcccttggtgtcagaaactcccacctgaattaggaggttttcccaatcgataggggaactgccctcatagggacatctagggatagaccttattgagaaacctaggtgggcagtcaacctcaaaaggagctgttaggtagcaggaccccagacactgggtgaaagtcacagacaggaggattccagcccttgcagggtgggcttgaggggaacagaggagaggttggagagaggaggggcattggagagaacaaagaaaaggacgcagctctgcattgctaaggcagccactcaggctccaggagcaaaagataaggtcaccaacatttggatacaagcaatagaacaccggaaaaatgggtaaaatccttcttatctggttggaatacatagtctaggtcagacttttagcagaagggagctgggggttagacctagagcttcgatctcagttcagaattggtcctagagcccagggaggggacacaggtgacgaggggtcaggcgctgcagctgcttagggaaaggggacagggcctggagccagtagggcctgaagtcagcagagctggccatgaccttccttctcacagatttactctgggaacgcgtgccctggatcagctagaaaccctgctacgcttgtcagggtcataatggagaagttgccactcccacacctgtctctgagccacctccagaggtggagatgccaggagcttccatgtgggttctagtgaggggccagaaactctttccctggtggcactggataggagcacagcttagatatggaggagcaaaggtttggtgctaagtggattgagagaagtctacacccgtccctcctggagacaggcattcaggcaggtttggagtgagctgcctccggcctgcaggcaggaagtgcctggcttccaggggtgcttcttaagttggccattttcagtagaaaaactgcctggagacatgaaggtaaacttggaaacacctattagctggtgtggggcctgatggtgcacattacagaaggagccattgccgatattaaatgaatattgactgaatttgctggacatagattttcacaaaacttttctggagcacccagactgccctcaagtacccacagctctctgtgttgtgtgagcccttctgacctgctgagggatttcggaagagaacattcccccggcacaacgactttaaagtgcagaaaataccacaacactatttggtcaggaggcatcctctacgtggagtaaggtgctgtattacagttagttatgaaggctttcagttcaatacggtaacattttaatgttagtaaacctcaagcaaaaggattccaaaaaagttgaagttttgctttgtttactttgcggtcagctctagtgtttattatgcaacaattctaatttcgagggagaataaaaggaaatagctgtgattttccagactcccttcttgggaagctcagaacagtgtcctcagtgagttttcttgactattgaacagtccatgttagagcagtttattagtgctttttaagctcctttatttcttacttaatccttccctacatccttctaaacaacaactaagacctgggcactgacgtcttgaagctgggatctttagatttattgcactttttaatacgctgatggaagcaagaagttggttcttaaaactttccttcccagatgtttacccttttctttctgaacgtgggaatttagaggaaactcattcattctgactgcccatttggaatgtgtgataatttgggcatgccaagctgacatggaactttgtattttctattaaaaatagctttgccaagcacatttctagtatcagtaatggaactgtttggtctctttcagggtaaaggccatttgtagccaccatttttggcaatgatatttgtcttaagaaacaagcatgatagccgggtgcggtggccacgtctgtaatcccagcactttgggaggccgaggggggtggatcacctgaggtcaggagtttgagaccagcctggccaacatggtgaaaccccttctctactaaaaatacaaaaatttgctgggcatggtggtgcacacctgtaatcccagctactcaggaggctgaggcaggagaattgcttgaacctaggaggcggcggttgcagtaagccaagatcgtgccattgcactccagtctaggcaacaagagcgaaactctgcctaaaaagaaaaagaaaaagaaataaggatgatgccaggcatggcggcttacacctgtaattccagggctttgggaggccaaggcaggtggatggcttgagcctagaagttcgagactagcctgggcaatagtgagaccctgtctctacaaaaacaaaaacaatacaaaaattagccgggcatggtggcacacacctgtagtcccagctactcgagaggctgaggtgggaggatcccttgagcctgggaggtcgaggttgcaatgagctgagatcatgccactgcactccagcctgggcattaaagcaaggctgtgtttcaaaaaaaaaaaaaaagaaaaaatgaaataaacatgctaaaattgataataatttttacctatttgcttaaaatttgctacaatatatagtactcagtttcttctcttgtcagagttactaatgatgttacaagaaaaaaaatccaccaaccttttttttttttttgagacggagtcctgctctgttgcccagactggagtgcagtggctcgatcttggctcattgcaagctccgcctcccaggttcacacccccaccattcttttaatgttttataacagtgagacatttcaattccctctgggcaaattaatgagataggatcaatgtcagtgtcagtccttataactgaggaactcctacagattgcatttttcccttgaagtataaattttggtattctttttatttcctgtccttcattcaaggagacagattttatgctgaaagatgtgtgttttcctattccatgcctttaatactcatgaaacagtaaaagaagtaaacttaattaagcctctcataatgtaaccagagtccactagatgatattctctagggtacaagacggaaggaatcccagaagcacgtaaggtggccccaaattaaagaaggtattaaattttaagtgcaagatataaatgcttccctattcattacctaagggggtgacaaagaataaaagaataaactaggtgaaaactcattccttcaaactgatgcttcatttttataaagagaaaagaacacccgtccgttacctcaagtttttcattaactcagtagttctttccaaaccatgagtcaccgctgtggggaacaactcagaccttttttaaaaatcctgcctgaaaaagagaatatgtcgggtgggtggttttaaaagtcccaaataatggctgttttatagctagtagcccactgttgttaaaacctcacagcgtctcttctccccaggcatgacggagatggtgcgtaaaattactctgagcagagcagtgagaaccatgcagaatctctttcctgaggagtacaacttctaccctcgctcatggattctgcctgacgagttccagctctttgttgctcaggtagatggcactccgtccccatgacccctgaattatattatgcttgcaactgtgtcctgggtcctgtgtgctgggagctgggacagggggtcccagggagctgcgactaagggagcatcttaacagtacacagtaggtgttggcagctatcaaaacagcttgcagagttgaacgagtagggtgacaggtaggtaaactgaagaaacgggtcttgacacaaggagacagccctaaggcggatatcaaaactggatcatggagtcaggacgctggggagccagggagctggagccggagcaggtggctgggcccccaagtaggatggggccgctgggggaatcctagagccgtggcctcgccggcttcctgtggcctgagatgtgggaggtcaggctctgtttaaaggccagggagcaggtctgacaaactcatggggaaccttttcagtgttttgctttaaacttgttccagaatcaattgtcaagtgacccattccatctcgaagcaccaggtttgagcatgtaatacactggagccctcaccactgattgtgaagtggaactcagaactgccatttttgttagccttttaacagtttcatttaggaccccttcaaagcctttgtgtacaagtttcacagtctgtcccataactctggggtgactatacaaccaatgcctgtctaattgtgataaggctaacaccatttactggtcctgctatgttccaggctttgtgctagaagtttaacatattttatttatttttatttttgtgtttttgagacggagtgttgctctgttgcctaggccagagtgcagtcgtgagatcttggcttactgcagcttccacctcctgggttcaagccattctcctgcctcagccttctgagtagctgggactacaggcgggtgccaccacaccggcttttttttttttttttttttgtattttttgtatttttggtagagatggtgtttcaccatgttggccaggctggtctcgatctcctgacctcaagtgatctgcccgcctcagcctcccaaagtgctgcgattataggcatgagccaccacgcccagcccacattatttcttttaatcttcatagcaatcttgtgaggctggttttattattatccccattttatggatgaggaaactgaggctttgaaaaatttagcaacttgcttgagaagtaaggtttaaaacctagagctatttccaaggcatatgctttctgagtctattttattgcctctgtattgttttggttttaatattgaattataaaacttgtaataaaattatcatttactaaacacaaaaacagcttgaagtgataatttttaaaggaagttttctctgagatggtggtcacatgggtttatatacattgcttaaaattcatcgaactattaacttaaaatgggtgcatttaattgtatgcaaactatgcttcaataaagttaattttaaaagataactctcagctgttcctcataattacccccccccccccaatgtctctcttctgtggctctgctcatgctgttgttgctatgtggaatacctttccttcccagctttgcatccaactacagtcatgagtcacttgacgggcacacattctgagaaaagtgtcattgggtgatttcatcattgtgccaacaccatagagtgtgcttacacaagcctagatggtataggctcctacacatccaggctatacggtatagcctatcgctcctaggatacaaacctgtatagcatggtactggacttaatattggtaagtcttttttgtatctaaacatagaaaggggaaaatactgtataaaagatgaaaaatgatacacctatgtaggatacttcccatgaatggagcttgcaggactagaagttgctctgggtgagtctgtgagtgaatggtaagggaatgtgaaggcctaggacattatactactgcagacttcagaaacactgtacacttaggctacactaaatctatttttaaaaaattttcttcgataaattagccttagcttactgtaactttttactttctaaactttttattttttaaaaaccttttagactcttttgtaataacacttagcttaaaacacacactgtacagctgtacaaaaaaaatttccttatattcttattccctaagcctttttctatgtttaaatgttaaaattatttttacttttagaattttttgttagaaaaccaagacacaaacacataccttcgcctaggcctacacggggtcaggatcatcaatatcactgtcttccacctccacttcttatcccactggaaggtcttcaaggagcagtaacatgcgtagggctgtcatatcctatgataacagtgctttcttctggaatacctcctgaagaacctgcctgaggctatcctacagtcaacttttttttttagaagtagaaggagtacactctaaaataacaataaaaagtatactatagtaaatacagaagctagtaacgtagtagtttattatcattatcaagtattatgtacagtgcataattgtattatactgcacttttatacaactggcagtgcagtaggtttgttgacacctgcaacaccacaaacatgagtaatgcactgtgctacaaaactaagatcactgatttttaaatcttaaaacaaatttctttctaggcactgctatggatacatctcaggaatttttgtatgttacattttcattataattcagttgaaaatgttctctaatttcccttgggatttctcctctgcccatgggttatgtagaaatgtgtggtttactttttaagtcatttgcggactttccaaatattttttgtatgatttctaatttaattttgttgacatcagagagtatattctgtattatctcagtctctttaaatttgttgagagttttctaatggcttacacattgtccatcttgatgagtgtttcatggccctgggaaataataagtattctggagttgttgatgtagcatcttataagtgtcaattaggccaagttgctattggtggtattcacatcttttttactactttactacttactagttctatcagttactaagttagtgttgaaatttccagctttaattttggattgtctgcttctctttttagttctgtcagtgttttcctcatgcattttgaagctccgttattagcttgatgatttgactcctttatcagtaacttgtcctgaagtctattttgtctgatattaatttagcacctccagttttctttggcttagtatttgcatggtatatctttttaccattattttacttttaacctatctgcatttttaaagagtgcttcttgttggcagcatgaaactgagtatggtcttttattcagtttgacagtctctgccttttgatttgtgtgtttagtccagttaatcttaatatgtaatactaactgttggattcaagtctaccatcttactatttcttttctatttattctgttggattaattgaatatttttagtgttttattttatctcttctttcggcttattagctatacttcttttaaaaatctttttagttttcaccctagccctagtatctagggtttacaatgcatctttaacttaccacattggcctttaagtattacatacttcaagtaacatattagcgccttacagcagtatagttccattcccgccctcatcctttgtgctatcgtcatctgttttacttctaacaatattataaaccacacaatacattgttattatttttgctctaaaaagtcaattatcctataaagaaactaaaagattagtacatttgtcttttatactcactcatgtatttactatttccagcattcttcattcctttgaatggctctgggattccatttggtattattttcctctggcctcaagaatttgcatcaacacatttctcacagtgcaggtctgctggtgacaaattccctcagctttcatttgtctgaaaatgtctttattttgccttcagtttttaaactgctttgaaataatttaaaactcaacaaaaaagttgcaaaaataggacagagagagcaccccaaattcttcatctaacttcctctaatgttaacatcttacacagtgactgaaactaggaaattaacattgatataatatgaaataacctatgctctttatttgcattttgcctgttgtcctactaatgtcctttttctggtacaggattcactccatgatccctcattgcatttagttgtcatttctccccagtcttctctaggttgtaatggttccctggtctttgtcttttgtgaccttgactcttttgaagagtactggtgatacagtttggatctgtgtccccaccaaatctcatgttgaattgtaattcccctgtgttggaggtgaggcctggtgggaggtgattggatcatggggacagatttccccccttggtgttgcatagtgatagagttctcatgagatctggttgtttaaaagtgtgtagcacctccctcctttctctcttgctcctgctccagcaacctaagatgtgcctgctttccttttgccttctgccacgattgagagtttcctgaagcctccccagaagccaagcaggtgccaccatcatgcttcctgtacagcctgtggaactgtgatccaattaaacctcttttctttataaattacccagtctcaggtatttctttatagcagtgtgagaacagtctaatacgactggctagttttttttttttttttttttttagaatgaacttacatttggatttgtctgatttttctcatgttagattcagattagacatttttggcaagaacaccatgaaagtgatgttgctaagtacatgatgtcaagatgtcttatccctggtgatgttaactttgatcacttagttaaagtagtgtctgctagatttctccactataaagttactatttttttcctttttaattactaagtgtctagtaaggagatattttgagactctgcagagagcctagttgtcttatactttttaacagacagctttattgagatataatcgacatagaataaactacagatatttagaatgtacagttttatacatttcatatatgtaaaaatccgtgaaatcatcaccacaatcaagataatgaacatatgcatcatgctgaaatttttcctcgtgtccctttgtaatccttctgtccttcccttctttttttttttttttttgaaatggagtcttgctctgttgcccaggctggagtgcagtggcgtgatcttggctcactacaacctccacctcccaggttcaagcaattctcctgcctcagcctcctgagtagctgagattacaggtatgtgccaccatgtccagctaatttttgtatttttattacagatgggtttcaccatgttggccaggctggtctccaactcctgacctcaagtgatccgcctgcctcagcctcccaaattgttgggattatagacatgagccaccacgcccagcccctccttcgcttcttccctcttttcctcctctcctatcatcaggcaacagtggatccactttctgtcaagataactttgcactttgtagaattttatgtaaatggcattatataacaggcactcctttttcgggggaggtctggcttctttcagttattttgagattcatccatatttgtagtatgtatcaatacttcattgccaaggagtattctattgaatgtttataccacagtttgcttagaccttcacctgctgcaggacatttgggttgattccagttttctggctgttacaaatacaccatgaacacctgtggtaagtctttgcgtggacatgttttcattcttcctgggtgaatgcttaaaaattgaattgctggatcatatagtaggtgcatatttaattttaaagaaagtattgtcttccaaagtagttgtgtcattttatcatcccatcaacaatgtatgaacattccaattcctccatatctttgccagaatttggtaatggtcagtctatttatttatttacttaagagtgggtcttgctctgtcccccaggatggagtgcagtggcccgatcacagctcactgcagcctccatctcccaggctcaagcgatcctcccaagtagctggaactacaggcacaggccaccacacctggctaatttttgtattttttgtaaaaacagggtttcaccatgttgcccaggctggtcttgaactcctgagctcaagcgatccacctgcctcggcctccaaaagtgctgggattacaggcgtgagccactgctcctgtctgtcaccttacagggccagtggtcagtctttttaattttagccattctaataggtatgtagtgacctgtcatcagttgtattttgcacttcctaaagactaatgatgtggagctttcttttcatgtgcttgtttgccatccagatatattttttgatgaaatgtctgttcacatgttttgcctatttttttttaattgggttgtttatttttattattgagctttgagaatttttatatattttgaatacaggtgtttatgagatataccaattgtaaatattttcttccagtctgtgcctttttttattttttaatttttaatatttgtgtctacatagtaggtacatatacttatggggtatgtgagatgtcttctcattctcttattatcctttgaaaagcaagtttttaattttgacaaagtccaatttatcaatttttttaatagatcatgctttttgtgtcatatataggaatttatatctaacccaagctcacaaagatattctcctatgtttttgtctaaaagttctatagttttagctttcgaatttaggtctgtgattcattttgagttaatttttgtatatggtgtaaggtatgggttgaagttcacttttttgcatacgaatatccagttgttccagaaacatttgatcagaacactaatctttctcttccaaattgcctttgcaccagtgtcaaaaacagttatccaaatatgtgtaggtatatttctgaattctgtattctgtgtctttgatctatttgtctctctttctgccaaaacctcactgttttgatatagctttataagccttgaaatcaggtagtgtaagctctccaactttgttcatctttttcaaagttgttatggctattgtagtctttgatcagccatatgaaatatagaatcagcttgtcaatgtctacaaaaaagcccactgggattttgaatggaattgtgctgaatctatatatcactttgagtagaatcaacatcttaacaatgagtcttctgacccattgacatggtgtatctttccttttatttaggtctttaatttctttgaacagtgttttttagtttttagcgtacaagtatttcacatcttttgtcacaattttcccttatgatttccaatttttgatatattggcagtgttttatttttaaacttccatttctaattgttcattgtatgtaaaaataaaattgctttttgtgtattgatcttgtatcctgcaaccttgttaaacttatttaacagttctagtagcttattttgtacttccactggattttctatatggactattacatcctctgagaattgaatggttttgtcttactttgtaattagccctttatttctttttcttgccttatggcactggctagaacctccaaataatgttaagtagaagtggtgtgaacagatgtccgggactttttcctgatcttaggggttatggatttcgtctttcatcattaagtattgttgttagttgtaggtttcttgtagatgttctttatcagattgatgaagtttccttttatttcttgtttccatggattttgtttgtttttaattaggaatggatgtaggattttgtcactcttttttttttccctgtgtctactgaaatgatcatatggatcttcttttttagcttgttaatgtggttgagttacattggttgatttttaaatattaaacaaaccctgcatccctaagacaaactccacttagtcataacatattatcctttttatatattgtggaattttgatttactaaaatgttctttatttgcatctatattcatgagggatattggtttgcatttttatttttatttttttgtaatgtctttggttcgttatcaggataatgctggccacacagaatgaattataaaatattttctacttttaaattttctagaagagttttttcagagttggtattatttctttaaatgtttggtaaaattcactagggaaatcatgtgagcttggtattttnnnnnnnnnnnnnnnnnnnntgagcttggtattttctttgtgggaaacttttaactacaaattcaatttctttgatagatataggctgttcatattatctatttcttcttgaatgagctttaatagtttgttttcaagaaatttgtctactttttctaagttttcacttgtattggtgtaaaatgattcataatgttacctttaataatctgcctttacctttactaatgatacctcttagtcctaacatttgtaatctgtgttttttatttttctttttttccctctgctcagtctgtttagaagttttcagttttattgatttcctttgttggcataatagctatagttgttttgtttttagtggttcctttaaaatttatggtatacatttttgagttatcacaatctacctttaagttatatagtactattttatttatagtatgagaaccttataacactcatagtacttccattttcccacacctagcttttatgctgttgtttttatacattttacttttatacttattataaactccagactacattgttatcatttttgttttaacaatcaactctattttaaagagatttaaataacaagatgaaataattttaaatatttactcatatatttaccatttccagtgttctgtatttttttgtgtagattcacatttctgtcaggtatcatttttcttttgtgtaaataactttctgtagcatttcatgcagtgagggtcttttggtgatgaattctctcaacttttatatttcttgaaatttattttgcctttggttttggatgatattttctctaggtgtagaattctaggtggacattttgtttttctttcagcacttttaatatattgctcttctgtcttcttgcttatattgtttctgaaaagaaatctgttttcttccttatttttgatcttctttatataacattctttttctcttgctgcttttaatattttttctttatcattggtgttgaacaatttgattatgatgtgtcttgatgtaattttcttttatatttctcatgttaaagctcatgtttctcattgagcttttggacctgtgggtttataattttaataaaatttggaaaatatttgcccattatttcttcagattttttttctatgcctcttcacttctacttcactctaattacgtacatattagtacatctgaagttgtcccacagttcactgatgttctgttcatttaaaaaaatcattctgtttcattttggagagtttctgttgttttgtcttcacattcactcatttttttcattcttgtcgaataatcccattcaatctcttatctcacatattgtagtttttatttctaaacatgagagttgagtctttttaaatatcttccatatttctacttaactttttgaacatatggaatgcattataatcactctcataatgtcactgtctcctaattctaactctgtccattctgagttggttttgatttttctcttcattgtggcccatatcacgatgtttttttcatgtctgggagtttctagctgggtgacagatatagtgaatcttaccttatttggatgttggatatttccatattcctgcacatattcttgaactttgttgtaagatccagttcagttacttggaaatagatttcaggtctatttcaagattttcaagatttgttaagcaggactggagtggtactcagtctaaggcttactattcctcactactcaagcaacagtcttatgtgtgctctacccagtgctccatgaatcatgttttctagtctggctggtgagaaagacactactcctggctctgtgtgaacaccaggcactgctacctctgcttttttgggggtgtttttcaggtagtttggccttgggtagtttcctcacgtgcatgctgatctgtacctagcaaaacatttaaggaagacgctccagagttctctgtacaaaagtgtccttcccagtactctgtcctgagaaccctggctatctcagtcttccctgactcacagttccattttctcaactcagggcgtccactgggcttcaccaaggtcctactggggcactctgcactgcagcctggaatctttctcaaggcagtaatctgaggcaatcctagggttcacatcgttcaattcctatctctcaggaatcactgtcctttgttgcttcatatccaggtcttcaaaactgttaacatattttgtctactttttggttgctcgagcgatgcggggcaagagtcaatctagtttctgttattacactttggctgaaagtggaagttctctaaaagaatgactacataacaataacaatagcaacatttgctgagtgtttttatctagactactgttttaggaagtttgggctgctacaattgaatatcataaactgggtgacgaataacaaacttttttttctcacagtttcgaaggctggaaatccaagatcagcatgccagcatggttgggttctggtgagggccctcttcctggtttatagctggtcaccttctcattgtttgcctacctggtagagagaaaggactagctgccttcctcctcttataaggacactagtcccatcgtgtggggtccatctccatgctctaattgccctccaaagagcctacctcttaaaaccatccccttgggggttagggtttcaatatctgaatgcagaggtggggtgggaacacaagcatatagtccataacaattacctaatttaaaattctttagcaaccctcgcaggattcttctattattcataggagaggaaactgaagtacagagaggttaagtcatttggcagggttaacacagtttggaagactggcttcagtgccagtacttttcccttctgtgtaataatgtgggaggatatttaaatagaagtgtgtataaggtacagaaatgttccagagaaaaggagtaaaactttgttggtgatggggagcagggatggacagggctgagggcaaatggaatagagggagagaaaaagcttcctgagtagtggtgacacctgacctgattttgtataatgagtttacctggcagaccagccacagaagagcattctacctaaaaacaatagcttgtgcaaaggtacgaagtcatgaaatagtatggcattttggaatgatgagcagtgtggagtcactaaagtttaagagaaaaggatttagggcaggcatggcggcttacagcttgtattagtttgctttcatgctgctgttaaagacatacctgggactgggtaatttatgaagaaaaagaggtttaatggactcacagttccacatggctggggatgcctcacaatcatggcagaaggcgaaaggcacatcttatatggtgacaggcaagagagactatgagaaccaagtgaaaagggaaaccccttataaaacagtcagatcttgtgagacttattcactaccatgagaacagtatgggggaaactgcccctatgattcagttatctcccactgggtccctcctacaatacatgggaattataggagctacaattcaagataagatttgggtggggacacagccaaaccgtatcatgcctgtaatcccagcactctgggaggctgaggcaggcagattgcttgagtccaggagttcgagaccagcctgggcaacatgacgaaaccctgtctctactaaaaatatgaacgatttaccgggtgtggtggtatgtgtctgtagtcccacctactcgggaggctgatgtgggagaatcacctgagcccaggaggtcgaggctgcagtgggccaagatcatgccactgcattccagtctgggcaaacagagtgaaaccttgtctcaaaaaaataataaaaataaatgaaaaggatctgaccccagatgagatttgagaaggagagggtagatcacagagggtcttgaatgccaaggtaaagcgcttatcaaggggaagccatgcaggggttttaagtgcagaggggagaggtatattatcaagttttagtattagaaaggtgatctgttggagaggatagcgtagattgggaaggaggagaaatgagacctattagaaaggctgttctattcatctaggcagaagagatgctgaaggttgtatggagacactcaggcaggaatcttaggcagagaaagatcagaggtgagtaatatttggaagttggcatcaatgggatttggagactgatagaattgagggtgaagaagaaggcagacttggtgctttcaggagtctgctgggtcaccatttgccaagatgggaaacccaagaggaggagcgggtttagtggagaagaaggaaagttaactccttggagatggcaagtgtttgttgctcaagtattgactgcctgattttagctgttcggggagtctcttttctcagcagtaaaacagggagactgagttaggtgactgctctggtcttcccgctttagcgttctaagccctgaagtttcaaagcccatttgattgatgctgaaagtcctcaggactggatagttctctaatataaaggaggatttctttgtccacatagtgaagtcaatttgaaaactgctagtttagggcctggcgcatacagaataagactctgaaaaccccacagtagtcatttgctggagcgccctggcaccatcatctcttccttacaggatcttggttccctctcctcgactcagtcccatttcttcatctcttgaatatgaaagtgatcctagccttagagcaagtgagcatccagtgagtctgtgatgatgaaatgcaatgaatgccatgtctcctgcttctgaagcaaagcatcacatttcatcgcatgtgatgatgaaacactttattagctgcaaacctgattttttaagaatatggcattattactggccgggcgcggtggctcatgcctgtaatcccagcactttgggaggccgaggcgggcagatcatgaagtcaggagattgagaccaccctagctaacacggtgaaacctcgtctctactaaaagtacaaaaaattagccaggcgtggtggcgggcgcctgtagtcccagctactcgggaggctgaggcagaagaatgacgtgaacccaggaggtagagcttgcagtgagtggagattgagccactgcactccagcctgggcaacagtgcaagactctgtctcaaaaaaaaaaaaaaaaaaaaagtggcattattattttagtagctcctttgttttaatacaatgcattgatagtaaaaattcaattagtataggcatgtgaaagtaaaaagtagaaaaaagtccccattcttcagaaattgcttttgtttagtgtgtatcctttcaaccttttcctgtgtataaacaaatatagctataacacacagagctgttttttctttaaaaaggcttcttttttctttaaaaacatgggattattctatccattcttttctttagccttcattttctcccattgaatgtgcgtaggacatctcgccatgccagtgctgcatagatgcattatgactttaaaaatccttaccctgttggctgggcacggtggctcacgcctgtaatcccagcactttggaaggccaagacaggcagatcacaaggtcaggagttcgagaccagcctagccaacatggtgaaaccccttctctactaaaaatacaaaaattagctgggcatggtggtgggtgcctgtaatcccagctactcgggaggctgaggcaggagaattgtttgaaacaggaagacggaggttgcagtgagccaagatcgcacctctgcactccagtctgggtaatgtgggtctcaaaaaaaaaaaaaaaaaaagcctcaccctgttgttgatgaacattgagatattctcatattttttggttcaacaaatgatgctgaagggaatatcctcgcacaggtatctttatacacctgtgccagcatctcctttggatagatatctcaaagtggaattgacatactaaagaatataatgcattgacgtttttgacgggtgaaagccaaacacggggctttattagaggtagtgcacttaatcctgagggtaaaacaatgtcctgacagtgcctcagaagtgaggtctcagaggtgtgtgcatgcaggggctttgctttgtggttcctggcaacaacaggaagaagtgtgagtttctgtaaaacaacggaaaacctgacactttgtaggttatttcttacattaattaggattaagtttatttcattaaagaaagagggagacccacgttaccctgctcttcatttgcaaaaccggtactcaaatgtgatcagcaggtggcaccaggcggaagcgagtgggattctcagtgaaaatttttgtgaagagtcgaggcggatgcagcctttccaattttagcagatggccaataaaaaaattccttagagtttattttgcatatggtcttccatctgggtatttgagaaaagtacagttttgttatcaaaacagtatttattatggtgaaagagtttgtatttctcagcagaagaatttttcactgaatatagccaaaaacctgttcaataatgttttgcagtttcttggagggaagcagcaagcatgagattcttccattttcctctccagttaccatcccaagttagtgtttattgattcagctcctcaaggctgaatgaagtgcattatttgcaaaaacccccagagaacaacgtcctccgctgggtttaggaaccaggaaaatgtggcattataagtgggtcagagtcaaggcagaaagaaaacttgcagtgtgaagtgtatattctttgtcctgattccacatttatcaaataaccttccggtaaatctattagtcacatcattttccttcctgtagacaatgtgctgatttgaccgactttgggtaacccactggtttatcaaaaagatgcagtttaaactcctgcacacgccttatagagcccttgccaacctcggcagctacgcttgtccccatttctgaactcttcctcctgggtccttccatatttaaccttttattagatactcaatggcatcaagacctctcttacctctgactgcccttctttttgcctggagcacccatcttctttctttgcaccccactgccacttccaagctgctgcttttcacctgacaattttgttagtttttcggaccccctgcttagctttaactttctctataaagcctactctgcccccgacgtctggagcaagttctcaacaacaccttgttgtttttcttttcatggtacttatgctaattacactgtctagtgactacctgtttaattacctctccctcctactgtaagttccacaaggcagtgaccagatgggtttcattcatcattatctccccagtgcctatcacagtgcctggcacacagtaggaactcaaatatatttgccaaattgagttgcaaattaatatacatatgctgtggtttactttctttctttttttttttttttgtctcttttgagtttagtcatcaaaagttagcctctttgaggccaggggtatctgcaggacccagcctgtcacttcacaacagggtgggccaggctcggagcatgagaaacttaccaaagtgatgccgtccggtgggagcgccaggtggccaccagccagcctttccctggtgatgacccaaccttcagccacacacatcgccctcacacgtctgcagtaagcctgggaagtaacatggagaatgcagtgtctcctgcttctgaagcacggcatccctggaggccgatgcagtggccctgggttctggcgcataactagtaaaggagtaaagacagaagtgaggggactccagctgtcagaagaaggcagatggttcaaagcggctggcaaggactccataggagccatggtttcacctccccatctgcttccagtgttatttcctttgttgccaaaaatagaacttcacctcctgcttggatgtattatactgttcttgtgccccttgcttaacagttcaatgtgttaactgggaaaacgatatcatctgaaactcaagatgctgctcccctctggaaagtatattttcctctctggaaaacatacttaggtcctgttcatcaggaagtccttttaaacagcccaaatgacgactggcatctgtgttgtgcttgcagtttaccaaatgatttttatatacatgacctcttttatcttcactcagtttgggaaggtatcatgatctctgatttacaaatgaggaaataaaggatcagaatcacaggtacttgctcccggttatacaactgctggtgtactcagatattcttatgtggtttagtgcaatcgtttcccgaggcctgctaagtgccaagtgctgtggatacaaaacaagttagaaatccccttgccctcaggatttctggtagaggaaggtgaccattcattcattcagttggacatttatagggtctacatcccgtcatctttccactacatcatgttcttattcatcatcttatagatgaggaagctgagattcagagggttgagtaactggcccacagtcccatggcctataggttcatgtagctgggactaagacccacatcttctgactctgtcacagtttcctttagtgtgaacaaatatttactaagtgcccttatatgtccagccctggcagactggggagtcagacaaaacatatagtcttggcttccaatgaagggtcctgcttagcagaggagacggatggtccaagctgggatggaattaaacacaggcactatggaaaccagcataacatggagtggggaaggtgggaaggtggagaagtcaggaaaagttcctatgcagtcatttcaagtgaaatgaaacactgaactggagttaggagacagaggttcaagtctttttattttatttcatttttatttttttgagacagtcttgctgtgtctcccaggctggagtgcagtggtacgatctcggctcactgcaacctctgcctcctgggttcgagcaattttcctgcctcagcctcctgagtagctgagattacaggcctgcgccaccatgcccagctaatttttgtatttttagtagagacagggttttgctatgttggccaggctgctctcgaactcctggccttaagtgatctgcccacctctgcctcccaaagtactgggattacaggtgtgagccacgtgcctgaccataggttcaagtcaggactctaccttttcactgactatgagaccctggccaagtcatctagccttcccccacccgccaaggcttcttcagtgcctcttctgcaaaaggaggagattgtagattttcactaagatccctttcttctaattttttgtgattctctgggtttggctttcctggactttcataaaactcttcattggagttaaaattctgcacaagtttctgctgccagggtttcagttggagcacaaagggctttatgtaatccatcatcatcttgctaatgctggggtcagtgtagcctggggctcagcatcacagccaataatgaaggctacggtatggctgcctctgtggggctggctgtggcaacccccaggcaatcgcaattcctttatctcagcttcaccccctcccaggtgaggaactgaagctgtatctgcacattcctgcacaatccctgtggtgtgattcgctgagactagcagatattggctaagccaaggcatccttcctgttggctccttctgaaggccattcagaaagattcatatctatcaaggttctcacacttcttgactgttgcccttgccgccatttcctctgttgggagacccttcctcctcttcttcactgcacaaacctttgctacgtatccttgttcagagccgatgtctccaaatctgtgaaggccctttctgatacttcctcccctactccacctcctatacccctgctgccttgaatgtgggatagttgaccactctgtcctctgatcccaatcctgtactctctcaattataggaccctaaaatatgctatttgcagtgttccaggctgagagacagtgaggcaagggtttggggtcagaatagacctgggttgaaatcctttcttcattacttcctaagtgtatccctcgggtaagttaattactctgagcctcaatttcctcatctgtagcatcagaggtttgctaggagaatcacactctatcccctcactaagtggacatttacttatctgctctccctgttaaactgggggtcccttgaggaactggaatctggtcagatttatttctgctccccagtgcccaacacaaaggggaccctcaggtgtatgtgtgaaatgaatgaatattaagaaaggatttgcagtttcaaatggaaatctaagctggagctaagaatgcttagacaaagcgttctgggtcttcatggctttttgaaaatgtggaaatgaatatattttaatttttaataaaaatctgatcttgagatgaattatctcattatatgatgatagatcacttaggagaagaaaagagctaagacttctttttgactgaattgtatccctgtttggcttaacttggtgtgtgtgtgtgtgtgtgtgtgtgcgtgtgtgtgtgtgtgtgtattttttcctcctgccagagacagtcctgtgcaataacacttctcatactaggagcttattgtttaattttctaaacttcaatttgcccccaatacatttaatgttttaaatcacaagtattacaatcttgctaccttgccgtactgatttattatgtggaattttgagatgaatacgatcattagagggccactgctttaatatgcttttttttttctctctctctctaatggcaagcttttaaaaagaaaaagtaggagaagtaaacatttttctgggacagtctattttaaaggtcaagaaaaccttgcttccccaaaggaagttaaaggtcatctttcacccttcaatttttgtcctttcatttcattttgcaaaagttcttagtgatgtagcctgagtcacttgactagagatgtctaattttctacgagaaaagagcagagccaatcttgacttcaatgcctatttcaaaaggaaattataaaaattgctctgctctaccctttttcctcatctccaaagaaagaaagaaatctctcctattctgtttcttgttcaacttcttttctgtgtaattgtatcttggaggggttctaatgaaaggcaaagcaaagtagagatttgaatttagaaaggtgatgtaatcaaattttctggccttgctaatgaaaggattctcttgtcctttcccctcacgcaaacatgcaccctcttctcccaccttccttctgaaattaaccctgtacatttgctagaaggattagaagaataagataaaaggatatgtttggctagaatatatcgataacagttcttctctgtgtgtttggacctaaggatcccttctttttcttttagctttttattttgacataattttggacttactgataaattgtaagaataatacaaataatttctacatatcctccatgcaaccccagatgttaacattgatgtctgccgtctctctcctttttgagagtatgttgcatacatgatgttcctatatgtacccctaaccacttctgtgtgtatttctgaaaaataagagcactttctttcataaccagtgtcattatcaaaatcatgaaatcaacagctatctagtattatcattttcagaatttattcagattttaaaattgtaattttttatatattgactagggttatttaaaaacacacactagttatggggcatacatcacatgctctggctataatcgtgaatacattatatactttttttcttatttaattctcacattacacctataagatggatactcttattacctccattttataaataaggagaataaaataaggctatattagtctgttttcatgctactgataaagacatacctgagactgagtaatttattaagaaaaagaggtttaatggactcatagttccatgtgtctggggaggcctcacaatcgtggcggaaggcaaaaggtacatcttacatggtggcaggcaagtgagaatgagagccatgagaaaggagaaactccttgtaaaaccatcagctctgataagacttattcactaccacaagaacagtatggggaaaactgaccccatgattcaattatctcctaccaggtccctcctgtgacatgtgagaattatgggagctacagttcaagatgagatttgggtagggacacagcaaaaccatatcaaaggcttagagagttcaagtgccatgcccaagcttacgcattcctctctaggtacttagcaggtactaacaaccattaggtggcagatcttgctttgaatcatgacctatcagacactgaaagccatatttttaactatcatgtaaactacaactctgattttgaggacattttggcagatttcagttctagagagaattaccttggaaataacctattaaatgtaaacagatgtgatatggaatattcaaatgcccatggaaagctgtccttcgattggatacatttgtcaatacagctaacaatactatatttgaatgcttgtttttgtagcagcataactaatggttagatgtccctccattgcagaggatggcaaacttcctgtaaaagccagatagtaactcttttcagctttgtaggtcatagagtctctgtcataaatactcagctctgctgttggagtgtgaaagcagacatagaccatccatacgtaaatgagaaaactttctttacaaaacaggcactggtatacttgaaccacgctccaaagtttgccagcccctgagatagagggctgaaataatctcacttcattgaggaggctctaaaggggtgttacaattgcagcaagaaaaaatagatgtattttcgttttaagcaatacctgaatctcatttttataaagggagggagtcgacatggttttcattttcacttaatacaactttcattgtgtgtcagttgtattaaatgatgattaagaggaaagagacttgtgttaaatgataaaggtaatttataaggaagaatgaactgtcagattaactaaacattagaaggcacttcagaggcaatattaatacatgaaataatgttaagaaaaacataataaagctcaatactagtctatttatacaggtttaatgaccacgtaggatacagtttctcttggagagatacaaagacaaagaggaaggtggaaaaagagaaacaaatattagagaattaaatttagtttatgggaaattatatgattatttattaaaattatatatagtagccatctctagagatagcaaagaagaaaatagatcagccttcatggactggatttagatttctaactatctgaaatcatggaatggattcatataaccccttgaaattagtacatctctattattctatagttttatgaagcagacactaaaatggctatgtgtgtatacaaagtcatatatatattttaaacttttatttaaagtcatatatatatatatacaacattcattcttctctggacagtatatagtattatatatgtgcatatatgtgttctttatgtatatctacttatatatagtgtttatatagtaaatgtgtttatgtacacattatggtatatagagtacatacatatatgtctacatatatactatacagagaatagagaacaataagtaatgtacaggtaaatatttatgcatcattcattttattagattttcacatcaaaaaagctggtgaagttaacagtgagtagatattaaaaattttttaaattttaataaatttgtatttttattgtttacttaataaaattatcattttgttatgttaaaataaatatttaattggcaaataaaaaatgtatgtatttatcatgtacaacatgttgttttgaaatatgcatacattatggaatggctaaattgagctaattaacatgcagattacctcacatatatatcatttttgtttgtggtgagaacacttaatatctactctcttagtagcaattttcaagaatacaatacattgttattaactatactcaccatgttgtacaatagatctcttgaacttattcctctaatctaactgaaattttgtatcctttgacaaatagctccccaatgcccctagcccctggtaaccctcattctattctctacttctgtgtgttcaacttatttagattccacagataagtgagatcatgcagtatttgtctttctgtgcctggcttatttcgcttaacgtccttcaggttcatccaagttgttgcaaatgacaggatttccttctttcttaaggctgaactatattccattgtgtagacatgccacattttcttcattcattcacccgcgacggacacaggttgattccgtatcttggctatcgcaaatcatgctgcaataagcacgggagtgcggatctctcttcaacatattggtttcatttcctttggataaaaacccagtaggatttctggatcatgatgggtagttctatttttagtttttttgttttccataatggccatactaatttaccttcccaccaacagtgtgcaaaggttcccttttctccacatcatcgccaagatcatgtctttttgataatagctgttctaacaggtgacagctcattgggttattaatttgcagttctctgatgattagtgattctgagcattttttcatatcccattggccatttgtatgttttctttagacaaatatctattcagattctttgcccattctttaatagggttatttgttttcttactactgagctgagtaccttatatattttggatattaaccctttatcagatgtctggtttgcaaatattttctcccattccataggttgtctctttatttggtcgactgtttcccattcagattttgacaattatccaaataatgtatagcaaaagaaggtcctggattgtgcatcacatttggttgttgtgtctttttagtctccttcaatctggaagaatttctcagtctttctttgtgtttcatgacattggtatttttgatgagcacaggctacttagtacactgcccctcaatttgggtttgtctggggtttcctcagtattagatccaggatacacatttttggcaggagtaccacagaagcaacattgtgtttttctcgtgggtatcatatctggaggcacatgatgtccttctgtcttattactggtaatgtcaactttaatcatttggctaaggtggtgtctgccagattttcatggaaaagttgctattttcccctttctaattagtaagtatcttgtgggaagatactttaagactacgtaatgtcctgttactcctcagactttcccccgcctccaagtcttcacctctgttaaggattcttgcctgaatcggttattattgtgatgttgccaattagtgattatctacctctatcttcccttctgcatttgttagctgagtttctactaaaagggagagctttgccttctgatttaactatctatgtatgtgtgcatgcctgttagtgtgcactcatggattcttactttattctgtgggttataatattttaccatcaatatctattttgatgctcaaatttatttgagatttggccatgggggcctgaatccttttttttttcttttcttttttctttttttttttttttgagatggaatttcactcttgttgcccaggctggagtgcagcggcgtgatcttggctcactgcaacctctgcctcccgggttcaagtgattctcctgcctcagcctcctacaggcgtccgccaccacacccagctaatttttttgtatttttagtagagacagggtcattttctgagcacccttttacttctgccacaacaagacattccaggcttttcttatacttttcctgccctgccctggactcagccaattctccaagaaagcctggtttcttttcatgagtgccaggtgtgcttattgctacaggggtgtcattccagtgccctctcccctacttttaatccaaattatttgtgatattctgtttagtatcctgaaatgaaatataagcaacctatacatgtagttaaaataaaaacaaccccaccctaaatgcttgctaaagcagaaaaataaggaaaagttttttttttttttttttttttttttttgacagagtatctcgctctgccaccgaggagtggagtggcttgatcttggctcactgcagcctccgcctcccagtttcaagacactgtcatgcctcagcctccagagtagctggaattacaggcgtgtgccaccacacctggctaatttttgtatttttattaaagatgaggtttcatcatgatggccaggctggtcttgaacctcctggcctcaagtaatcttcccgccttggcctcccaaagtgctgggattacaggtgtgagccaccacatgtggccagaaaagctctttataatgaaatgctatacaattcaataagtaaatgctttggcaccgttatactctgtgacataataaagtggtcagatgctaccactacctataatgaataagtttagatataagaaaagtgagacaatatttgattagttattatagtctctctaatatttcttcatatgtaacattttgaactattttcctatataatcactgggtgttgtatgagtgactcaaataccatggtccgcaatatcattagtgatgtgatgtttctgaaatatcaaataaactaaaaaaaaatccagaaaaaaaaagcaaaatgtaatttctctctttacataattctttttttttttttgagatagtctcactctgttacccaggctggagagtgcagtggtgccatctcagctcactgcagcctctgcctcctgggatcaagcaattcttctgcttcagcctcctgagtagttgggatttcaggcacccgccaccatgcctggctaatttttgtatttttagtagagacaggggtttcaccatgttggccaggctggtctcgaactcctgacctcaagtgatccacccgccttggcctcctaaagtgctgggattacaggcgtgagccgctgtgcctggcccttatttacatgattcttatattcttggaatattgtgatactcagtttgaaccttgtaaaaacactttatatgtaacatggagttagagtctaggctgtcttcatgttatatacagatagattattcacctttattaaggtgtggcaggactgcccagctcatggctgtctgtgtggcactccaggcctctgcccagtaataacttccatacattgtgacagtgagaaacacccctggaaatttccaaaaccctccctaggtggcagtaccagctccactgagttacacggatggatccttctggagcagaaggattttcatctctcttccttgaagaacatgttgttatattgctggagggcatttgatttttgacacattccagaattatgtttaatactactggtttgcctgattcccacttaatttctgaatcagaatggacctggtctgtctccctgcctggctggggaagtggcctgagttcattgccagggtagccagaacttgtgtgcagagagggcaccagcaagaaggtttgtgacctcttagcccaatgccaccctgcaggcaaccttatcataacccttgttctttagagagtgtgtaggatcttggaagccctgagcagaattatcaatggggttattcatacagatgcctccatcgtacagataaggaaactgagacccagagagggaaagagacttggctgagtcacatagcaagtcagacactaattgggccttgagttgaagtcagtaccaacaaataacctaatcttaggggttggaaaggacctgagagaccatccaggccactcccccgccgagtgaatcccctccgcacccggacagatgatcaggctccagcctgtacttgatcatcttcagaaacgggcaatttactatttctcaaggtactttgtcacatgacaggactgctcttttaaaatattcctgagttgacacgtttctccctgtgtctcatcctcctttctgtcctctctgggagcagttaggccctcttgatcccagggacatgggtgttacctatagcccctatgagaaccctttagaaatgccaaaattgtatccatgtctcctgggctttcttcagtctctggcattgtacttggcactgagagtattgtgctgaaccaagctgatgtggttcttgtctttgtggagcttttattacagtaggaaggcaaagactactcaagtgtgagcaggtacactgaggctcactgccccatggcctccgccaacgtggtgtcatggaaagacttgggccctggggctggccagactgcatttgattccatccacggtgacatatgtggccttgcagtactgctttcagtctatcaaactcaaataatcgctatctcataagggcgttggaaagatgaacgagagagtattaataagaatgctgtattgggaggctgaggtgggtggatcacctgaggtcaggagtttgagaccagcctgaccaacatggtgaaacactgtctctgctaaaaaaaaatacaaaattagctgggcatggtggtgcatgcctgtaattccagctacttgggaggctgaggcaggagaagtgcttgaacctgggaggtgtaggttgcagtgaacagagatcgcaccattgcactccagcctgggcaataagagtgaaacccagtctcaaaaaaaaaaaaatgctgtaaagcattcagcatcctgatgctcaatgcatattagtttctttctctttctctttccttcccccagtctgacatgtttggagcatcttccagaaagggcttcaagctcaggacaaaatgatttatcagaggaaaatcagccagatttatctctgctgctcttgaatttcaccctttggttagataaccatgaggtactttttatttttattttattatttttttttgagatggagtctcactctgtcatccaggctggagtgtaatggcgtggtctcggctcactgcaacctccgcctcctgggttcaagcagttctcccacctcagcctcctgagtagctgggactacaggtgcgtgccaccacacccagccactttttgtatttttgtatttttagtagagacggggtttcactatgttggtcaggagtctcaaactcctgacctcatgatccacccacctcggcctcccaaagtgctgggattttacaggcatgagccaccatgcctggccgagacactttaaacatcatacaggcaaaacataaagaaggaatgtatgcagctgggtgcggtggctcatgcctgtaatcccagcgctttgggaggctgaggcgggtggatcacgaggtcaggagttcgagaccagcctgaccaacatagagaaaccctgtctctactaaaaatacaagaaaattagctgggtgtggtggcaggtgcctgtaatctcagttgctcaggaggctgaggaaggagaatcgcttgaacctgggaggcagaggttgcagtgagccgagattgcaccactgcactatagcctaggcgacaatgcgagactccatctcaaaaaaaaaaaaaaaaaaaggaacgtatgcatatttcgattaaagttgaaggcaaaaaagtaaatggtctcacagattaattgctaaaatgttataatatatattgactaacgtcaccattgactaacatcaccatatcaccatatcttatatatgacattataatcagtccacattattaatctgaatatgtatgagtgcctattgatgtcccccaagtacattataattttaaaagcattccctgaccatgcaagtctgggaagtgctggaccggagaggttttatgatcatctctctttgacagatgaagatattgatgctattgagtaacacataccttgctatttcttatacatatttcttctgtggctgtttagctcatggtattctatcttgacatcctgaaatagctgtcctgttgagactgtggcatagctgttctgtctttgtgggtcataggtgaggttttcctaagctgggtggactttccaatgtccggtgggttggcagggaggctcgacacgctggggatctcttttttttttttttttttttgagacagagtctcactctgttgccaggctggagtgcagtggtgtgctctcggctcactgcaacctccacctcccaggttcaagagattcttctgcctcagcctcccaagtagctgggactataggcatgcgccaccacgcccagctaatttttgtagttttagtagagacgggggtttcaccatgttggccaggatggtctcgatctcttgacctcgtgatccgcctgcctcagcctcccaaagtgctgggattacaggcatgagccaccgcacccagccactggagatctcttaaagctgagcctccagggaatctggatgttttcccaggggatgggaaaacattgcctctgccatctaagagcaaactaaagagctttgtcatgctgagatgagagtatcctgtaaacacaattatcagtgcttttctctgtatttatttcccttctcctctccttgagtcattaataaaatctcagaagctatgtctatggctacaggggcctaaggaaagagttggagcccaggtgttgtccagagcattaaagggtatcaaaacttccctccctgtcctaagaccgttgtggtcgtggtagtggctagcgagatatccccaaagggaaagtaaatttggaagagcagtcggggcatctgtttccccaaagagaggctgccttcagtgtccctctctgatttattaaggaagcagagaggtttccttgcaaatgaacacccaggtgaagtgactggccagaggtcaggaagcaggtgccgggctaacatttcctgggagcccatgagagggggcttagcccaaggtcctgttttcccgtggccacctgatgccattgaaatgaaagttggggaaacaggcagtgttgatttaaggaaacgtggcttctgtagcagcctccagtggcacagtaggagttcctttgtagaactcagctcagcttggcttccaaccagcacactcatttagaacaccctggagttttagggtgatcaaaggcatgtacaagtaattccttacatgtcaacaccttcgtgcttctccttgaaatttaaaccagcagttgaaatccagaggcttgcagcagatcttgttctcactctcatggtgtaaatgatcaggctgagtgtcccgttcctgggcaggcatttggctgccctgaccaggctctctgagtggctgggtgggtgtttaaaactatcctcttggtgtgttggtttccagccagttctctttagaggtcagagctgttgcccagaagcaccagctctgcactgctgtctctgcccaccctgggcttgtgaacctgatccaagcacaggctgtgccgctgggactcagggcgagtgtccatcttggcgaccttgacccctgaagtaggcttagcttccctgtcccgcccccccttcccccttcatgattcccaccccctgcctcttggctcaccacctcctgtgtgatctgcaggtcacctggctttgctcagtctcagatccttatttgtaacattattaagaacagtgttgcagctgggtgcggtggctcacgcctggaagcctgtaatcccaacactttggaaggccaaggtgggtggatcacctgaggtcaggagttggagaccagcctgtccaacgtggggaaaccccgtctctactaaaaatacaaaaattggccaggtgtgttggtgcacgcctgtaatcccagctactcgggagcctgaggcaggagagtcacttgaacctcggaggccgcagttgcaatgagccgagatcacgccattgcactccagcctgggcgacgagtgagactccatgtcaagaaaacaaaaaccaaaaaacagtgttgcacacacatacacacaaacaaggtactgaagaacaaaacaaaacaaaacctgaaaaagaaaaaaaccaatatcagtagatttctcataacttagctgtggagattaagtgaaataactattgtaaggcaccttataggtgcccataaatggtagttgttactgttatgtattactgttaataacattttaaagtgtaaccagaaacgggtcctgatccagaccccaggagagggttcttgtatctcgtgcaagaaagaattcagggcaagtccataaagtaaagtggatgcaagtttattaagaaagtagacaaataaaagaatggcttctccatacaacagccccgagggcagctggttgcccattttatggttcttgatgacatgctaaacaaagggtggattattcatgcctccatttttagaccatatagtgtaacttcctgacgttgccatgccatttgtaaactgtcatggcgctggtgggagtgtagcagtgaggatgaccagaggtcactcttgttgccatcttggttttggtgggtttcagctggcttcttgacagcaagctgttttatcagcaaggtctttttttttttttttttttttttttttgcgacggagtctcactctgtcacccaggctggagtgcagtggtgagatctcggctcactgcaagctccgcctactgggttcacaccattctcctgcctcagcctccagagtagctgggactacaggtgcccgccaccacatctggctaatatttttgtatttttagtagagatggggtttcaccgtgttaggcaggatggtcttcatctcctgacctcgtgatccgcctgcctcggcctctcaaagtcctgggattacaggcgtgagccactgcacccagccatcaccaaggtctttatgacctgtatattgtgctgacctcctgtctcatcctgtgacttagaatgccttcaccttctgcgaatgcagcacagtaggttttagcctcattctacccagatcctatttaagatggagtggctctggttcaaacacctctaataaaagtattaagatgtattaatactctaagtaatgtatttagggctgtgagcattcttctaggaactgatatgtggacctgaagatgatatgatttagcagaaaaagtgtggcctttggaaatttgaacacacacccatgttcagatcctggctccccagggtataaaatgtgtgattggggaaataaattaccctgtaaatctcagtttccttgcctgtgatgggggctggtgggtaataataatagtatgaggttgaatcacatgcaaatgtgtgcacgcgcacgtgtgtgggtgtgtgtgtagctgggtttggcttataaaaatgacagtttgatgtggctcaccctttaatgcctatctcacagggttgcttattagaatggaaactaatgtatgggaagtgcccagcacagagcttgtactgcagtcaggtcacctaggaagctattgcagcaattcaggtgagaaatgctgagacgattcagggactgtaaggtgtgttcagatggagaaatgtcaatttgatgactgggtgggggtgagtgatgtgggagaaggtgatctcagatctctggcttggggacatggatggatggtggtaatgtttactgttagagggaacacaggaggggtagatttgagagaaaagacaatgagcttagttttggacgtgtcatatttgacatatctcattgtatgagtctggagcccaagagaggtacgctccagagatagagagtggggagttatctgcttttggggcatactttaactgaagtccaggaagtggttggcatcacccaggattagcgtttgaagaaatgtcacctgtgatcctggatagaacatgacagcattgaaccaaatgagacagaggtgggttcccataagcatttactgagtccgcctccattaaggctcttccagtgatagctggggatgtagtgggcaagagaatcgagggatgagggaaatactgcccctgtcttcaaggagttagcagtgtagttaactctgccacttttttgtaggatcttggaatatggggagaaacctctagttacaaagcctaaaaatgaaaattctgggtcgggtacagtggctcatgcccataatctcagcactttgggaggctggggcaggaggactgcttgagctcaggagttcgagactagcctgggcaacatagcaagacaataaacaaacaaacaaatgaataagtgaatgaaaatgctattgcctgtcttgtaggattagatctcatgtatacatattgacgtgcctagtgcactgcctggcactgatcaatactgcaattgctcaatactgcaattgagcaatactgctagtttagcgaaaagagcactgggagggagggcaccttgtttgagtgttgcaaaataagacattgatattcttgcattaaaaaaaaaaaagtttaggctgggtgcggtgcctcacacctgtaatcccagcactttgggaggtcgaggcgggtggatcacttgaggtcaggagtttgagaccagcctgaccaacgtagtgaaactccgtctctactgaaatacaaaaattagccgaatgtggtggcgggtgcctgtaatcccagctactcgggaggctgaggcacgagaatcgcttgaacccaggaggcggaggttgcagtgagccgagatcacgccattgcactccagcctgggtgacagagcaagactttgtctcaaaaaaacaaaacaaacaaacaaaacaaaatgaaaaaaaccctaagcgacttaatgtgtaaattatggcaggactgcaagggacataggactgtggtgtggggaaggaggaaaagctgggcccagtgatctgaagcgcctgtgactataaccagtcgtatacattcggaagtgagctgaagattatgtagccagttcattagcaggaaatcctcactattggaaaaacaattttagctgcaaggggagcttactcagcagtggagtgttatgttccaggcaggctcagctgtgatgtcttctgggctctcagtaggagacctgggggaggagaatgaggctgtgggccagggagacgaggcaggctgtgggctggactctgatggggtggcccccaggagttgggaaatgagaggctgacacccaggcagacccaggaaacagccgagtctcaggagacgggtcccagccacccatgggcgagcactggaggataggataggataggcaggagctgagactccctccaagtaggttggaatgagcctcacctgggaatctgatcacttaggaggatgatcaggaaaccaaggcagcctaatacaaattaaatgaaatgctaaaaatagtaccataagagggagtaagtagcttggccaaggtcctacagctaggaagtggctgagctgagatctgaacccaggtctgcctgactccgaagcccacgccctctctgcagctgctgcttgcagacacccagtatgtggactcggaggaggtaaagggaagctgcagtctgagggcccccacgtgcgcctgtgtcacccagggtccttaggaagctaggctttaggccaagcaagctgggcttagaacccacatggtaggggaattaggtggggctggacagaggctggctgggactgcactgtggggaaggagtggggaggccaggcagggctgactcgccaggctgtgttctcactcccctcagctccagcagttaggggcagggtgtgagaagggacctgagaggaaaatggagagtctcacggtacgactgggcccttcctatcaaacaggtttcagtgtcccgggcgtgttctagagaggcttttttgttgctcactaatgatgggtagattatggctcacagaaggctgctgttctccaaaagcagggtccattaagttgcattggcagcaggctggcattggggtaaagcatgtggagaggctcttccttgcccctcaagttttctgagcagaagcaccagctgccttgagcagccgtgtgatgctgtgtccacctccacagtgaacttgagaacatcttcaaagaaagggcagcgtggcccagaactgacgctttacttccgccttctagctagatgactgtagatttctcactggactctctgggcctcaatttcctcattctccatagagtggagagttggcaattacataaagtaatatctttgcagagcatcaaaatttataatagcagcaaacaaatgtgttcagaacgagaatgaaagagagtacttattccaaggtttcttctgaaagatttcttcagatccctgaattaattatggtagaaagagcttagggttggatatcagaagatttaatgtattatttaggttggtgcaaaagtaattgtggttttcacatactttccctaatagttctggttctgctactagctgtgtggccttgggcaagtctccttgccccttggcctcagtttctttgtttataaagtgtgtacgtgtgcatgtgtgtgcatgtgctcgcatgtgtgtactctatacatgtgtgtgcatgtgtgtgtgtgtctgtgtgtgtgtgtagtgatgattccttcctggacctcaaagggctggtcatgaagatatggggaagctcaatatggagaaggactttgggaaggaaaagatgtctgtatagagggttgcaggccagttctcagagggaacttcccaagggaccatagatgatgggcaggagctttacaggcaaagaaagggcaggaggtcggtggaggtccagggaaagccggtgtaaaggcatagaggtgagagaggacaggagggaagggcaggaagtgagactgccagggtgcattggtgctggctgccaaggaagggaggaccatccaggccactcgaggagtgcatgcagggggtcagccccaaatcctcaggggtaatcgatgccactgccccagtaaactcaggatactcatcagtgataagccgaacagggtgctttctttgctgcttagattttcttaactggaactcttcaaaagccagggagtgctgaaaatgtttgcctgcacagtggcaggcactacttctcacgggcccgtggttcccgcgctcaccacggagcttgagaggtctgttcggatacctgtgctccagttcgaggtatgcgccatctgagtttagagtctgagtctcatccctgtcggacagcagctcttattctttccaagcttgggagagttgttgtatcagaattaatcatctgtaggagatatcggacaacctggcctggttccgatgaacagtagagggcttgcgggatattataaagtcctaaattagctctgtctggagtcgtgcaaataatactcattagatgaagtgaattcctcctctccttgtccccactttccttcaatgagacctgctcctctccctgtagtccctaaatctgttaatggtaacatcacccctcccaaaattgctgaagtcccaaaccgtgagctcacccatgaccctttcctctctcgcctttcacatctgtccagtcaccaggtgccctgattctacctcttctctcagctccctatttcaaccgcattgtccctgccccagctcaggcctttggacctttgatagcctcgggaccttcctacacctggtttcattccttccaaactatcttcctcctgggtgccctggtgatgcgtggatgcatgtccctcgccagttgaaactccatccttcgcctgcagatcgagtataaatacaaggtgtttggggtctgttctgcccgttccagcctctggctcccaggtgccctcttcttcctctctatcctgtctctggataatctggcccattgcgagggccttggccatccttgggggcctgacgaccccagatctctctcccaagctccagacacatttcccagggaccacaaacctctctaggtgcgtgccctccagggtcctctgtgcagctcatcatcttcccactgcctcccctctgcctttcctcattcccttatattccctgtgactacctagacatagggggattatcctttatgttcctgtctctctctcccagtcatccagttttgttgattttagctccaaaatatttcccaaacctctgtccttccctctgactccactgcagcctcagtttggacttttcctgtctgccccagaccatccaaccacttgggtaaattttctatgtgacagcctgaggcatcatcccataatacacatctaattaagttgctttcttctcaaaacctttcagggagtccccatcattttaggacattgctcaaactctaaaccaacattcaagggccttccctatgagactcttacttcctagctaggcctgatcttcctccatccccttctcatacatctctcattcattctggcatgggctctggaatctgcctgcctgggttcaaatcctgcctttgtgacctattggctgtgtaatctttgacaaattacttgacatctctgggcctccctctccctatctgtaaaataggattgttgtgaggattaagtgagataatacctccaaagtgcttagaacagtgcctgacccataataagtgctcagtaagcgtgtgctaatgttattattattattcgtggtggtggtattatctggcccctgccaatctcactagtgggatttccatgtgcataccccctccacctcttatgttctccagccatcggaactatctacagtttcccagaagtgtcctgcccgctcctgccttcataaccccccaccgaagcagcacatcatctgcccaggtccttcctttctgccccactgctctgtctcccactctgccccaacaggccattcttgccctttccatctggccctaggtgacctcactgcagactgccttccatcttaagtggactcagaaattgccctgaacattgaggtaggaatttgccctgggtaccaggctcatatccctgaggctggcaggggctggccctgcctcctgtctggcatgcactgtgtgacactgattttgtctaccagaggcttgtttttgcctgagatctgtagcgtgtacctgtgacatcaaaggtctgagttgctaagattggatgcaaatccacctgagtgacaaaggactgccctaactggttttgacttccccagtattgcagacacagtatttcttcagaaattggcctcttacctgcccctcattgctaataatgttttgtggcttgatattctagttgctgaatttctccctccaaacattttagcttgcttcctccaaatgccctgctgatttcctcaaatgcatcataaatctcagacccaaatctcctcctcttatagatcatcccaatgtgctgatcccaacagcacagcaggaactctccgacgtgatgaatgccacttgtgtgtttgtaacgcagccttcgactgtggtgatatcaagataaatcatggttcagcatttgctcgctggcggaagccagggaccttagtctgacccctttattttataggtgactacaacaaagcccagaaagttaggtgactttctcgaggtcacacagtcagaaacaattgggactaaaatccagattttctgtttttcactatagtactatctctaacttaccaaaagctatgacttaaaaaaattaaaaattaatcttaaaattttggtaaaatatacatgacaagatttaccagattaaccatttttaaatgtacattgtatgtatgttaagtgtacagtggcattaagtacattcacatttttgtacaactatcatccatgtccagaacttattttatcttgcaaaactgaaactctgtacccaataatcattaattctccattccctcccaccccagccctggaaaacaccattgtaatttctgtctctatgaatttgactgctctaggtacctcatataagtgcattcttacttacagtatttgtctttttgggtctagtttatttcacttagcatagtatcctcaggatgcatccattttgtgccatgtgtgagaatttctttccttcttaaggctgaataatatttcatttgtagtggtgtttctttaagaccattttaatgtcttagtagagtatcttactgctcagtagtgttggaattttgaacggggtgactttcccagtagcggtttctaaatgtccactagggggcagtaaaagccacataaagttttcagtaggcccgcggagtgccaggcaattaggccaccacctcctctgtgtatctctttcagccatccgtgtataccgttacaaggtaatggatttcaggtccaacagcaggtttggataaaactagagataccatcagttgtagcataagcgcgagtcttcctcacactccagctaacaccagtgcagaatacttcattcaatatgttggtttcagatggtatttttatttaattcacttagtccagtgattctcagacagagtgctcatcagaatcacctgcggtgatttttccagaatacacatgcccaggtctcatctcagatcgattaaatcagaattgctgaggctggggcccaggaatatcgatgatattttcattctggtccatgacttctttttaagagccaacgtgttactttttaactttaataactgctgggaaagggtcattcttgaataaacctcagaggagagtgaatatgaattctgaaaaatgtttctctttttagggtagtagtggcggaagggtctggtggctatgggaaccacgttctgaacaattgtgagggtttcctgtaaatcacacctgcgctttaacaagcaaggaacccagacagaagatttgaaactggggcagtctggccaactcaggatctacagatatagttcctggatggccatactcagggccaaaatctttagggtgaggccagagtacagacctcagtgctgtctgatacattaggaggatctttcctacagtaagcggaggaacaagagatcttcagttttatcttagaggcaaaaatggcaccgcaaacttgaggtggggtcgggagacctcagttctcatcctgaccatactgccagccagttgtgggacccaagggaagtcacgtcacctctctgagcctccgtttcccccttgacttttgagagtactgggtgatgatgatccctgaggattcttctagttctaaaaattcaatgattctatgagtattaataatcttgatttgtatggcactattctggcaaagagcagaagtattcaggaatccaatgagtgacggagactattgaccaggtagtttaatttatttaaggcatatacatggaattcaaaggagaaaatattgctctggataatatattgaactgttagtgtcttcggcatagcaaaagctttccagagggaaaaatttcccatcagtgcaaacttgacatttttcacttcctggtccataactgccatttgtccagcacacttatatttactgtaaagggccaagtgtacgaatgctttggttgaatattaaataactacataaacgtcaaggtcacagttgcaagaaagcctcagtggaaggccctgggaggcttgcattgatctcttgtgaagttccattctcggatcctgctgacaaggggaaacaattgatgtggaccattattaaggctttaagtgtttctccattgttaaagatcttttacaagcccagaataagtgatagtgcccaaggaattggcaaaagctttatttagaaatataggctggtcaaagagataagcgcaaggcacaagccagagtgcagatgtcctggcttgggcttacacagcaaaggtggagagctgagaggagtctgtcactggggcacccaccaactcagcctgccaggcactgctgtcagatttcagaggggaactttcacaccagaagctgcagagagcatggatccctctttcaaatccacccttacatttcctccagcttctctctgcttgtgaaaacctcctctcctgccatttcagtccatccgctctccatagctgcaggaagcacctcaccagcatcaggggcaatggggcgaggatgaattatgcagacccacaggtccagatcgactatctggactggtcaagtgcctggatagttaattatgtgagtgttctgctgacctggagctgggaggagagcaaatactgtggacgacgggatcttgtttcaaaaagatctcaacagatggaaggattggtcaggtctaccagatgaactttagaagggatgtaaacataaaacaaacatttcctgtgcactagctcagctctgtgtttggtgttgcgcttggccctttgtacgttttagtttatttcatccttacaacgacacagtgagggtaggtgtctatatccccatttttaaagtgaggaaaccaagacatggtaggatagaggaaggtccaagggcttcagtcatcaatctagattccaatcccaattctgcccccgcgttagctggcaagtcacttcatcttctaaaaagagtgacagccaggctttggattgtcttttatttctcaggttctaggtccttagcctcttgcatttatgattgcatttaatcctcaaaacaacctttctcctatttcacagatggaaagggtgtagataacttaagtcacttgtccaaggctgcagggtaaggagcagggccagtgtctgagcccaggccatctgactccaacacccatgccctcagcaactgctgtaccctctctgttcctgacataaaaagacacaaccatattttctgtgagggttagatgagctaattaggtaagtgcctgatatagtgcctggcatttcacaggcgctcataaatgatattagctcaccatcattatcattctcagcactattattagttatatgacctgttcaaagtggtagctaataactggcgaaacaggatttgaacccaggtcttgtgactgccagtccactacactctccacctcgctctggagcacaagactggggacagtcctgatgtcaccatctcagtaccttgtgcagtgtcatctccatggaagatgctcagcccctgctcagatcggcagggatcatcttgtcactcattcaccacacatttgctaaggccttgctctgtgttagggatccagagggaaaacaatataatgtcggccatccttttttccccctccaggttcaaatggtgaaagacgatgacccctcctggaagcccacttttatcgtgaaacctgatggtggttgtcagggtgatggaatctacctcattaaagaccccagtgacatccgcctggcagggaccctccagagcaggccagcggtggtccaggagtacatctgcaaacctctccttatcgacaagctcaagtttgatattcgtctgtatgtcttactcaagtccttagaccccttagagatttatatagccaaagacggactctctaggttttgtaccgagccatatcaggagcccacccccaaaaacctgcaccgcatctttatgcacttaaccaactattcactgaacatccacagcggcaacttcatccactcggacagtgctagcactggcagcaaaaggactttttccagcatcctttgtagactgtcttccaaaggcgttgacatcaagaaggtctggtctgacatcatctccgtggtgattaagacggtcatcgcgctgactccagagctcaaagtcttctaccagtcagacatccccacggggaggccgggccccacgtgcttccaggtaaccattgccagttcccagcctgcgtttccagccttgaccggcctcaagagggctctctggcttcgtgtaggatgagtgatcggggtgggatggccagaggaggggacagtgttggtggtgctgtgggcttgggtgttaaacctgggcccaacttccaagctttctgtttgctccctgtgtgatttggggcaagctacttcccctctgttacctgtaaaatgaaatgaagaatacctatcttaaaaggttcttgtaagaattaaatgagataacacatgtaaagcagagttttacattcattcgtttactcattcattcattcacttactcattcaacaacctttgccacatgcttagtagcggtcagacattgtcctgggttctattgagacagcaagtcagggccttgcttgctgatgcatagagtctgttgtgagagacatataatttaaaaagcaatgattatggagggttttaaatgctagagtagaataagaaacgtctgaggtgctgagatcgtggggccacgtaacattctctgggcgggagtggcgtggtcagggaaggcttcccagaagaaatagcagttgaactgaaacctggagcgagagttagatgaagcaggagaaactgggtaggggtaggggaggcaaagggttccaggtggaaatgtgctgaagccagaggggtgagtgggaagcaggaggcactggaagaggttgagtatggttgctgggtggggtttaaggcagagatgcgggggagatgagggaaggtgaggtgggagagaaaggtaggggctgtgtcgagagcctgggtattggttcgggggggtggtccctggagaattttaagcaggggaaagatgcattccaatttgtatgtttcaaagaacagtgtctacagagtagagaacacactgagacaaggctggaagtggggaggtccctaggagacagttgctttcacataagctggagaggatggtggtatggactgggaaggttgtggtgaaggtaggggggatagacagatctgggtgccagggaaggagcaagaagggctcagcttggtgactggatgaggctggagagagaggagagatggtggcagtgagggcagggagaacctgaggctgatgtgcaggtggcttgggtacttgcatggatggaggccccggaagaggaccaggctgttgggggaaggttgggagttggacttaaagtgcctatgtgacatccaagtggagagattaaggggacaattggctatttggagcttggagttcaggagacagaggcctgggttggggacagagatgagaactcatcagcaaatggtgaccaaagagggtgacgagaagactgagaagacacctgtgggaatcacatttcactaagggaaaggcaggggagggggagggagccaggaaaggaggccaagaagcagtgtcttgagatagaataaatatcaggagagaaggagccggaatggcaaggatgaggtgcctggggaagcagacagggtcagcgcttcaaatgctgctgagacgccgggcaagaccagcactgaaactgtcctctccactcgtaaggagttgactggagacttcagtgagaattgtcttcagcagagcgatggagccagggccagagtctggtggactcagccagagtgtgggagggaagggaatgaggctggaacattcttacaggccattcagctgtgacagtgcagggtggggagacgtggtgtccagacactccataggtacacactttcctgcccccagatcaatcagtgtgggtaggaggagagaagaaggggtacctctgggaccctctccatctaatccttaaagtcattttgtagcatttgatatatatgaaaaaagaatacatggaacatacttgtaagccatgaagccaaacaacaaaatgattatctcaaaccttcctcccaacccaagatctccaactagtgtgtttctgccccaaaccatgtccctgcccagccctggggtagacattaccctgaattttatgttgattatttccttgcttttgaaaatacttttattaggcatgaatgtatccctaaacaatatattgttttgttttgcttgtttttgagttttataaaaatgctattataaagtatggcgtcttctgcaacattcttttccactacacataaggtttccaaggtccacccatgctggtgggggtcgtgggtactgcctcatttgcactgttatagattccattgtgaatatgcacaatttattatcagttcttctgtcaaggaacatttgggttatttccagtctatggcaagcaggtgacaggtctcttgggacaagaagtgagaacggagggagtggggcagtgtctctagtggatggggcattcattcaacagcagaagaggaggctggtcccaaagtgcagcctcaaacccagagaggacaccccaggggctaggcgccagccagcaggatttccaggcaggctggcggcaccttttggagggctattcaggccatgatcagtaccaggaaggggtaattgccacccagaaatctgtcctgagaaactggacccctggcctttggttcccagggaggatgcacagctcagccatcaggtaggtggcttaaaacattagaaaggagaaaagggaagaacttagaggtagggccagagaaaacaagtcctgacgtaagccatcaaaaagctagggtcaaggagataagttgcaacgtggacacgtccaggggtcatcccgggggaccatgtggtcagatctgtttgacaatgacagctattctaggactatcatgtgggcccggcatgcagagccaagccacagagccctggcttggaccgagtggcagggtggagggccaggctggttgttttgctgcatgtcttgctatggacaggccacatggggcagccatcagtggggcccaagctgtggggagctggtggagggggcagacagggagggagccactggtttggacagatcatgtctgcaagtggaaccacagtcttgggactgtttcccactgcttgaccacactaaatgcttccaggcctgggccagaggaggagcatggggggagatgccaggatcaaggaagcgcttttcctcttcccagctgtgcgaacttgggcatgtttcttcaccactctgagcctctgcttctttctctgtaaatcacctacgctcacttccctgcctgccttttattgtgaagtaatgtgggtgacaacactttgacagggtataaggtgttagatatttggaatttgtcttaccatacatttcagattcccagtcattaagggagaaaatggtatccttgggccgggcgcggtggctcacgcctgtaatcccagcactttgggaggccgaggcaggcggatcacgaggtcaggagatcgagtccatcctggctaacatggtgaaaccccatctttactaaaaaaaattacaaaaaattagccgggtgttgaggcaggcacctgtagtcccagctacttgggaggctgaggcaggagaatggtgtgaacccgggaggcggagcttgcagtgagccgagatcgcgccactgcactccagcctgggtgacagagcgagactcagtctcaaaaaaaaaaaaaaaaaaaaagaaaagaaaatggtatccttttctccttggagccctctcttactttattcttatcacttgtaagaacacttttgagtttgggtctcacatacctgagctgacttggaacctagagattaagggacccggttaggttctgccattgacttgctgtgtattcttgtataagtcacttaacttctctgtgcctcatcttccttgcctacctcacagggttgttgtcaaattccaatgagataaagattgtgaatggcttttcaagctgtaatgttccgtgcagatagaacacatgacttctttgccacacagcccctctcgcttgttgcctgggcttgactcagattgcagcattccagaacataaactctagccaaagaaattacatttatcttaaacatgtgacggtgacccctttccaatcatagccacaataactacttgggaaattgtgatggcacagagcagttgcaggcactgctcaggctgtgggcaggtttcctgtaatctgctgctgaggaacgtggcttccctgtcattccagcctgtcccctgtcattgcctaggtagctcccagcaacatatcctcatgtcagccttcttgagggtaccagtgtgactctgacttatacagcaaggcctgtctcagtgtagatgaatcatatggcagaaataacacatgcagaggaaaggcttccagctcagctttcaagaacgttctttcccagttccattgcttggtctgtatcttcttctagctccctgtatctaattatctccttggccatgatccttttgcttagatgcctgaaggagatgctgttcctaaatcctaagatgtttctcctctttattctttgtttttttgacctcctccttacccttcagccagtcaccccaagggaagaaggccaaggagcaatgcagtgagtggtcaagtgcttggatttggttcttagacggcctgggtttgggctaaccctggcacctctagctggtctgcttggcaagttaacaattcttagtctcagcttccttatctgcagttagagaccatatttgtacctccctctcagaattattgtaagcacaaataagagcaaactaggaagaatatttagcacagcacctaacacataggaatcacttaataaatgacagtttttatgtttattccattgtttgttatctgtaaccacaacagctctcaaatttgtctatgatgaagtgccttaaagttgtaagaaaccatgaaatattcacattttaaacctaacaggaacacaagtgttccaaggagtatagtttgaaaaccatctccttagcctggcatttgtcacccctgaccccaaccccagtctagcttccctgtaccctccctgagctctgcagtcttgaaaaacagatccaattgctgtcttggacataatttgtgctttcccattgctgccctttgattctcttctgtctcggctgacctggcatgctctctctcattcttgctgtttcttgaacttcaacgccttctaaggtgctattcaagccccacctcctagataaaccctttctccagaaacaacttctgatatttcagctttttcttcctttggactctaacacattccctgggcacccactaagacaagccctgagctagtatgggcatgtggttatggataagacaaggtccctgctctgagggggcacacagtgtaatggggagagctgactcatgagaactccagtcccttgtaagaaagaaatgctatgagagggtccatgtgggatgctgggagagcccagaaaagggagtcgctaactttgcctaaccctgtcagggaaggcttcccagaggaggagatgcttaagctggagcgtaaagcatgaagaagggtttgccaagcagaatatgatagaaggatacactccagtttccctcctacctccctggctgctgcttctcagcctcttcttctggacctgtcagtgttggagagtctcaggcctccatccttggaaaggtgtccccctattcacaatcactcctaaatgatcccgcgtagcccccatggccttaagcaccagctctacgctactggcgcctatagctgtatttccagtcctgacctttccttgagctccagattggtatatcccagtgcccactttaattttctacttggatagttaatagccatcaaacactgaacacgtccaaagtcaagctcttgacttccttcccaaacctactctctatcgtctttactgtttcagtaaacaaatggcattcagtcagtcactcagaccaacagcctgagacatccttcttttttctgtttccctccttcatacatccaatccataagcaactcttgcaaatatcctttaaaatattcccaaatgtaaccgcttctaaccaactccactgttgccatcccagtctaggcagccatcacctcgcacttgaatggctgccatagccacccttactgcctatagcctatttttctcactgtagccaaggagatgctttaaaacacaaggtggatccagttactttcctcactgaaaccctccaatggctttttcattgcacttacaatcctggctccttctcatggtctacaagatgcagcgccatctgccccttgtctatctgacctcatcttccgccactctccgtttcgctcactctttgctattctttggaagaggcctttgttcttgctgttccctctccctggaatgctcttccccagctattcaaacatgacttattcttttttttttttttttttgagttggagtttcactcttgttgacccaggctggagtgcaatggcactcactcactgcaacctctgcctcctgggttcaagcgattctcctgccccagcctcccaagtagctggattacagctacccgccaccacgcccagagaatttttaaaaaatatttttagtagagacagggtttcaccatgttggtgaggctggtcttgaactcctgacctcaggtgatccacccgcctcggcctcccaaagtgctgggattacaggtgtgagccaccatgcccagcccaaaaatgacttattctctcactttatttagcccctgtccatatgtcacctccctgagacttttgcttctggtgatgagggagtaacaataacctccttctgcaaacaactagactaccagaaatatatatgagtgtgtacatgaaagaaacattttcagactttggaccacagatagctcagcactgtgatctctgagaaaaaggggaaaaaacaaggtgagtcttatggttgcctcagcttttcatctgggggcaatttttggaatatggacacagaggaggtaaacctaaacagcatccagtgacctcattgagttgaggagttgaagattgaagtttgggaaggctaaggtagctggaatttgtggggcagaattacagaaaggaaggagctaagcaggaaaagagctccagaaagctgagtgagatctcagtgggtctctgctgagtcctaggccatgcatatatggagggttaatccacaaagctggacaaagaataactgggggactgataagctaaaccatttccagggctcacacagggcacggaggcatttgagccccgaacagagtgaagagtctttggtgatggctgggagcatgcaatggagtctccaaagaagttctgccttaacagcgagggttaaattctccctgggatgaaggttactctagacccatgctattcaccttaagcaaaaggctttgaaggcatcaggctgatttgcaaataactgactgccaaaacaaagcccagcactttaaaagaaagacaaagtccagacactcagcattgaaatatcgcaacgtccagcattcaattataaaaaatctctaaacattccacaaaataggaaaaggtaacctttaccaatggggaaatcatttcagagaaacagatccaaaaatatcagaaatgatgaaactagcaggaaaaggatactaaaacagctattataactatatacacaaattttaaggaacatatgagcttagtgaagagagaaatggaaactagtgaaaagagccaaatgaaacttctataacagaaaatataatctctgagatgaaaatatcactggatgtgattaacagcaaattagacactgaagaagaaatcatcagtgaacttgaagacgtagcaatagaatgtgtccaaaattaagtagagaaaaatgacaaggaaaaaaaagaacagaccctcagtggactatggtccaatatcaggtggtctaacatatgtgtaattgaagtcccagggcagaagagagagggaatatttaaaaaaaaaaaaacttttgaagaaataatggccaaaattttccaaatttgaaaaaaaactataaacccacaatctaagaagctcaagacattccaagtaaaatacacacacatgcacagacacacacactccccccagattataatcacactattggaaaaccagtgatgatcagaaaatcttaaaagcagtcagaaagaaaagatacactatgttcagaagaacaaagaataaccacaatgttctcatcagaaactgttctggccagagacaatagaatgacaagtgtctcctctttagaaaggcctcccttttttatggctgcatagtattccatggcgtatatgtgccacattttcttaatccagtctatcattgatggacatttgtgttggttccaagtctttgctattgtgaatagtgccacaataaacatacatgtgcatgtgtctttatagcagcatgatttatcatcctttaggtatatacccagtaatgggatggttgggtcaaatggtagaactagacaagactcatactggtggacaggaggaatctgaggttcttacaagtatggtcaactagaaaaccacagaatctatctggagggctgcatgtgaggtgggtgggaaggtagctggttcaactgcagagctgctggatctaggttagtggagagctaataggaactgacattactataatcagagcttttggtgcttttcctacagttcacaaagtgctttcccttggtttacttgtttcagtccttactatgaaagaggtaaggcacgaggatatttccttattttatagtctggagatgggttactgcaatggtaaggtgtttcactcaagtatacctgtccagtgtttgtattagaactggaatccaaatctcattctctgaatttatctttttcaataaaaaacttattttgctgtgaaaaaaaatgaaaaaagaaaggcccccctggccctcctaggtagatcaccaaatgctctcctccacccactgtatcacactctgtgttcttaccttgctttcattattgacttgcttgtggtatctctcccatctaaaacataagctacaagggggtaggagttttgttttatcactgctttatgctcagtgccaagaacagtgcctggtatctagtagtgcccagtaaataattcacaaagtaagtaatgccttcaggcagaaaagtatgaaggcagagagcactaaagcatccttgaactactaatgtttcagcacaatgagagcccaagatgtgtagtaatagtaagtgggaggagataaagctggagtgttgacagatgtcaggccatagagcaatttgtaggacatgctgtgggacttgggcttcattttgtagacacggattttgggcaaaggattgttaatagtctatttgcactttagaaaaatggctctggcagccccttgtgtcagatgaattagaggagcaagtttgagagcagaggaaaagtgagaggtggcacagacttgtggagagtagaagcagaggggatgggccaggtctagaaagctttttaggcagtagagtgtgcaggtgttagtggccacctggttgtaagggatgaagggaaagttttgacttgtgtgattgggtggataaggaatacagaaaacaaaggagattttagaaaaatatggtgtatttgttatctattgctgtgtagcaaattaccccaaaccttaacagcttaaaacaacaaatacccactatctcgcagtatacatggatcaggaatttaggcttaactgactgcttctggctcaaagtctctctcaaggctgcagcccacatgttggccaggactgcagtcatctcagaacttgactggggaaagctcctcctccaagcccactcccatggctgttggcaggtctcaggtaccctctaactgttggctggagaaatcagttccttgccacctgggcctctccatgggacagctcatgacaatatggcaggtggcctccctccgagtgagtgagcaagagagtgagagaaagccccccaagatagaagccacggtctttttataacccaatattagaggtgacatttcatcatttctgccctattctatctgttagaaacaagttactaggtgaggtcacaccccagtgtgtgcgagggggcattacacaaaaggaatgaataccaggagttagggatcattgggaccatcttagaaacagttgaccacagagtgagtttggatacgctgaatttgtggactctaggacctcccagttggggatactgtggatgcagatggaagggtaggcgtggggctcaggaacgaaccactgctgttaggatgtagtttggaacctttgcataaatttataattaatggctcaggaatctccccaacttgatttgaagcttctagaggtcgggaatgaaggacagatatctttaaaccccccagggagcccctcaagtagaaggtgatcaacacataattgctgatttaattacttggggaggcagaatatcacatggttgaaaagctctccatttacaattcctgctccgttagagggacttggaaagaggctttccccatgctaagctgcacattccttgtctgcacaaagtgaattttcaataaataaataaataaataaagctttttccttgggaaccccagtttatcacataggtaaaaggtcaaatttgatctgatctggttggcctctcccttgggaccccagaaaagaaccccggtttgaaaaccactggaccaagtaaatacctgattttctgccagctgggacattctgtgattttatgacaagataactctacatatctcccagttctgtgattctgtttattaagatccattgatgctacatattttattggacttttgaaaagaaaatcatgcatatttccttgaacttgtgaaaaaatgtcataaagctggctctcattaagcactttctatgtatcaagcactgtgcaaaaaatgttatattgcattatctttatttgatcttttctcccctactggagtctaagacttgtttagttcactgttgtatttccagcagctagaatagttcttgggacatagaaagcattaaataaatattttctgggccggacgcggtggctcacgtctgtaatcccagaactttgggaggacaaggcaggcggatcacctgaggtcaggagttggagactagcctggccaagatggtgaaaccccgtctctactaaaaatacaaaaattagctgggcatgggggcacgtgtctgtaatcccagctgcttgggaggctgaggcagcagaatcacttgagcctgggaggcggaggttgcagtgagccgagatggtgccactgcactccagcctgggcaacaagagagaaactccgtctcaaaaaaaaaaaaaattaaattaaattaaaaataaatattttctgaatggatgaactaaggtaagtaagtaacattcatagttccattttatagatgaggaaatttgggcttagagctgctaagtaacttgcctgtagtcacacaagttaaaggcagaactaagatatgaaatgagcccctcttgactacaaagcacactaatgccatttctttttggtggaattggcaggaaactggaaagagatagcatatattgagtaccttctatatgatgagcataggcctaggtattgcttttcactgccattatcaacaaccctgacagatagctattgttatcctcatttttcagatgagatcattgaggctcagagtggctaagtaccttacctagagtcatgtagctagtgtaagggactgagctgggattggagcccaggtctttctaactccaaagcattcctatacaagacccagcatattcaaaaacatgcactcaagtttaggttctggaaaatttcatgccactggtgggtgtagacagggctgatgaggctttaacacccctgctccagctcccagcattcccaccttcacattcatgaaaccactgggcattgaactgggaagagtccaccaggctgagaaagtacaaaatataccaaaaagtaagagttgatgactaaggatgataaacgtcatcaccacagcctgctgctctctgtagcctcatcaacatcacatgtctcagaccaggtctggagttagactgatgatgtcaccagagtctctaaaaggcctcatcactcacatccacttgtcatgtattattaagcagatctataatccatgcaacattttctactgaatttccatttctttcttttcatgaccaaggaaagaaaaatagagtgaggatgacttttcccaacttttcatccttattgcccttcattgaaaaataacttcatcttgaatcagcccccaaaaatggtcattcaggctctaatttcattaataaggatggagctacagtttaataattatcatttaactaatgcgtattctatatagactagtaaatggatttccctcatctttcctccttgaatccacagagaaggggagtctacaaccctatctttttcttttttctctttattctccacattaattttttgagactttggggttctattaattatgttagaaattttctgcattatcacttctgtagccataatgagagtcctctggaaaatcgaaagtccttgtcgtctgaatcagaatctcattaggggcagcgatctcaaggatgagcaaaagttatccagatgaagagttgttctaggcagagagaacgagatgctcatgagtggctggccccagttgtaggagctgtaaggaatagaaagaaacccgagtgactggaagacaaagcttcacccaaggcagaatgctggatttaagagcaggcgtgaagcagacggtgttggagaactccacctgtgcaggggtgtcacacagggccctgcgcttagaagggctctgagcttggtttaactatgtgaaactgttcatcctttttgaacaaagggccctgcatttttatgttgtgtagtcagtcctgcttgggtgtgaaagccagctctgtcattgattaactagctaggcggtttctgggaaatccattggccttcctgagtttcagtttctgcttctgtaaagtggagcacataatcccttcttcaaatacgctgtcatgaggattcagtgagactatgaataatcagtgcattgtatagtaatgggtgcctagtaggtgcctaatcaatattcctgtcttcttaactaagagggtgtatctgaatcacctggggaatttgctttatttaaaatacattcacctgggttccgctctaagcacttctgactctgtagggatgtggtgggtttttttgtttgtttgtttgttttttgagacacagtctcattctgtcacctaggctggagtgcagtggcaccatcttggctcactgcaacctccacctcctgggttcaagcaattatcctgcttcagccttccatgtagctgggattacagattcgcgccacgacacccagctaatttttgtatttttagtagaaacgatgttttgccacattggccaggctggtctcaaactcctgacctcaggtgatctgcctgcctcggcctcccaaagtgctgggattacaggaatgagccaccaagcccagctgatgtggtggttttgaacggggtccttatatgacactgatgtatacctcaggtttgcaaaagcagccttaggttctcagagagctagctaagaagccacttagtaaacgagagcagaagaaaaggcagagggagaaattgatgggctactactcatcctcaacataataaaaaacctgttaaagaagaaagaggtcatcaacagcccttcagacgacaaagacagtgctgaaacgcactgtgggaactcatcccattatcaaggttcctgtaaaattttctgctgtccatttggtctgacaagtacccccagaggaagaggggctgtggacaagagaagccagggtcaaggccaaggttggggactgagtttgaatttattttcaacttaatgaccctaataccatactcaatagagacagtaattctgaattgtgtttatcctgcccagattttaggctttgacattcttctaatgaaaaatctgaagcctatactacttgaagtaaatgcaaatcccagtatgagaatcgaacatgagcacgaagtaagtattttgagcatctcattgactatgttgccatacagctgaatattcctaccctcatgttgctcacttaacaaaacaagattggacattctcagattttcatagccaaattctgttcaagtcaaataatttcagttttgttgagttctcaacatagactattaatacaaagcctatctgacctgtggtcacttcccagcatgctgtttttccagtgttgaaggtttggaaacttagaagcagctgagccttcccatcagttttgacatgaactaattagcctcaggagatgaactaattgaaattctatgagtatgatttagtcatgttgacatacttgaatcactaagataaataatacatttagcagtggttatatttttctccccctcccccaaaaaatgcatttaaaaaaactggaaggaaatacagcagatatcaatattgggtttagagaggattatatggattattttagttttcttaacccctttctatatttcttaattttttgcagtgagcatgtatcattttgataattagaaaaacatagtgctatttttcctcttcatgtatttggttaatttataaaaggaaatcgacattcttaaggtagtataaaggaagtctttaaaaattttcttctatagattagcataagcaaaatttactagtataacccctggagctagctggatagccacttggcacggaatcacggtctccactgtgacacagaatccttacccgttcaagctttctccaggggtgtttgaaaatgtccccagcctcgttgatgaagaagtgaaagtggctgtgatcagagacactctgcgcctcatggacccacttaagaagaaaagagagaatcagtaagtacttttttatgtcattcatttctatcaactctgcctcctaacccggcttcgtatcctaagcaggtaagttcttggaacctgttaccattgtgagtgagatttacatcttaaacaattctaataaaatatctttgttttataaatatcagcccccaagcaatcagtgactcaaatccggagtaatctgacaaataggcttccgttgatgaatttctgagtgttatcaaatctggaatgtctcttccttttttttattattattatactttaagttttagggtacatgtgcacaacgtgcaggtttgttacatatgtatacatgtgccatgttggtgtgctgcacccattaactcgtcatttaacattaggtatatctcctaatgctgtccttcccccctcccctgaccccacaacaggccccagtgtgtgatgttccccttcctgtgtccatattcaacattcttaaagaaaagaattttcaacccagaattccatacggaatatctcttctaagaagctgtctccctcaaggccaggcctcccacttgcccaccattgcacacatagtgcttctctttgaaatcctcaagcacaggaaaagtacaataaaatgcaggagaagagggccataggtaactaggacatggtaagagttgcttcctttttattttcttcatgtttacactcttgcagtataaacttttagtttcaaaattggcagggccaatttaatgacagttctatgatatttacaacacttgtaattctgcttcgtccccacccactcagtggtacattacattgcgctgttggtggatatatgtgcttcgccctccctccatgaaatcaccccagaaatgaatatttcacttgagtatgttgttttgtttttaccaaattccaggctctcacaaagtaggtgttgagtacatatcattgtgtcaatgtttcaggaagaaaaatcaaaggcatctcaaatagcacttctcatatccctagacgaatcagattgaccctaatgagcgcagacaaataaagcacttgtcagtaattgttcaagactgggaggaatgcagacttccccaagcaagtggtggtttgcaggttcctctaccaaggcttctcaccacctgggctcaagcccaaatatcaccctatggtagtgcttcttacgcttggctgcacgttagaaccctctgggcagctttcagaaaaccaatactagagtttccacttctagaggtgctgattttaattggcctgggtggaaggcctggccacagaaagtttctaggttccctaggtgattctgctgtgcagccaaggctgagtgccactgccctgcaggaaatattaccctgaagaagtattggtcatagtctgagtcaggctggatggcgccggcccggctgagttcttgtcaagagtgttcttgactgtgtgaggcacagattgccattgttggcaagactcggctgagaatgtttacctgtagtttgcatgggccaatcccaccaggtgtggcttcttccaccgatcagtgcttcaaagctgtcctctgagcagctcagacccgatggcagccaaataatgtgttcaccagtacgtatgtgtctgcagctgccttctttagccatcccaagggaaaagcaatggattaattgctatttggtcagaattactgcaataaaactcattcctcaaaaatctattctctaatagttattggtctcagcagcagatattaggttctgagaaatcgtatggtactgtaaggagatttgggtagccttttatgccagtatggcatggcagtacagttttcttaggatgactttgacacatcagcattctttttttttttttttctttttcatactttaagttctgggatacatgtgcagaacatataggtttgttacataggtatacacgtgccatggtgatttgctgcacccatcaacatgtcatctacattaggtatttctcctaatgctatccctcccctagtccccacccaccgacaggccccagtgtgtgatgttcccctccctgtgctcatgtgttctcattgttcaactcccacttatgagtaggaacgtgcagtgtttggttttctgtttttgtgttagtttgctaagaatgacggtttccagcttcattcaggtccctgcaaaggacatgaactcattcttttttatggctgcatagtattccatggtgtatatatgccacattttctttttttttttttttcccaaggcagaggaatttttcttagtgcagaacaaaatgaaaagtctcccatgtctacttctttctacacagacacggcaaccatccgatttctcaatcttttccccacctttcccacctttctattccacaaagccgccattgtcatcctggcccgttctcaatgagctgttgggcacacctcccagacggggtggtggccgggcagaggggctcctcacttcccagtaggggcggccgggcagaggcgcccctcacctcccggacggtgcggctgccagcgggcgggggggctgaccccnnnnnnnnnnnnnnnnnnnnnnnnnnnnnnnnnnnnnnnnnnnnnnnnnnnnnnnnnnnnnnnnnnnnnnnnnnnnnnnnnnnnnnnnnnnnnnnnnnnnnnnnnnnnnnnnnnnnnnnnnnnnnnnnnnnnnnnnnnnnnnnnnnnnnnnnnnnnnnnnnnnnnnnnnnnnnnnnnnnnnnnnnnnnnnnnnnnnnnnnnnnnnnnnnnnnnnnnnnnnnnnnnnnnnnnnnnnnnnnnnnnnnnnnnnnnnnnnnnnnnnnnnnnnnnnnnnnnnnnnnnnnnnnnnnnnnnnnnnnnnnnnnnnnnnnnnnnnnnnnnnnnnnnnnnnnnnnnnnnnnnnnnnnnnnnnnnnnnnnnnnnnnnnnnnnnnnnnnnnnnnnnnnnnnnnnnnnnnnnnnnnnnnnnnnnnnnnnnnnnnnnnnnnnnnnnnnnnnnnnnnnnnnnnnnnnnnnnnnnnnnnnnnnnnnnnnnnnnnnnnnnnnnnnnnnnnnnnnnnnnnnnnnnnnnnnnnnnnnntgacccccccacctccctcccggatggggcggctggccggccacattttctttatccagtctatcattgatgggcatttgctttggttccaagtctttgctattgtgactagtgctgcaataaacatacgtgtgcatgtgtctttatagtagaaagatttacaatcctttgggtatatacccagtaatgggattgctgggccaaatggtatttctggttctagatccttgaggaatcgccacactgtcttccacaatagttgaactaatttacactcccaccaacagtgtaaaagtgttcctatttctccacattctctccagcatctgttgtttcctgactttttaatgatcgccattctaactggcgtgagatggtatctcattgtggttttgatttgcatttctctaatgaccagtgatgatgagctttttttcatatctttgttggatgcgtaaatgtcttcttttgagaagtgtctgttcatatcattcgcccactttttgagacacatcagcattcttattcctttattgggagcaagaagttcaagagcccttgtatggcctgagtctttttaagctgtgccacctaaacatgaaggggtagaagcgttctactgtattttcattaaatgacattgaaacacatttagttttatttttcttgttctagttgcttttctttacctacgccagttaatccataggagctgcattctatgtcatctatatgagctgcaggcctaaaatttaataatggggcataggaccattgggaaggataggaaaggcattttacaacttatcaagtcataaatagcagcacctcatttttaatttaaaaagcattgacttttttattgataaccaggaacagttagaagttggaacttgacttttattctaatataaaaccctttcatctcatcctcttcttacctacaatgtaaagatatatgataatagctaacgccatttactgatattttttcttaatttcaccttttgtttttaactcagcaaggattatccatgaaagtactttgtaatccataaagtgtgtttatatgtaagggattatgatcattttgataaacttaccatgcagaggaaaaggctgaaattattctcaactcctttgcgtagaaatgtttcagaataagttgaaaaattacctgatttatgctgcacagtgttgtagtgctgaatcctgtgtccaaatctgagactatgtcactccaactgcataaaatgatgttatgtagacttccaggctagaagttacctttagaagccagggtttctagcgtttgcacagaatctgacctattttttgaaaaaaacaaatggaatcccagcctttcccttcaactctttagcaaaagaggatctgaagtttctgtccatcattagttatttcttgagaacagtttgtcagcaagactgctgaggcgggtcttcacttcctcacacagactaaagataaaaagtagatcccccaaactcctcatctccccagactgccctggacaggtgcagaggagtcctcagaaggagccccagacccgtgtgcatgcatcatgcatctccctgaactctgggtcttgtagcctagggtcagtttcttggtgggactgaaagcagtcctcaggcagtctaccgggggaagaacttgactctgctgacacccaccttggcatattcgagggtgccttctctggagctgaaaaacctgagattccaatcctgactctgtcaccaactggtggtgagtccttggagatgttgcatagctgttttgagcctcataatcttttctataaaatggggataatgatgttcaaataaacaatgagaggccgggcacggtggctcacacctgtaatcccagcactttgggaggccaaggtgggcggattacttgaggtcaggagttcaagaccagcctggccaacatggtgaaaccccatctctactaaaaatacaaaaattagctgggcatggtggtgcatgcctataatcccagctacttgagaggctgaggcaggagaatcgcttgaacctgggaggtggaggttgcagtgagccgagatcgtgccactaccctccagcctgggtgacagagtgagactgtgtctcaaaaaataaataaaaataaaaataagtgagaaaaacttttaatgtatggtaagtgcttgataatgctgagtttaccactcaacagcagatcacaaggtcaggagtttgagaccagcctggccaatatggtgaaaccctgtctctactaaaaatacaaaaaaaaattagccaggcatggtggtgcatgtctgtagtcccagctactcgggaggctgaggcagaagaatcgcttgaacccgggaggcagaggttgcagtgagccaagatcacaccactgcactccggcctggcaacagagcgagactctgtctcaaaaaagaaaataaaaaagaaagaaagtatctactggacatgaaagaaaaaacaatgcttagttattattctctttcctggtatacttaaagcagattttttagtttaaaatcaatgatgtatcctaaaaatgaagctgcttgatgactgtggactagaatcgacattggagctggttaccaatgcaaggttctgtttccaggtagcaagatgtcactggctgatatttatttcatgtgttaggagaaattacctttggctcctgaaggaggaaaacatctgtcatatgtgaactattttggctaaggtagcattttgtaatatctagtgactcaattgattttcttaccaaggttccgtggaggctctgtagggacatgcgaagcaggaagcttatggggtaggattctggaaacgttatataaatggaggtaaaattcacatgtgatacaatgaaccatttaaaagcgcacaattccgtggcatttagtacattcacaaagtcgtgcaaccgtcaccactagctccacagcgttttgccactccaaaaggaaaccatcaagcaatcactctccattccccctccccccacttcccggcaaccaacagtctgctttctgtctctgcagatttagctatcctggatatttcatctgaatagaatcataccctatgcagtcttttgtgattggcttctttcacttagtataatattttcgaagttcacccttgttgtggcttgtgtcagtacttcattcctttttacagctgaataatattccaagagatggatagaccacatttagtattcatttgtcagttgatggacatttgggtggatgccgtctctttttcaaccagagggatgctacaaggatctatttcatatgttggcattctacattagatttcctttgaagcgaggggatcttttttgctacgagaagtttttagaactcctgtttttatccagactcctcatttattgctaaaagcccagaccttagaactcatcatgctggtcagttccctggttcaagaacctccctctgaggctgggcgcggtggctcacgcctgtaatcccagaaccttgggaggccgaagcgggtggatcacaaggtcagcagttcgagaccagcctggccaacatggtgaaaccccatctttactaaaaatacaaaaattagctgggcctggtggtgggcacctgtaatcccagctactcgggaggctgaggcaagagaatcgcttgaacccgggaggcggaggttgcaatgagccaagatggagccactgcactccagcctgggcgacagagcaagactcctctcaaaaaaaaaaaaaaaaaaaaaaaaaaaaaaaaatctcccgctgaagcatcactgacagaggagcggcctgtgtcctggcaagacaatagacttggtatcagccaggcctgggataatgttctcaatctctgatcatggcaccctgggcttggtggtaaagtcactttggcctaatcatgtctgtaaaatggaaatccaggtacctccttggctggattgtcatggtcatgatatgaaatgacacgtgtgagaaaggcccatggaatctgagagcattagacaacagctagttcttagggtcaccaagtggtcaatcaggctttcctttaaaatcatgctcatggtgacaaataagtcaccagctgttgaggcaagctgtttgagttgtggacataatggttctgccccactgaatcatacatggggaagctatgctggagggaggtaagaaacttgccccaagtcccaaagctagtaagagatagactggaacctgggtcctgggcctgactcctacaccaatgtttgcctggccatgaggctgtgttggtctccagtttccatttcacattcaaagcttaactttgaaggtatgggaaaaaaataagaataatcaacggaaaatttcctctttcactcaaggtattagggcagcctaagtctttctttttaaaacttctgtcagaggcagaagtaaataaattgcaatctcaattatttttaaagcaagatgcttgttccatcaattgattaattttgggctcgaggggacccattttactagtattgggctccttctcctgaacatagatatttcagggaactggactcctttctcaagaatcatagccattcaggaccccagtgtaatataaatgaagacagagacaggcttggagaaatcggagggggttttattgatatcacgatgccacgcaatgcctgggagctgggttatggactgctttcctcttattcagaggtatatatttggaacatgacttatatatggcccagaagcccctttttccatgtaacatttcacaatcctctccccatttcattacttcctatcaccctaacaaccaggtttgctgtaaagagaggagtcagcctgccaagcagctgtggtcctaattcggaagtgtttgtccactaaaggttttattgggcactcaggctttacttcttaccttgtctccaagcacatctcttgggccctgtgccatgtttggtgccaatagatgaatccccaaatccggtagattctatgtagaatctagaataaagttgaaacattctcagagaacagaaaacaaggaatctcccagtggactctgttttgtggctgggccttgtcgtacaaccaaggaatgtagctttgtccaatcctggagaagattagagaaatattaatcagaaattctccagacccagaaccctgccccttaaattggtggcacctcttattgaagtcccctcaaaaataacgaagaggagttcttaactatctaaactaagcatgctgtcgtaagcacagaacatgatctttctgactggagaatagattcttcctgaagaatcatccgctatcctgctgaatggcccattcatgtgtgcactgctgacctccggttgaaattctgggctcaattgattcctgaggtgatatggtttggctctgtgtccctacccaaatctcatctcggattgtaatccccacaagacctggtgggaggggattggatcatgggggcagtttcccccatgctgttctcgtgataacgagtgaattctcatgagatgtgatggtttaaaactgtgtggcagctcccgcttctctctctttcctgccaccttgtgaagaaggtccttgcttcccctttgccttccgccatgattgtaagtttcctgaggcctcccagtcatgcttgctgttaagcctgcagaactctaagtcagttaaacctcttcatcataaattacccagtctcaagtagttctttatagcagtgtgaaaacagactaatacatgagagttcaatcaggaaccctgaccctgcagaccagcacacattgaccccaagcacctttgaagattttacataaataaaaaagtctgggtcacagagaaatgaatatttgcatacttatttgaatttcatttgtaccatgtgtggattagagaaacagatatttatttatctcgagtgtttattgagcacttactgtgtgtcaggggaagactgcagaagtgaattagatcgccagccagtaggggtggcaagacccacgcatcaatatctgtaaggtggaatgtgctaagtactgcaagcataaagacaaattgccaagagaggcaggtgtggggagaggttatttcctgatgggaagaacttttaaaaactgacaaggaggtggcacttgacctgaggtttaaagcgtgagtaggatttgaaatatgaaaatgaggggaaggaggtccctagtgaagaaaacaaaggcacaaggctctgttgggggagcctcgaggagttcaggtaggcaggagggatgggtgcatggagtgtattaggagagaggaaggtgggagctagatggaaacccaaagccggaggtttatggccttgaatgtcaagaaatttgaggccaggcacggtggctcacacctgtaatcccagcactttgggatgcctaggcggtggatcacatgaagtcagaagttcaagaccagcctggccaacttggtaaaaccccatctctactaaaaatataaaaattagccaggcatggtggcacatccctgtaatcccagctactcaggaggctaaggcaggagaatcgcttgaacccaggagtcagaggttgcagtgagctgagatcacaccattgctctccagcctaggcaacagagggagactcagtctccaaaaaacaaaaaacaaaaaacaaaaaaaaggaaaagaaatttgagcttgtttttgtgtgtgattttttttcctctcctctaatgaatgtgtcacagtctttattcttagtccctggcacagtattcgaaaccttttttttttttccaacttttatttcagggtcgggggtccatgagcaggtttgttatggagttgtttttcta

SEQ ID NO: 135 - DNA, 1667 bp, Homo sapiens
gatgcggtgactgccgctgtcaacccgagcctgagcgatcatggcaacgggctcgggcggggaacgcgtggcagcggctgcagcggcggcagtttggtggcggactggggcggcggagcggcggcggcggcggcggtggcactggcactggccccggccctgagcaccatgcggcggggcagctccgagagcgagctggcggcccggtgggaggcggaggcggtggctgcggccaaagcggcggccaaagctgaggccgaggccacagcggagacggtggcggaacaggtccgcgtggacgcgggcgcggccggggaaccggagtgcaaggcaggggaggagcagcccaaggtcctggccccggccccggcgcagcccagtgcggctgaggaggggaacacccaggtccttcagcggccgccgcccacgctgcccccgtccaagccgaagccggtgcagggcctctgcccgcacgggaagccccgggacaagggccgaagctgcaagcggagctcgggccacggttccggcgagaacggctcccagcggccggtcaccgtggacagctccaaggccaggacctccctggatgccctgaagatcagcatccgccagctcaagtggaaggagttcccatttggccggcgcttgccttgtgacatctactggcatggagtttcatttcacgacaatgacatattctccggtcaagtgaacaagtttccaggcatgacggagatggtgcgtaaaattactctgagcagagcagtgagaaccatgcagaatctctttcctgaggagtacaacttctaccctcgctcatggattctgcctgacgagttccagctctttgttgctcaggttcaaatggtgaaagacgatgacccctcctggaagcccacttttatcgtgaaacctgatggtggttgtcagggtgatggaatctacctcattaaagaccccagtgacatccgcctggcagggaccctccagagcaggccagcggtggtccaggagtacatctgcaaacctctccttatcgacaagctcaagtttgatattcgtctgtatgtcttactcaagtccttagaccccttagagatttatatagccaaagacggactctctaggttttgtaccgagccatatcaggagcccacccccaaaaacctgcaccgcatctttatgcacttaaccaactattcactgaacatccacagcggcaacttcatccactcggacagtgctagcactggcagcaaaaggactttttccagcatcctttgtagactgtcttccaaaggcgttgacatcaagaaggtctggtctgacatcatctccgtggtgattaagacggtcatcgcgctgactccagagctcaaagtcttctaccagtcagacatccccacggggaggccgggccccacgtgcttccagattttaggctttgacattcttctaatgaaaaatctgaagcctatactacttgaagtaaatgcaaatcccagtatgagaatcgaacatgagcacgaaaatccttacccgttcaagctttctccaggggtgtttgaaaatgtccccagcctcgttgatgaagaagtgaaagtggctgtgatcagagacactctgcgcctcatggacccacttaagaagaaaagagagaatca

SEQ ID NO: 136 - protein, 554 aa, Homo sapiens
  VARIANT (1)...(554): Xaa = Any Amino Acid
DAVTAAVNPSLSDHGNGLGRGTRGSGCSGGSLVADWGGGAAAAAAVALAPALSTMRRGSSESELAARWEAEAVAAAKAAAKAEAEATAETVAEQVRVDAGAAGEPECKAGEEQPKVLAPAPAQPSAAEEGNTQVLQRPPPTLPPSKPKPVQGLCPHGKPRDKGRSCKRSSGHGSGENGSQRPVTVDSSKARTSLDALKISIRQLKWKEFPFGRRLPCDIYWHGVSFHDNDIFSGQVNKFPGMTEMVRKITLSRAVRTMQNLFPEEYNFYPRSWILPDEFQLFVAQVQMVKDDDPSWKPTFIVKPDGGCQGDGIYLIKDPSDIRLAGTLQSRPAVVQEYICKPLLIDKLKFDIRLYVLLKSLDPLEIYIAKDGLSRFCTEPYQEPTPKNLHRIFMHLTNYSLNIHSGNFIHSDSASTGSKRTFSSILCRLSSKGVDIKKVWSDIISVVIKTVIALTPELKVFYQSDIPTGRPGPTCFQILGFDILLMKNLKPILLEVNANPSMRIEHEHENPYPFKLSPGVFENVPSLVDEEVKVAVIRDTLRLMDPLKKKRENX

SEQ ID NO: 137 - DNA, 109559 bp, Mus musculus
  misc_feature (1)...(109559): n = A,T,C or G
aaaggaggatgggggtgagttgtggaagaggaagggacggaaggaaaaggggagaaggcaaaggctgtatgttggtctgaacaggacacagcttttgttactacatggacaacacaagtcaagcagatgtgaggtagaagatcagagcctcagagtgttctgaaaacagagaaaatttgaaaggagggggataacttacagtcagatactggaaagacgtttaagacttactgaagtccctaaagccactaacagtagaagaaggctggtgtaaaactaagagaggctttgttttgacattgcagtttgaaaacatggaatatatcaatagccatacttcagccccaaacaatgaacagacaatactggttctctctgcctcatacatttacagacactgaccaacattttgaaacaaatctaactcccaccaccacagaaaacagcagcaacttcttgaagcatctgtgctttctcttctctgaaacctttcagctgtaccataggaagtaacagctctacgcctggacaagaaatgcttctactagccaggtgtggtggcgcgcacctttaatcccagcactttgagatcagcctggtctacaaagtgagttccaggacagccagggctatacagagaaaccctgtctaaaaacaacaacaacaaaaacaaaaaaaacaaaaaaacaaaaaaaacaaaaaaaaagaaagaaaagagagagagagagagagagagagagagagggagagagagagggagggagggagggagggagggagagagagagagagagagagagagagagagagagagagagagagagaggaagaaagaaagaaagaaagaaagaaagaaagaaagaaagaaagaaagaaagaaagaaagaaagaaagaaagaaagaaagaaatgcttctcttatagagctgcagaccccttcagctccttgggtactttctctaactccttcgttggggaccctgtgttccatccaaaagaagactgtgagcatccacttctgtatttgccaggcactggcatagcctcacaggagacagctatatcagggtcctgtcggcaaaatcttgttggtatatgcaatagtgtctgggtttagtggttgtttatgggatggatccctgggtagggcattctctggatggtccttccttcagtctctgctccaaactttgtctctaaccagtaccctcagagctcatgtctctagctgcacatgtagcagaggatggcctaatcagccatcagtggaaggagaggcccttggtcttgcgaagattctaggccccagtataggggaatgccagggccaggaagtgggagtgggtgggttggggagcagggagagagggagggtatatgggactttcggagaggaaactaggaaaggggataacatctgaaatggaatgaagaaaacatctagtaaaaaaaataagaagaaagaaatgttatcagttagtgatgcttacaaagacaggcttcatcatgagcctaggcagagaagcattggtgccctatgtactaccaagtgcccagaccaactggatgcccaataacactaatcaccaattagtcagtgagtgtttccctgggctagagctgggatgggttagtggagccatgagaagcttgtctcctgttgacttttgaaatcatactgaagtaaaaaaattttaaaataaaaattaaaaaaaaaaaacctcacatacttgtaacagttgccaaaaacaatacaaggcagaaagtgctaaaatcatcatagcagagccaaaaactctgagggaaagcaggatgccgttagccttccagagagccctttggagctggaccctccaagtgaagtgggagagagcactgtcatgattgatgatggcaatgcactgtgcattctgctgagaaggacattcagagttttaggagtcgtgccagcatgctagacatagcatttactttggattcacttcgatatattttgggcaaaaagtgagtcatggataaagtatttcatgcacaaagcagttattcttttttttccttcaggccttatagaatattgtgttcttctctgtgtccaacacagtgggtccatctctgaaaggctcctgcaagtctttgcagggattacgggaacaagctgggatatcgttatcatgaactagacctggaatgacattatttaatgtagtagttgactatataagaaagatatctactttgaatatctttaaattaatcttaatgttagcatacaaaatatctcatgattttttacatacagatacatatatgtataaatatctgtatatatgtatgtatgtatgtatatactaaaatcctgtcttacaaataaagaattctcatttttatttcaagttttataaagaatggttattatgttgaagtgataaaatctcttgaagcttgagtcttaaggagcaaagttatggacagaatttccagacacatctagtgtattttccctagctggtctaccaacagcaaagccctcaaccaactcaaaccccacaatttttcttaaaggagtgaaagtttgtgtctagattcacacagaaagtgtgccttgtgactcccgcacgtccctcctggcacggagtcagtcactaggagcttctgtgccagtttgggatcagcacagcggcgtacgattgccctgagcccatcaccacgttcccaccccttcagttttgcctcattttgatgatgttcatcttcctcttggctcccgttctcaaggctttacactgatgtagaagctagtgggacgtggattgagcatgaaaaggatccccacagctacagacttcttgctaattgatgcttagtgcctaaaagggtcagtgtcctggggactgagacaaaacatggctatttttagaaagcaattcagccacagcaagcatcgtggcaggtacatatgcagtgaagcattggacccaaggcctgtgcttagagaacttactattgggttggacatagtcaatccagcagcattaactgacaaaaagtccacagttctgcaaggctaaaaaagaaagggcgctgtataatatctttggaaaaggacccaagtctcgagtttcttctctcccttactaaaggatttttctgatgataaacttggaagtgacacttgcaagaggaaatgtaaaccagggaggaattactttcccctttgagagttgtgatgagctcaaatgtattattccaagatcccaaacatttcactgtagtaaccaatgagaagtcactcgtgatcttttgagccagtctctttctagatcatccgtaatttctagcgacaaccacatcactaatgggcagtaaggaaaactcacatggtgacccaggtaagcgcacagacacacacacacacacacacacacacacacacacacacaccctccaggcagctacagatttcaatctttcctgcatgcctggttgagaggaacaggaatctacttgagggactgtggcctgcggaatgaattgttacctttgtgaggtgcatcgcttgtttccatggcagcacaggagacaaagagtacatttagtttgtggaaaaggatgggggcaggggaagaaacagaaaccagaggatcgtgcaatcatggcgctttcaaatccctccaggaagtttatgtttcaagtcctttgcaagagtgaaatgcagctgtttaaaacagagctgtttactggcgggccgcagtcccccataagtgctcttggtaccacctctgcagcctcaaggatgacaggtcactgcttgtagacttagctagcctaagcaggcttatgcctaccccagcagagaccacatgtctcaaaaggcaaggggatgttcagagaagactgagaaagggggagggggtgaagagccgcagcccactggatcttaagagaagaaagtcaggattcttatgtgaagtgttaaccaaactagacttgtgtggatggccacacccccaaagaatgaccacccagagggtgtactcagtacagcatctcacacaccatcatagcaattttggatttcttgtgaaaaattcaaagtaccctttgcagtatctcctttaagtcttgaatgacaacacaggatgtggcttagagctttctctatgtagttaataaatctgctcactggtggagtgacttctagtctcttctctctcttataatgaagcttcaagactgacatgcagagatttctccatcaacctctaaccaatcatggcaccattctctccctgcagtctatccttacccattccccggacatgctgggcatcttcacccggctgctctttcttcttggctgcctctgcatgcacactgtgtccaaaacagttagacgagagacatggtaaaggccaaaaggcaacaacagcatgtcaaccatcaagaggccaagtattggccgagggagcctgtaccggctggcacactgcttcatggcattgctaacttctgcttcggaagggagtctcattgtgtagaaggtaccggtacctcatatccccctgcctcagcctccagagtgctgggattataggtgtgccctgtaatctggctgttcctatataattataatgccaggattcacaatttcttccatgctggaaggatccagtggcactcttcaacagaatctcagggtagaagcagtcagcactggctgttgctatggaaaatcagctgaagtaaaaggagatattttgactcacagttcagggtacagtcggtcacggtgaggcagaagtgacagcagcctagcaaccagctggttagactgtgttcatggtcaggaagcagagaaagacaataatgagctcagcttgctttctcctttttattcattctaggaccctaatctgtggaaaggtgctgcccacatccaggtatagagaacctaatctaaataatctcttataatagatacagccagaggttcctctcctgggtgattttacattctgtcaagttcacaatgaatgttaacaatcataatatacaagaacattaatatagcttaaaagcttaccatttctccatattcaaatgaattaacacattttagtgggcattaaggctatgatgaccctgtctacggagtctaccagccctcagtagcagatgcatcttggaaatcctccctccaacttgtcagtataataaactcctttctaaaacatgctgttgtctctgtgcctcagcacatggttccttctcctgtcccatgccacccaagttactggaaggtacaattgggtagctatcagcttctctattctgacctccacccttctccatttaaagctgcaccctcactattgatcacccacttccaactcacatttttttaggtcctgattctcctttctgcaagttcacattgtgttttctaagaaactcttttgcactgaggttttaatgatggtgtctatccattctcatctgtatttgattggaaccttttaaaagctctacaccataattcaaacccatgtgtctggagaaaagattttacttcagcaatagaagtactttaaagatgtgagctttgagtgtcatttagattgtagggtcccattagttcaatccatggctactgcatctgtgtatttgatggatcttggtgagatggttatgattggaaacttctagaaggtgggatacaatctatttctaacacaatctttccacaaaaccctgtcagtagtgtcatgcctcatagggtttggagtgtgtgagtgtgtgtgtgtgtgtgtgtgtgtgtgtgtgtgtggagagagagagagagagagagagtatgtgagtgtgtgagtgtgtgaatgtgtgtgtgtgtgagagagaaagagagaatgtgagtgtgtgtgtgtatgtgtgagtgtgtgagtgtgtgtgtgtgtgtgtgtgtgtgtgtgtgtgtgtgtgtgtgtagaattgaacctagcgttttctgcatgctgcatgttccctctaccatgagcagcacccctaaccctcaatggagctttaatggcatctctctgtctccacagaaccacatgtctccttttctatacccatctttaggtatcttcacctgtggtgagtggccaccttcaatccctactcccttgatatttaccattctctaggcttgggcaggaaatgaccccaaatataatctttctatagagcacagaagtgaaatctctaggctaagctggcaaagagagccaatgtgagagtcagttttaggtgtctggcccctcagtatccagacacataggtggtatttatctctgagcccaccatggaagcacttgcttgcactctgggcttcattgctgactgcatgtgttttctagccacaatgtcactcagtcttcaaactcacctttgttgtctagaaaagagggaacgcatgcagtgctgaaagagcagtaatgtgtgttgttttgaagagtaggagctctaagatttatttacctagatgaagagcttgctcagctcaaggccagtgctaaggccctgaataaacggctgttagtgttgctatctccagagccagtgtatcaattgctccttctgggcctgcttctgcaatcctggcggcccacagagagagtgtgggacagactgaatcccatagtgagtgcaggctgggagaggagtggctgcagaatctggcagaacaagtttgtagtacgttcctgtcttttgccttttcaaagcagtggaaaataaatcaagggtgaaaacgcaaacctgggaaagaatgtattccattgttctttatgcagggaggacccttcaaatgcagtccgtgctgaaataaatcacaagccacatggctgagtctgctcctgcctcttccctaccctagaacacacagcagacaccttgagtctcttgctgtcattttctgggagcagaaagaagctggggaagccccaccattgactgaattctgttcataactgattggacatctggaggggctgggttagactgcttggttagtaacagaagtctcatccacactaacttgagcagtcaagaagtcactatgaagactgcagtgtatcaaagactgcagagccatgcggaggagatctgcttctctaatgcttctgtctgctgcgcctttacagctagctcccaggttcagtaaatcactatgcatccagcatgggtcaggttgctttcctgctggagtcacacttgctcctccagcacctcacctccatcacagccacatgccacctgtgcatggacaagccaggcaatgcagagagatggctggaacaggttttggtgagcaagatggcaaggaatacagttcacatccagtccttcactgcatcctggatgttcccaattctaccatgttttacctgaggtctaaagctgccctgtgctcactgccatgggccatcttcctgccaggtgaaccttggtcctagactgactggctaaaacataacaggatggaaatggttggctttaggaccaaacagacctacacttaataactgtgtgaccttatctataaactgcatacctgatgtatatctaacaagctgctaggcagatgcagggcaataaagttatcatgctttaaatccctgacaaataaagtagacacagtgctatgaatttcctttgcttgattcagagacattcaaaaggaatacaactttttgaaaagcatttcaaccttagctactttgcaattatcctgagtggacattaaataatttaggtctgtgggcagagccatggaaaccacactgtggtggagacagctcttgctttagagatgaagcagctattggttcagggaaccaatgatggacgctttatcctcttgaaacatttattgttatggctgcatgggtgtgcaaacttgctccatgggtgtaagatttcaaaagctcagtctgtttcctgggttagtgaaggcggtgctttggcgttgtgagctgcacagatatgttgctgtggagacacacagaacatgtgcaaaacagaaagtcgtggacttttcttataaacgatagttacggagtcactgctgcgaacattgggccagatttcaatatgacttatctagtcctttcctgtgagacttttttcagtttgggacacagaggctcaggcaagcctggtgagttgccaggtcactgcattgcaatgtaagcctggtcccagcaccttttctcataacacttgtacagtactgcttttcaacttggctttgttacaaggtttaatgagtgtcttggtctgaataagatgacctcacgtaggcttatatgcttgactgcttgattccctggttaatggaagtgtttgggaaggattaggaggtgtggccttgttggaggaggtgtgatcactcctagtaaggagtgatctttaaggtttcaaaagtccataccaggccctgtgtctctgtgtctctgtctctggttctctctctctctctctctctctctctctctctctctctctctctctccctctnnnnnnnnnnnnnnnnnnnnnnnnnnnnnnnnnnnnnnnnnnnnnnnnnnnnnnnnnnnnnnnnnnnnnnnnnnnnnnnnnnnnnnnnnnnnnnnnnnnnnnnnnnntcccaccatgatgataatggactaaccctttcaaactgtgagcaagcccccaaataaatgttttcttttataagagttgctgtggtcatggtgtcctttcacatctgtagagcattaactaagacaaaaacagaagaaaaacatctccaggaaaacctgcactttgagtgtcttatttaataagggcatgcccccatagcattgtccctccagcgtgagggggccaaggatagcaaacacccagacatcctagatcttaagtgaggaagaaggatctgggaaccctgaatgtggcaaaaggctgaatgcaggtactgcaaagtgatgggattatagaagacagaggtccccttggacctgagagctcttctaacttagaggatgccaaagagggtaagggtgaatctggaaaggaatataaaaagaagctagaaattttgtacttccttaaaccctttggtgtttcccaatttggtcaaagtgtgagcactttgagtatgtagctgccctagcattttatgtacacgtacatgagagatttttctttattttagaagaaaatgcatgcttaggtactgtgaataactcctaacatgtcagagaaaatgttgccctattagccaataatggggattaattgatcgtggggattgctatacctctaactaatttcattttctcttgtgtattccattatattccagactaagtctcactgggggaacagataagcttcatgttgaaggagaagctataacttgggtaatagaatgtttgtctgatatgctgggttcgatccccagcaccacgtaactaagtatgatgatagatacctataatcccagctactaagcaggtcaaagcaggaataccagaatttcaaaggtacccataggtacacagcaagtttgagaccaacctggcataaagaagatcctaccttgtctccaaaaacaacaacaacaaaagttgttgggttttttttttaattaaaggtttaaaaattgagcctggaagtcagaaagatggctcaagggttaagagcactgcttattctccagggggacctggatcaattgccagcactcacagagtggctcacaaccagaattgatttcagttctatggtctccgatgccatcctttggcctcctaagatataagccattcaggtggttcatagacatgcatgctgggaaaacaatcatacacataaaataaaaatgaataatacctttacaatgctttttaaaaattaagtataacattgctcttttttaaaggtataattggataggaatcttaaacatatttgttttatttcattttgtctttcagctccagggctctttgaaaagaaagcaaatagtcaacttgtctcctgccaacagcaagaggcccaatggctttgttgacagctcatttcttgacatcaaaaggatcagagttggggagaacctttctacaggtcaggggggcctcccagtaaataatggacaaagtcaaatgatgccagggcccttgaccatgaatcaagcacccctgaggaagactaatgctctaccacctcctgcacattcccctggcaacaatttgtttaacatgggcttaaaggaggtgaagaaagaacctggggagaccctgtcctgcagtaagcacatgagtgaccaaatgacacaagagagtgtttttactaataggtttggagatgaccctggagatcaactgatggaccctgagctacaggaactgttcaatgaactaaccaacatatcagtgcctcccatgagtgacctggagctggagaacatgatcaatgctaccattaagcaagatgacccgtttggcattgacttgggtcagcagagccagaggagcacacctagaccctccctgcccatggagaagatcattatcaaaagtgaatattcacctggtttgacacaaggcacttcaggctctccccagctgagacccccatcagctggccctgcattttccttggctaactctgcactctccacttcatccccaattcccacaattccccagagtcagcctcagcttcagacagtatcaggagcaaacagggccctgtcaagctggcaagaagtatcccatgctcaacagctcaagcagatagctgcaaaccgccagcagcatgcacggatgcagcagcagcaacagcagcagcagcagcagccatctcccagctggccagccttgcagtcctctgctgggccatccccaggagcatttgtgcaggaaaaaatccctagcccttccttcagccagcaaccattcagtccacagggatcccccatgcctggggtgactggcagcaacacccagtctaaagcagcggccaattacacgtacaaggccagcccctcagcccaggctggacacctggatgtgcttctgcagcaaaagcctcaggagctcaatcgaagcttcattaataacccacacccagccttggagccccggcatggcaataccaagcctttgttccattttaactcagaccaagcaaaccagcagatgccttctcttttgccttcccagagcaaaccttctctcttgcactatacccagcagcagcagcagcagcagcagcagcagcagcagcagcaacaacaacaacaacagcagcagcagcaacagcagcagcaacaacaacaacagcagcagcaacaacaacagcagcagcagcaacaacaacaacagcaaggctccctggcagctcagcagcagcagcagcagccacagccacagagttcattggtagctcagcagcagcaacagcagcagcaacagcagcagcagcagcaaggttcattgacagctcagcagcagcagcaacagcagcagcagcagcaaccatcgcaacccacccatgctttatcaagccagcctttgctaaggtcacccttacaacttcagcaaaagatcatgcttcagaaaatgcaaactcagtccatcacaggcctgggatatcaagtcactcaacagcacagacaggtaagggctctggtacttggccccagaactcccaccagtgattagtttggtaattatgcttgactactcttatgcttttggtgagacatgattaataccagaaacccggttgttctggtgggctcacaggagcttgattctcttggtatatctagagcaagcactaatgttttcttatagactgtcattgcttgggggatctgtaatgatcagtgattcttgcaactaatgccttggtgatatatctggttgtcaatcatatcctgatatgcttggtattcattcatccaaccagaaaaatcagatcagtatgtactgaattagtgctactatggagaagacattgtggttacggttgcgcactggaataaggctagaggtaatgctgagagtgcaccaatgttatcaactgttgtgtttactccatggccaccctgatagatctcacaggactccatgctcacaatctgttcatcagtcctacatctccatctgcaggcaccttaaaccatcactttaacactgcacgagcaatggcaggcagactcaaaggtctttcccagtgagtggaagtcagaaatggcttccataaaaagttatgactgggtgagaaaagcatgaatttagcaaaataaattactaaaaatagaaataaacccacagttgttttatgtcctctggttttacattaaatagaggtttaattttgccctggaaaacaaggtcaagaaatttatcattcttacaaaacacatatggctgagtaaaagctgatccctgggaaacttgacagaggaacctctttctggaaggaaggaagacatttgaatattgcattgttcacgttgttggcagttgtgcatcaccatagagcagcaagctacatggtagaggatgaaataccatagagtgacagctggaggggtaaaaatctctgtactaagtaaagatttcggctccaccccctccccgtgggcgtgggcgtgtgtgtgtgtgtgtgtgtgtgtgtgtgtgtgtgtgtgtgtgtgtgtactctatgagcaatggaagggatttgggtagacttgtatatattttataacattaatatgacataataattatacagtcctttcataaaacagaacattttagatgacttaaaaatacatcacaaaactcccttccaatgccacgtgtaagcatttttttttctgggtgagcatggttcaaattctttctggatactctttgctgtgccttctcaagcaacttgctgaggcgctctcagctgattaagagtggatcatgagtgataaaatagtatctcctgggtttgggggttgtatgaagaatggaacaaggtaattcccaatgcagactatataataagtgagaattattcagattctcatggaaagtgccataaataatcaaaatatcccctttaatgaaacaagcacttgtgaaaagagggcttgagatttatacaagggttgtgagttctaacatgtaaacagtactgcagacattaaagagagttgtggctgctgcttcagcatcaacactgtgacacaagtgcaacaagtcagtctctctaacttagatttacaaccatggaaacaaccaaagatgagagagtaataaaataaatgtgttgataacttactctacagaaaggctggtttctgtctctttgccttgaagttcatcatttaattcttacaagggaattcttcccatcatacaagtcctagaattaaagcacagacaggttcaatgtctttctaaactcaagtgatgaaaagcagagctcgaagtctaatgcagcatcagagctgtgcattcaaccactaagaaatgcagctcatgggcaggacttgctgggaagtgaatgccacggtagatcattgtaaagactgtcaagaaacttttttcccatagcaaaataatctgtatagaaggctgaagtctttgtgggacagaatatttctgacttctagccttcagggctgttaacaaaaggattattttaaaaatctgtgtcatccttgagcttcccgatgctaaatactgtccacctaagaaaatgcacagtttacagtgggaaatataactatggtgcccccaccaccagcatcctccatcttatggctagacctacttctggtaccatcagctgcacagatctctggatcctcctctctccaatctcatcctagcttccaggattcaagtccaccaatgtatgctgatcgccaaatccacaaacatcttccaatggtctagaccatttccaccatctcaataagtatgccaagaaagtattcatctttttacagcaaccttaagaagtggcaggcatgctaggagcacttcgggctacaggtctctcttacacagcagccaatgtctttgcacggagtgattcctcccaacttattggcttatcagcactcaaaatgttttatatttccaaaagatattccctgttgaactaaaaatgcattctttttcaaagccatatggccagatgcctgaaagtgtgaatatttctgtcctaacattggatctaagcaactcaaatggattctatatttggtttagaattctccatgtctgaaactcctaggagggaattctgccagtgaatggatggtttgttgtgactgaaacacaaatttatacattcccccttagtagaaggccaagttcctcaatcaaatcttaagagcctcaacccactccccccacctagccaagaggagtcgccataatctctatcagtccttggtgtcaatcaagcaaatatcctgctctccttcccatcttcttagagtaattctgtataaggccttgaacatgaacaccccaaaaaactgttttcaagatgcaccaaacactgatgagagaatcaacttagctctcatattctggaaatacttctaagcattattagccaaagaaggtgcatacagggatagaaattttgtaacaaataaaactcttttctcaacagaaaaaacatcttgagaattcaaagttttatagaataacatccaagcctctgctggaggctgcaagttagctaaaagatcatcaaactgggccagcaacaggaactgggtttgtagaggagaccaggatagagaaagaaggacttaaagaactgacaacctaagaaagctaggaagcaatcagtatagagaccagaggaggagacaagcctatagccaaagatgaatgagggatataaaatctgaacagaaggcaggggagactcaagagaaactgggtgattattgccaagggcctgtggccatttggtgacctcagttatgacataccttgactgcatgttgccaagaaggcaaaaggttgatataggccagctatgggctatcagtgccaggccagaagcattcgatttacattttcattttatctttgatgaaaaaaaatggttttaatacttcatgaaataaatgcttagaccaagacacaaaatgatttctatctgtaattctgagcaagtgctttgaattcttagagcttaggcaaatgtactcacttgccttctccgaatccatggacatcttcagtctcctggtctgtcccaccagaagtctagagccaaacttccaggctaaagtcagatctgcttcattcttaacattggcactaccttgaattcatgtattcatgcattcagaaaatgtggaatgactactgtgtgccaggcacagttctggatttggatgctagaacaaggatgaaatgtagagattggcagctgtggcacaagccattagtcccagcacaagggaggcagagacagggagatctctgatttcgaggccacactgatttacagagcaaggtccaggaaagcccggcccacacagaaaaaaacatgaaatctagaatcagtaactcttaacttttgttttgttctgtttttaactacacaatcaagtacacttttttaaaggagctttttttttttttttttttttttttaatagtacaggcatactctgctctggttgctaggttcatgtgtgaagttcatgagctacatctcaaataaagatagcaaaataacagtgtgtgtgtgtgtgtgtgtgtgtatgagtggtgtatgcaggtacatatgtgtagagatatgtgttcaagtgtgtatgaatgcagaggccagggctcaacctctggtggtcttcctcaggcaccattcagtcctaggctggcttgcaggaaagcttcagggtcccacttgtcatcactcccacagcaccggtattcagagcacgcctggcttttgcacaggggctcttggaatcaaactcaggtcctgaccctggcacagaaaaccctttaccaactgagccatctccttgccacacagtgtaatttttaatgcaaagactgtgaagcctggttagatgtcttaactagtggaaaattcattcatctttttgcatcacacattacaacttaagaatctgttcagagtccctcccaagtttacaataagataaagtgtgatcgcattcatcaactcatgtagtgaccatgtctcaagcacctacagcatatgagaaactgagggttaaagattagaagaccctctttccacgcactaagcctaaggcctcgggacagcatgggcctccctcgtagcaagggtttggaagaaggctgcatatctgctttgtagattctcaccacatcatcccagtccttcataatcccacacgagtcaaagcacacggatgctcctaagccacggtgattacccttaaacatgctagtctacccattcacagaacagtaccccatttctgctcagttctattacattattccagtatttttctcagcggcaaactgagtgtattagcacagagagccaactcctgtatctattgataaagaaataagcaccatagtaggggaggacgtcagccttgaatcattcatgacacacaaagccctactctgcagtcagggaaacagctttttttatgctcctctggaggcctttgtgagtggtgtgtacccacaggagcagttaatgcattagggggtcagttagcctgttaaaagccaagttctgaactaggaaaggaaagggtgtagggttaggacatagatttgatcctaaagatgcaaatgcaaaagtgttaacggaaacctgacagatgtcattgtgatgtgcatcacatacatatgtcatgtgacatagcagcacagtctcctctgcaccccctaattaggtttaccctttctaatcaggtgtcagttgttatatgtttgctagagtgcttcctgctttcttttggtgaaatccaaagtgaaaaaaaaagaacacacacaaatacacacaaacacacacaaacaagccatatatatatattcagacctctaaccagtgaatttgcacaatcatgatttgtgagagacagaaagaaagatgtgagagtcagaagatttttacaataaagcagttgaagttaaaaataaaactgtacaaatgtttagcctggtgagatgagagaggtgtcacatgagttggtaatcttactgttcttgtttgtttgtgatcaaccatggaaaatcaaatttgcatgtgcattttcacaacatacagagagagagagatggagaatcagagagagagacagatggagagtgtgtgtgagaaatctaaatactaattagactatccgatggaacttggtagggtgaatctgaattgtattctccaagaaataaatctagtggtgcataatagtgaaaatagctgctgtcctgtgtgacatgcaaaatcaactttccaagctccccctggatgcaagtaagggggcagctgatgtctttgtcttccagttcatgtgtgaatcctctcctccctgaatcacaggaagccctgcattgtcttctcactggaacctgagtttcccctctgcccatatgcagcaaacagggagctctggtagcctccttgaggtagcctccttgaggtagcctccttgtggtagcctccttgtggtagcctccttgtggtagcctccttatggtagcctccttgtggtagcctccttgtggtagcctccttgtggtagccccactgctccagagcagaggtcttcgtgtgcaagcacaggagagtgaacgcctcggcatctgcgctgtgctccacatcgactctgagtctcgggatctttgtccaagtatcctcctccttggtcctactcttctctttcacccttttattattgagcagtttgggcctaaactttcctgaaacttcccccaaggcaacccttaaaaggtacagaggcagggatgcatagacaatggactcattattggcaatggagagtgtgagatgttccctaaggtatgatccacgttagggaaagccatgaggctgaggagttgccaggcctaccaccttgtcccacaaagctcaggaacaaataatggatgatatgaatgtgcccatgggcacacataccctgaatactttctagccaatctcccttcttactaaatgctatctagccccacctgcttcctcccagtcttgccaatacacaaaatgagcatgtaaagtagtagttaagatatctatttacaaacatctaaatgtctttattttcctgggataaatcttaatttcttatgttacttccaaagccctataggatccaactctacccagagtcccctggcttcaagcttccattcccagcccttttcttctcttgacccccaaccctgccttcctctgctccccctcactcctctctggcttctaacatgatgcacacattctctccttccccatgcactgtccatcctgccccaaacaaagttcttttcgactccagtcacccagggtgacttctacttcctgtcttttaatgcacaccagtcttcatctttctgttggcatcaatggcatcctaactagactgcaagctcattgaagacaaggattgtgtctgtgtctcccatccctttagtctgatccccaacctaccttccataatatagggaccccaaacctaaatgtgctggacaaatggttgattcagttgatgatcattcccctgctgttttggacagccagagacagtaagacaagacactggtcttcagaaggtgcaagcagctagcccttgcatcttctacactgagtcacctttaagccctgcctatccctgacccacagccctagccttctacagcatttgctatcatctgatccatgtgccaagctgaggtgtaagttctgaaggggagcgtttaatacagactgaatctatctatatccaagaaccacgtaaaagaattttatcaggatatttcaagcgattgttttctgacatactgaaggcaatggggggtctccgtcttcaacctccttctttacaactactgtatctctcccccacagtatctggatgataagcaattttctcttgctccatattccttgaggatgagacagggctgggttccaatgatctctgccacttggccaggtctcctgtgagctagaactcagctttgcccccaaggcagcctctactagggctctgctttactagaaatgctttttcacaagcactgcctcatctctactacctgtggcctcttgtcaatcatcttagacagctgtatagaggtttctctgagcgcccgtgttgctgtgatccccatccccaaatgtgaaaattgcttagtttcctcctctgccagagcccaacatatgcaaacttttcagtgacatttatcatgctgtactatcattttggttaggtctctggttgacaggattataatttcctagaaattggacttttaccttagattatagttaagtccgtaaattttctttttagcctcacataagactttgaaaattcctagaaaccagagttgacatgtaattgaggtatttttcttgctctagtttacttccaagagctagtagaatatctaaaataaactgccaacatgtgggcagagatgtgcaaagaggggaagtgtcacgttcatgtctctggctgctccatgaggtgcttgccaaccaagtgtttcctacccagtcctccctgatttatacattgtaggaaatgtgtggaaatacaacagatgaagagctctgttctgtcagcaacctttgctctctccctttggcacaatatgggtagataagaattttgactaagccttcattgatattttcaaagtagatgaactggtaagtattaaatactaagataaggagcttatcaaaattataattcctatctaggtgttaacaaggagtgccaccctttgtttgtatttatcaagtgcctttgaatctctagcaagtctttttatccaacactctgtttataaagtatccaccattttctgtgtggtactctgttccctcctgggtcatctcattatttgtttgctcgtttctatttcccaccacgcatctcctcagcagcacttggtctccagcaatgccccgatggcattctctagaccggcaggtatagcttgtggtaccacttcctaccaccatctgcaccgctatgtgcacttcctccatgggagaccctgcttctagatctctgaagtttccctgccttttaaattagctcttagtttgatagactgtgacttctggtgactaactgaccagggcatgaggaatggagaagtgtcaacactcaaggggctactattcagtgctagagagttcattgaataacgagtgaaaggccctgcgcttgagccccagcatttaaaataattttaagataataatggaagtaaagagttggagaaaaggctcagcagttaaggatatgctgagtgttatccctgcagagtactggatggggttcagttaccagcacccgcatcaaacgggtcaaagctacctgtcattccagctcagaggtcctaccactcattgctggaccttccaggcaccttctttctctgtttctctcttctctctgtctgtctctgtctctgtgtgtctctctctctctctttctctttctctctctcacacacacattcatagattgaaaaaaacgataactttcatgggggtggtgccacacaccttttatcccagcaatcgggaggcagagagtggatctcctaattcaaggcctgcttgatctacacagtgagttccagggcagccagagctacacagagaaaacctgtctcaaaaaataataaataaataaataaacaaataaataaataaacaaataaataaataaataaatacttcagagaagtcatagcacatttgaggtaataatttaaaagggtaggaagaaaggaaaacaattgaagcctcaaagcaccatttagcatggctggtgtgatagttgtatgttcgttgctgcacactatgcagaacagcagagaaggaagcagttgcagtcctcacttacagagcaccattgtgtgcccagtgcatgctccgagacattcctaagaaaccagagcagttgtttccccaacaaagactaagaacagagtagcttgctaatttacttaaggtcacacagtaagagaccatcataactagaatctggatacgtttttctaattttgaccacgttccacacatggcatctcatagccaaaaggatcatctctcatctctgcctccaagttagcttagacataacattaatgcaaggtcaaataattactattttattgctccctttgattccttatagcagcagcatgtatatgagtatatgagtgtgtgtgcaggtatgtgtatgcatatgtgtgtttgtgtgtgcatatgtatgtgtatgtatctctctgtatatatgcatgtatgtgtgtgtgcgcacatgcgtgtttcactttggctaaagcaactactattctgtgttcatcagatttctagcttaaatttttccatgaaatctgagaaccaaattgtttccaaaagagatttcagttttcaatgttccctaaattcctatttctcaagtgttagtcagttgcaacctactctggaaacgtagattataactggaaaacgtgttagcgctcttgccattcttcctgggagaccataggttctatgcctgcccattcatttactgacattgggtacatttggccctgcttaagggacagccagggttagtgagaaggaagagcaacagtgcataactgttgctctgagctgaatcagtctctcgggctcccattccttgaagtctgactgatcagcttcttggaaacaacagagagttgaatgcagagaagaaacatggggatttttaaaatggaccacggaagacaggatcttcagctgctgtgtttaaggagtgggtggagggtctaacagaccagctagttaagtcatgtgtgaatccacccaggcagtgcagttgaagcgaactctctctcactagacccttttccttcacacttctctttaaattcccagaggggatggtttgctgtgtcctcactgctgttctggcaatgactctgaggtgagactcttagccgtcccaacagcctttgctttgaagtgcattcttcccttttgttttgctttgttgttgtttgtttgtttgtttgtttctttgaggggttttgagacagggtttctccctgtatcctggctgtccttgaactcattctgcagaccagagtggcctagaactcagatccacctggctctgctgggattaaagacttattcttaactaaattctctggcatagttcaaacattcttttactatagaaaccatttaaagtctcctgggttctcagactagccctccacaaatcccattaattcacaggaacatgacacttttagagtgttaactgtgctttctagaatagtcagtgttcaaagattttcttcggtgtacattgattgatccaagctccttggtgcagataagaacacaatttctttggagcaatggagacttctagaataggggaaatgtgagctccagatgtgcacagaacactgtagaaaccacagggcagggacaccatcctcaacttggcaccaccatcaccctacggatgagggagcaagcctagtgttggagactgctcttacttgctgtatttgtttagattaaggagtgtggagccctcccctctatttccatagtctattaaaagaacagtcactaaaggttgtagagaccagccacctggcccagcagcaccttgggctgcactcaactgcactcagatccctgaatgcagtcagtcaaaccactcacttctgagagagtagcagttatctcacagtcgagatggccctggggaggttttgcctatgtgtatggtgcgactggagccctgcatatgtaacagcagagcaaaggcaggggagcagaaaggcagagtaaaaagcaggaaagaggaatcccagtggggaaatgaaaggaaaattggaccaaaaagtacatttctgatcagcattgtcctgcttacggatgctttatacggcgattttaaccctaaccgcttttctgtcactggttttagatacagatcaagtcagcagttgccacaagggctccatttctttcctctttatgttacattcaatgtttttgagttaaagagaatagaaggatccagttttgctcttgttaaattctgccacatttttttctgaatgtttgaatgagggcctcatctaaatggaactcaacacagattccatggcccaaaggccaggccccagtgggacagtgttgatatgtaagtgctgccaggagttccttatgcagctgagcagtgagtgaggctgtgaacattggtgtggccctcaatctgcagcctctagttgcagatgactgcagacctctctatggcacatctcaagtacgtgagaactttgccaggctgttctttggggtgtgaaggctgccctgaattccatgggaatgcaactctgtgccaaattcagataccagaggtttccctcagggactacagcccatctcaagtacaggaagtggctgtgagaagctaaagcaggaatctccaaagacctggactcagcttatgctctctctctctctctctctctctctctctctctctctctctctctctctcnnnnnnnnnnnnnnnnnnnnnnnnnnnnnnnnnnnnnnnnnnnnnnnnnnnnnnnnnnnnnnnnnnnnnnnnnnnnnnnnnnnnnnnnnnnnnnnnnnnnnnnnnnnnnnnnnnnnnnnnnnnnnnnnnnnnnnnnnnnnnnnnnnnnnnnnnnnnnnnnnnnnnnnnnnnnnnnnnacactcatacacacacacacacacacacacacactccctacacatacacatacacacacacacacacacacaccagttgaaatcagccccctaccattgcttgtatggaatcaatatacaattttataggcagaaaatagcctaatcaagtaaggacgataccagtatgcctgtggtgactagtgcttcttttcatgcttcatgaggtgtgcatagtgcgcacccatgtgttttactctgaccatcatctccaaggctcagcccagggagtatctcaaagacgtgtagagcactttccatttagcatcacagtatgctcggcaagaaaaagtatcaacacagaaattctaaagatagacagggtcccacaagccaaactgaccattctcatcagcgcagaagaactaacatgtgaccaccatgggaggtaccccatctctaataccagttaatcagagtagaaacatttttcaccttggccattaaggcagatattttgatcattctgttcttagtcacaaacctcattacatttacagtaatagaagaagaaaagagagaaccaagggaaagccctactcttctatcaggtttccccgtaaacgtcacttctctcaggaagccagtcagacagatctaccccaaccgacttcccctggctcagctcttctcactcattacattatcccttccagaatgatctttaccctctagtccccaacacattccccagcactttgtaggcacttaagtatgtgttcaataattgatggagcactgaggctttgtgtctaatcttagagggaacgaaaatgaacaagacagagctcctgccttgtctgtgcaggagacgtgtgggtaatgacaaggcagtctatagtttgctgagctgtgcaacacctgtaagcgcattccttaaaggacaacaaagagaaggcacttcagcgacaaaatggagctgaccacgtcagctgcatgtctgattcctgcagaggggaaatagaatcctagttcctaatgtctgacgcttgctactaatgtcagtaccaatactaactaacaactaacacagtatcaataccactagaccaaggtttcacctcagggaggggtgtatcagggagaaatacaggaaatagcatgagtatcctcttgggaaattatttatataaataaatctataaatctaaatttcagaacagaatgcaagtctacagttagttatcttggaggtaaagagtttctcttgttgctgatacccttgtctatcagtgctactgtcaattaaccaggaataatcaaaagcaaaagtgctccccctactccttgtcgctgtgctcctggtagcattacttattgaacatccttagtgtgcttggctgacagacagtgagaaggaagtgaaggctcttccctgggggctgctgattcaatcagagatcgtttagaaagataacaggaaagttcacacagacgactccagcttgctgtaccactgtttgaagccattggagatattttccacagtggaccatcagtagccctataaagtatctgtctctccatgcgaaatgtagacaaacatgtagagcccaggcaggtgcaatgtcacatgcacataatcccagcattcaggaggctgaggcaggaggacttcgagggtgacctggactccagttacagctagattcaggggaggggggatgaaggggagctagaaagatgactcagtggttaagagccctgactccacttaaaggggacctcacactgcaactttagttctagatctgatacttccttctgggttcaggaggcacctaaacatacatgatgcatgcatgtatccattaaaaaataaagactcagaggaggggggaatctgtgaagtgtgtagaatcccaaatagagtctgttgaaaaattaatgaccttaaatgaccttgaacccaacattgtgacctttacaggaaaaacacataataacctcccaaagacagagtctatggaagaggtaaataatttttctcaatttttgtcctttgggggaaattacattttgaaatgtcaattacaactgtgatgagaccaaagaaattttttaatgccgataagagatttttttttttatgaagaggaaagagtaagctctggacttgacagcacagtgggaagtgtaggtcatgttacactacattctgagtttatcccaggccacatgacttcagtgccatcaagtatctgggtggcccatcaagctgttgaccactctgcctcgaattgtctaaatgtgccgtaaaatgggtgacctaacacagttttctgctttgtgataggaaagctagattttatttttgtaggtgagcataataaaaatcaaaatagtcactgcctacttaaactgccacttcagggatgggggaatatttgttagcattttcaaaaattgagaatttagccacagagtaagtgatggcttttaaaaatgagtggattgagccattgagacgcatgttaagttgtttacaggaacctagtgttgctcattccttatagcacaggacaacatcctcagcctggaaacaggtctgcagaccattctgagattgcagatctgtgtgactcttctacccacactgttgcaggcatagtaccagaagtaccacctaagtaaccaaaacagtaggctttttttttaaaacaagactgaatggatgtgttttgcccaaaacatagttgtctaaggtttagagtacaaagaacacaacacatttaatttaacttattgtgatagtattaatgttgtagtcagatttcattgtggaaactaaatacacactctgttcctcacgattgtatttagtttccataatagttttttttaaatcctcacagattggagataaaatatggaaatttatgattatcaatatttggagccaaatcctaagagaagaagtttggaccgaggtctaaaagtacttaactgaaatggagccatggagagacaagtttaatcttggagacacatgggagaagggaagaaatggagcccacggtgctaagggctttcaaatttgcctccttgtttcctttggcagtgcatttccagggccaccgttttaaatacagtcacgttggcttgagatgggactccctgacccttttaggcctccttttgtagtaacaatatagttttacgatgagacaggtcttgcagaaaatcccctccctttggtctctttttttccttgcagtgtacaatcctggcccttggagttcaagcggtttatttagagatgtaaatgttcaaatttaggttcagagtctttgaggtagtctgagtcttggagatcttttccaataaaagtattgctcccttttaacatacaccagagacgtcctttcacttgcaaacagcttcagtagggctgtgatcatactccaggacagtgctggccccacttgtgtctgtgtagagcctctagaagctgggcaccagtagctgcacaggctgacaaggctatgtgagaagcaagctttaactgcacacaaaagtggcccttactttgtagctagaattgtccttggcacatagagtaaacaagagtggtgcagattggaaattgcaaaacccagcaaagaagtgagaaagtctgtaactacttgacaccctcactccacaaccctgcctacaattagttcaagatggaagaaatcaatacaactcagtgtcccacaaaatcttatcatctaacttggctttctaaaatttttcatttgtgtataccttttgaggatgtggtctatctgacccagtaggcaagaaaaaaacaaaaaacaaaaaacaaaaagaagactccacacctacattctgctaataaaattggagaagacagccttgaaagatgacttttctacagctgtgctgtccatgagagcagtcaatcttcaagtatccagtggcagtatgtcatgatagactcttcaaatacaattcaggatgtcaggcaaactcaggagaagcatcagagaaactaacaagtgatgacaaatggggatgaaggagacaacatttggtgcctgggaagtaaaaagggttgaataaaatcctgtgtgcacaaacacccataggtgttttcaacacatcagaacaaaagatgtgaatgtacagcatcaaaaacagaattccacatgcttcccactctcttctcacttgggaaccccaatgttgtgtgtaattgctcctagcagcagcctggctgccctggaggacatgagtttgaaaggctccccagtcagagggagaagcacttcgccagacaccattgcaagctgccctaagactctaactggtcaagcaccaagatctacaactccaaggtctagagaggtcaacactcttgcattctcatagcgccataccacttcccataaggtttttcattacgtaggtctcacccagtcaagagtgggcctgaaaacactcccaagtgtcagtgtctatgctggcaaagccagccccctggtcttcctgctgagccaccctgtgtagacttgatactataactttgcataaagaatcgtattgcctccaaggagacctcttaatgacttaattgcatctggctctactattctgaatatatggctgaataattgaatataaactagcaatataactcaagcttctacccaccctctccattcagggtcctctgaaccctcaggtaaatgcctaaaaggaagcttgtcccaacaggtaaattcaagtcttaacaacacaagtagtgcagaagtaactaacagcagactaatcagtgaagacaaaggtaagaaataaagtcagggaccatcatcaagccccctgaagttaaaaagatgaagtccatctcaccctttgcactgatcttacactgtgtgtacctgcagttgtgaaataaacctacaatctgaattaatcagctattactggcctaagcaatgtgactttttttctaggcagggtcagacctttgtcttgatgctccattcaacctcctaagtgacatgactttatatggtgtattatacacttacatctcctaaagaggacatatggtttctctgaaattttctcttcttatttaattaaagaatagaaatacctcaaacaaatatcttccttaaagagacttttaaaataaagtttaataaaccttattaaaagaaacttgcaaataaaaaataacagcacacaccaaaattagccagatccaaagtctatacagcttaatgaacagagttagaattggtattcaaaacataaactgtgaagcttcttattacaaatttcagtgttgagtatattttatgcacttatccaccattcaaacaaacaaataaacaaacaaacaaaatctatcacaggataactaaaaatatttagctttatgtcgtctttcatgagtggactcatgtccactgcctgcattcaaaaacagatcataaaataaactttaaaaaaaaaaaaaaaagaggtcacataaaataacagaggagagacgggatgggagggaaagacatgggtgaattgcccagcatctcttcagattggcatcagcattttgtattcttctctagaaagtgtctctatgtgtcagagcttaacattgtcactgtaaggcaggtccagggcagggattgtcacagactgccttgtctctacctttgaaaagtcggcccttctagaacatcaaagaaaaccagcccaggtcaattactgttaaggagaaagtcatcaaggaaaaaccatcttcctgccaatggctgagtgagagttcttgtaaaaacagctaatgtgattgaaaacaaaacattgccctcgtgaaatgaagtatgcattctcattctgagtcgggatgctcacacaattaacaagtgacactcctgttgacatttaactatatctaggagaaaacttggtcagccagaaatgtcagtaggtaaaaagggttttagttttatttttgttttcaaagcctaactttgctagtgtttccttcataaaactacccctttcttaggaggaaattgtttattcatttagccctgtttctgagcatgtttgattctgtcagccccttcaagctgtcaaagtaggaaaaaaatgttaaaaatctgtacagaggtcacaaggacctttaaggcagtggcctgaaaccataagcttgcaaaataaggtatttgaagttgttcttgaggaatatataagtgacagggagttgaaataaaatctaagacaagaggcacaattgtcaccacgtgctttctcatcagacatcctttttaatgtgagtgctgctcaaagaactccacagactccaataaacatacagttctctttcttgggctctttttaaaacaattttcataatctatatcttgtttactaacaatatttaaagggtgctttaaaaacaaaatggggagggctggttagacagctcagttcaaatggagagcccacataaaagctggacacaacagcatgcatctgtaatcccagtccacttaaaaccagttgaaaggaagagacaggaaaccctagacgcccccatcttagtcagaccagtctatgaactttgtctgtctatgtgtctctgtctgtctctctgtctctctctgtctctatctttctttcacacacacacacacacacacacacatgcacactctagcccatgtctcccaccacaccttccactgtgctcctagctccctaacctctactctaccctccagccacgcatgccttcccagaatgcaccaactatatatccaactcaaagtctatatgttctgattctttctgaaccactttatcacatttatctaggttaattcttctctatagctcttatttaccacctttgagtatgctgcttactaatggttttgtttatgtcaatctgcccttgctagaattccctaaagtaattccatctgactccttcttaaggttatatacaaatacatacttagcacctcagatgatgtttggcagactgactaaccaatattcactgaataaatgcaagacttttcacaatcctctctatctaacagaatccattcctagagtctggtcccaataatttgtggaatcttgacccaattaaggtcaacatttatctgaggaaatatcattatgcctatcacctataagagcaggcactgtgtctaaaaatgagcatctcttgttaaacaaggtacaccttgtccgggtcatttaaaagccacgcccttctgcctgacttccctcacacaccgggatcacagcatgcaaaggttactcttggggacattaaaggtaggcagagacttgtatgaccattcagatgctgacctactcctgctgcaggagctactgttcctccctggagctcagccttgtactctcatagcggctctgtgtgccagtctcagggagctttcaatacacaatggaccgagacaggaggtacgaacttgtcaccactaggacagatgacgcacggcaaggtctaggcagtgctagaacgagccaggcatgggcatggccaaggaggaagaggaggcctgctcttctctgtgggccaactttcttaaacagggccaccgtgcttgctctactcaagctcttctgagtggggtggtggcaagttgattcctggttgctaacgcttttcttcaatctttttatttttacattttatattttggaaaaggcaaaggaggaagtagggggtggaatccagagtcctggttagtccagggccaacccaaccaaccttcttttgtatctgggtcaaaaacacagacacaagtagccaactttgagtctccaactgtatcaactttgcagacagacagactttggttcaaatcctggctttgtcagtccctagctgagtggttgtcatcaaagagcctacattccagaattcatcactgtaaaatgagaatcacatgtggtaattataaggattaagcagccccttttatgttaagcagttaccatagctcctggcacatagcagttcataatgaatgacaacttccccgaatcacacaagagccggatcccctttacagatactggtgcaatgcatcctggttctttttgatggttgtctctctgttgtcctgtgaagaactttagacctaacaggagagcttcttcacctcattgtctttcctaagtgtgggcatctgtgtggctatgaaagcgaaggagaaacacaggctgctatatataaggcctgatacacaagtgggctatgaaagttttaacatgcctttccctgacctgccctaagacttaataccagttgctatcctgggtgagttatcttaggtttggcataaacacttggtcaaagcaggacaattttcttagtaacattgttggggattaatttttaaatgtcacaagggactaaggaggtggtttcacctataagtttttgctgcacaaataggaggacctgggttcaatccctaataattcactttcaacgtctcacatactttaaaaatgttattagacacttaaacactatcaggcacgtgattcagcatttcccacatcttccatttttaagggcagatgctttaggtctcacaaacatctacttcctgtccactgtgacacaaagcattccttccagtttcttaagaatatagtcctgttgaaatgatggtttcatgatctaaagcatgaattctcatcatttctaaactctggactttggtctatacttagaactcagctgaaacagtaaactatggaggagtgtataaaacacaggacactggatgaagagagggagggtcaccatgtctgagactacagtaatacttaaaaccaagggagacactgctctgtgctggccactgtcccacatcccactgtcccatttgtcactcatttagtactcacaaagattattattttgcagaagatactattattgccacatgtcacaacacactgaggaacagggagggtaattcttgaacagaaaccatgcactgagcaggtaggtgtcacacagtccccctacactgccttgtacaaatgtaatagttaatttgattatacacaaaagaggacattgacctcggggaggccagagattttcccatagctcaaactacaagggcagacaaaagacctgggccctttaaatagtcactctgtgactatttttatttcaatgttcatacaagtcagcagagtaagttagacccgcatctcaccaaatgtctcttctcatagaatctgagagactattagaagcactcttttctaaacagtgttttctggagtagacatgaccagggtacaaattattttctaggctggacttgatcagtggctgcctagtttatgctgtcatccattgctccaagaacatagacacacattacagcactatactgagttaatcacacacacacacacagagggagggggcagacaaacagacagacacattcaaagtattgagagcctttagtaaactataagaaacatggggaagggaattgaggtagtcttttgataacatctttttgtagcctttagagacatctatgtattagagtttggagtcactctgataacatgaacggagaacaaatccagtttgaaagagattcacaagttgagagaagctaagattttttccaagtggtttttgttttgttttgttttgtttgttaatttgtttgtttgcttgctttgagacagtgtttccctgtgtacccctggctgtactgaaactcactctgtagaccaggctggcctcaaactcagaaatccacctgcctctgcctcccaggtgctggaattaaaggcatgcaccaccactgttcagctttcttaattgaataactacttagattatgaagtcccaaaaaggtcataggctttgaaaaggccctagacccaaattccagcattttgagtaagtaaaggggatgaatctttatatgtaaacaggaagcttccaaataaaagttgtcttacttcagatcacaatgggaccactgcgaagattcggtggggttgtgttcacaaagcagccagcctcttgactaaggcagagctagtttgaggtccatgtggttactattatagtaactgttcgttcacttgctgaaaaaaaaaatttattgtactcttcgccaagagacgcaggcatccaggcttcaagctgctggccctgtaggtacatgaattaaaaggcagggacagccctgacttcccagagcctgcccttgatcagagaaaacaggcaggaaaaataataaaacctgcaggatgatctgtgagagaagcagcatcaggacggatgggcgcattactgtaaggaccaagagcagggcctgagattggaagccctcagacccacgggtgacaaaggatggggtgcattcctgtaaggatcaagagctgggcccctaagattggaagccctcagacccacgggtggcagacaggaatggagatgtgcagatggccgaactaagccagaaaacagcatggatcagcatggagactaggactgagctggtggggagagatcagtgaggcgtggaagacagacagaggggtggtggacagaagtgggagcctttgtaggaaacgttgtatgaagtaaatttgagggtttttttttcccctaagttaccaggaagttactaaaaggtattctgcggggatgaagttgggaaggtagcacagttgtgtgtggtttccatgaactatggataagtaagacaccatcctttagcactgaatccattaaccatcttaagttaaaaaaaaaaaaagaggaagggttgtggggaagggtcaccaaggcaaatacacaggtaaagaaaaccacaagaacattgctcttacttcaaagacatgggtaagaactttgcaaaggaaaggagcccacccagctgatacagcccagaagcttagcttagttatgagcatggtttagatgaagataacagcacccctggatactgtaaatagaattagcctgcatactaacaaaggactcccaactcaaggataactagggctgtgtctcccttccttctgtcactgcctattgcagaactcctgtgagaaaaatctctgccaccctttcatagccccaaaaatccatgttctgcaagtttcaaattatttccatgtgctgttcccttccgcgttcttacaaggtcattttcattggctgtgttttgagagcatgcagagcgtacatgcatatgcctcctccaactgtgaactttttacctgggcttccctgctgtgtctggatgcttattgaaaagttaaaacagctcaggaaatactacctcatctcaatggcattagcagttaaaatcgcctagtgtctgggcaacgtgccattgagctacttacaaaggctacatcacagtgctgctcatctctgttccctttaagtggtacaagcctgacctgctccaacccctcccaaagcttgtgttcattttatcctattttattaaatttatgaaagagaagattaccaatgcagaagaaactttctaaacctatgattatttagtcatcttccttttgaacagacattttcctttaaataatgctgaaagtgggacttttttgttttctattttgttggtccttgctgagggtgaacacctggttcaccttattgggaacatggcaagttttcaggaattgagaaacatgctgagtgaagacatgcctgatgtgggggcacatccgggccctgctgtttccagttagcactactatttaccactaggagagactagttagtcaatcagaaagtgccctatctgccctcaggttactcctctactgctctgagcatctgagtggcagaagagcagacaggctgagagcaaagatgtttcttgttgacatttctagaaaaatgaagatgatatggacctcctcttttttgtattacacttactaattaggaatagtttgcgatgctttaatacagaaaaggagtggaaaggaaaagggccaagagaagaacagaaagaaagaaagaagaagaaggtatgttctacttaaagtagaaatttcttgtctgaaagatttctttttaaaattctgaatttccacctaggaagcaagtggcttctcttgtaggacttgtacccaatttgtgccataatttcccaacattctgacatcaaaactagccaataacagacacctgcaccccagaccaacacctcttccaagtttcctatttgaatgatagttctagtatggaattgtgtgtatgtgcttgtattttcctctctggaaacattttcaaaaaagggagcttgcctgccccatgctcatagaaaagggggacttctacccttcactcagctattgaagtcccacttttttcagaaacccagaatggaagaacacctaaggcaactgctccttctctcagttctagtaatgtgagccttcattgctgtgatttacacacttggggcagggtgggctgttccagaggagcttgcatatgaatgtcttcttggaaactggacgtgagttcttaaagaaaactttcagatcaaatgcttcatgttcaagaatcatgagagacacacaggacccagctgccccttcatctcagcttctcttgtccacacaagaactgggaatcaaaagaggctttagagtccaacttcatttgaccacagattcagtagattgttgtggtctgttttcctcttcatgatactgaaacattagttttgtcttataaaagcaagctctaggggtctagagagacagcttggggggggggatggtaagagtgcttgttatgccacataaggatccaagttcagattcccagcacccaagagaaagttctccatgtcttcatgtgcctgtaaccccagtgttggaagtaaaggagacagtggctggccaccagcttagctagaaaccagtgagctcctggctcaatgaagaagcattctcaaggaaataaggagaggacaatgaagggaaatacttcatgtcttccctagccttttacacacgtttgtgcacatacacatagacacacatacacaaagtaaatttcatttttaaaaaagcaatttcagtttctcaataaacaactgcattgtttgctacgctacagcttttgtcaatgttttgaaagaaatagcttctcttgatcccagtcacaatacagccacccaataaacgaaaactcaacttcaaatttaggtggttttaataacaaagaactttaatgttctcccaaggaataccaactctgactgtggtacgatagctttctgaaagggcctcagctctaaggaatcacagcccattgatgctcagggggaacctcagtaccatgctgttctcacttctcattttcttttcattgggtttctttgtttagttggttcttcttgtttttgttgtttgtttgtttgtttgtttgtttcctttagattgagggactctgtaccttcattgttactagttataaagtcataaaatgattgtgcggacaactttgtcctggacaataatgtaaaccatgccaatttctttcaaaactcaggacatacagtctaaaaggcccagatctggttgagatataggaatcaaaatttgtaaatggaagcagccacactaagtaacagaaaatggctttcaggtcatctgaattccatgtacagcagtggtattgctggctcatcgtcctataaagttcattcactttttccaaaaaatttaatggcttgttttgtctacgtagaactacgctgggaaatttagccatgcattgacttggttactgaatggataaaagtgccattgttgtagtgggatcacttacgaaacgttgataagcttcagcacacacagttcttccctggcttcagcacaccagcccatggcttccacatgctcaatgccccaggaagctcttcattcccatgatcctcggttctgtgtcatgctttgtatgaaatacttccccaccctcccatcttagccccgcccaccatagtcatttgccaccctcttctgaagcagactttcagcaatggcttgtgttaggatgtaagacacccactacccttatttgtgtattatcttgtctctccatagacctgtctctgtgatgtgcaagttcagggaccactttctattaatgaggatatgtgggttttttgagagcaatagaacctttcatggccaagctgtatgtgacccaaggacctaagatgccagacactttgtcatcaatggccaacctgggatagtggccccaagtctgctgccttacaccactggaaagtaaatatgaagaaaaaacgtgttaagaattgctacagagaggtagaatccaagcaaagtgagagaggctcctatgagggaagagctgccgacagacagaagcttttgaatttcctatgtccaggattttcaggacaatggcagaagctgggccaagactgaggtcttctccatgactggttcattctctagactgcaacaggctgtgccaatggaggctgtagactgcaggctgtaagcatgcccctacccccgctacaggctgtaggcatgcatctagaccagctagagtgataatcacatgctatgcacccagtcaagtgggttgaagcccactttgcccatctctgattcatgctttggtaacttctggcctgttacccactagaccttagctactgtggccttgccttctccagcagagctggagctttgtgagttgtcaccatgcggctccctgcttaactccatgggaaaatctctcctcctcagccattgttttctgcctctagaaccttgggcaggatattctgaagcctgtgactttttctagttagctttctgggtcttaggtctcaccttcttcctttcagaagggagtgtccatttgtaggaaattgcctcacagcaggcatgtgaaatagatgacagagtcaagctgagagcctgagagaaagccggagctccccagttactaacttacttaaactgtctaaactccgcttgcctcagagcaccccctaacatgagctagtggcatctgctgcccagagctgttgggaacgtgtgagaccctgttatgggaaggatagctctggtactagcagaccttagcaatgtgattggagctggattgctgctctgtaactccaaagaccagcagacaaactctagcagatggccgtgaacagaacagggttctgtttgaacaagtcacctcagaggtagtctgtagctcttgttcaaagttgtctggacatagctgtccttgctttgcttcctactctggggttctgatggaaggctctcagctaaagctgatgagggcccaagccagctcacttagaggcttgctcacgtcctggtcctctcagcatccacctaagttcagaagtaatcacaagaaagcgtggaatttttatcccagaccacctattacaaccctaaaactgtacctattgtctttcttgaaaatctactagccgtgacacacatttgagacagaattcagtgactgtcccagtgcaggtcctcagtctgctggtgagaagaactagggaaggtttgctagaagaaaggaaaaaaacatgctcagtactgtcaactacttgatattagaaagaagaacctgcaaaacctgacccaagaccgtgccactatctagtgtgattccggttatgtggaatggcttatgcagggacaggctgaaagcaagcaaagttagtttcacttggtgcctttaatgtgtggagtgttttctagggagatgtcaggtcaaaggtcttggttctgtgcaatgcagtttattagcatgggaccaacagctcatgttccactgatgctgaagcaggcagtcgctgttgcatttatttatttttttagatattttctttatttacatttcaaatgttatccccttttctggtttcccctccgaaaacctcctatcttaccccctccccctgctcactaactcacccactcccacttccctgtcctggcatttccctacactgggacatcgagccttcacaagacgaaggacttcttctctcattgatgtcccacaggccatcctctgcaacatatgggactgaagccttgagtccatctttgtgtgctctttggttggtggttgagtccctgagagctctggggtactggcttttgcatttagaagataaggaagaggcatgtttgctgtgaccatggatgggaagctgttcaaaaatactagctaagagcaactgtaaagctggtgtgctctgttcaagagtcttcaggagcactgacagtcatgctgctagcttttcgaggagaaaggacatctagttctgtttgctgcactgagatgagggctcgaccctccgaggtcattggcctaaaggtagaaacacagatagaggtttggatgaatgagtgagtgtacagcaaactgaatagactggtggtagaaagaggaatgtatggtaacaaggtcattttgacttatgttgcattcagaaggtatctaaggtcctgaatcaggatgtcactcctagagtgttagcttcaaaaaaaatcctttaattcatttataggtgagggcttataggtacagtgcgtgtctggcatgtgtgggccagcatcacataaacaaggcttgttaacctgcaaccccagcacttgggaggtggaggcagggggattagaaggtcaagataatcctcagtgacataggaagtttaaagcctgcctgggctacatgagaccctatctcaaaagcaaactcacaaatttgagaggtggaaaaacagaaaaattcaggacagtagagagatgctgaaagcagagtaattatgggcatgtatctgaattgggcatgcaaaatataaaataaaataaggatcacagtctagcatcatcccaccacctgggttatctctgccaatcttacaccagtgagattcatttctctcacatgtaaactgaagggtaactttagttggttctgtaatgtccctcccagtcccaacagactacgggtgtctaatagaatgatcccatttctctgctgtatctggtacacaatggcatgctgaagatgtagatgcacacaccaaatggcatacttcatctccagcacacttgctagggcagggcagggctctctgagagcactgcaggggaagtggcttgtccatggtatccagtccttttatggaatgggaagctttgtgcctcccacgtgtaggtctcagcagattgtgaatggatggtagcctacacatatgcaaatgagaactggaaaataattaaatctgaggggagaataaagtagacttgtgaataaacaaaggaaatgtgtgtctccagaagccaagaggtcaaagatacattctacaggttctgtacacactcagccttaagttcaaatgttctaagtccacacttctgaggaaatatattgtgtgtttgactgtgactgaggcaggagatgtcaggcaactcaaaattccagtcttagaaatatccttggagctgggcggtggtggtgcatgcctttaatcccagcattcgggaggcagaggcaggtggatttctgagtttgaggccagcctggtctacaaagtgagttccaggacagccagggctatacagagaaaccctatctcgaaaaacaaaaacaaacaaacaaacaacaaaaaaagaaatatccttggaccctgctgcgtgtaaaaaaggaagtggtcaaagtgcacatgattctcaagcgttaacattattaacgtttaagacaaaatgtatttcctttctggggctttgacttccaaaccagagcttctattgtattcttagaaaacaaccatccaaatgagaggctcaaaggattccgagatagtttcatgtgcagtgccttccccacggttccattttgatgggccagcactggtccccacttctccaagcctctaccacccagtcttcagactctcacttatgtgtgaatgtgaggagggagcttcatcataaccatgtggaaaacacagcaatcatttgctcccaccctcttatgtgaccagaatggaaactttatgtccagggtgagaaagtgattcatagaaagtcacacagcaagccgcacattctctccatttctaagccctctctctcctcaaaggcacactgatctctgacaatacaaaacacgggtaccagagtgttaaacaaagaagctctaatgcggttcctttttccctttttcaaatgagccggtttcaccttttcactttgaggcctttgtcttgtcagcatctttcagggagatgacttacggcacaaagatgcgactttgcattgtcttagcagaagcaatcctttcagtgtaagcctgcatttcctttggaggttgactccaattcacagaatacagcctgagaattgatgtttactaagttggctgtttaaatcatgttcagcgcttggttgcacaggctgttcctttgtctctgtctctgctgcactcgccttcctctttgtgcttgacacaaaaggatggggcccctggctcatctggatagggatcagtgtgttcatgtgtaagcttttcaaagctatggagcaaaggtgtcgtgaaacattagaagtcattcaatcacattccgtatccgtctcctcacatccgtgagaaggcatctgtcatggggctgtgtccttgcttcttggaggagctggctccgatttgaaaatgttatactgtgctgcctttgcctgtctctctttggtgggaggtttgagattagcacacacacccaccactctgacactaagattgctctcttatctcacttagtaaaataactgaaactgatagttgtccgtttgggagattcatcaggatttattctaattctatttcccttacaaattactgaggtctacaggtatggacagagaatagctctcaccatgcagtagctgtattttctaccctcagtgttccagaagccctttcttggtagtgagtggagaagtcgatgaagagagaggcttctatgtgtctattccctgcttgccatactatggaaatggaatttttgagttttggagcagatgccatctgctggatattcaagatactacaacacaaatttatagggccagaaaacacaatgaacagcctgatagctaaattaagtaaactctacttccatggccccaggtagattggaaactctctaaccgtaaagtgtcaatatttgaactttatttttcggattagaatcaatcttgtctttgctatctgtgctcagtgttagatcccagaatttgtcatttagtttgaaggcatgggaacacaggtaaaattcctgctcctgtttcaagaaggaataaatccacaaagatgcactcaaaggcttctaaaattaaagctaggggcaatgtaaaaaaatagagagagcgaatgtggggagggggaatgggcttctgtgggcataaagggcaaacataaaagtgaaacaatgtgtaaaacatcaatacaggctaagcagaggttccttcctctgagacttgaactccattttctccacactgctcctgttagggaactatatgataaagcctttgtagatctgtcttagaattttctattatagtcatattggctggaatacctgttaagcctggccccgccttgggtttccttagctggttgaataaatcatttcacgttttggagactcaatcttcccacttgttagacatgaagataaatgttactgtctgaatgtaaactgctaaaaatgtaatttaaaaaaagaaaacagagccaggaaaaaatgtttaactggtaaggacccgagctagaacccacaggaaaagctaggcatggtggcatactcttaggatgccagggctacagaggcagagacagatggatctctagtcagccaggttcaccagatcaggaaactccaggttcacagagcaaaacagtcacactcaggaacacacacacacacacacacacacacgtgaattttaaatatcagacactaattatttgtctttcctgggcagcatccctctaacatatacctgagttgagttacagcttagaattagatttgagcaggatggtatttctccatgttcagaagaatggcctgaaaaaaatgaagtgaggaactatggcctgcatctggctacaaaggctcatggggtgggtgaatctgtcacagggaaatgttgggagacctacgtgttgctactatagttcctttttaaaagggaccttatgataggatataaaattgtaaaatcaacaccatacatttcttctgtgaggagaccttaaaagcagggcaccaagctctgtctctgcttccactttaaaaacacacatgtatgcccaaaaggaggcaaggagttaacaaaatgcagacagatgcagaagggaagggaagatgcccacaagcacactgatggcctatccacgtgacttacgctgtgtcactgctaatgaagatgctccctttacttccattctggttataaacggaggcacattacataactgcccctgtgatgtaataggagcctaggtacacagaaaaacttctagctcatcctctgccatgttggccctgcctccatccctctagcaccctctatttccagacacacacacacacacacacacacacacactgcccagccccaaaggacatactgctgctgattatttataataactctctctgctcttggcagaacatacaacagctggtggtctattctttgccacagagaccaacctgcctctgccctggaagatggcaagagtcaagcagagcgatttataattgtgtcccagcacctcaattttgtattatgtttatttatatcgtttctttttctgagataatcagcattcctctttgggaggattctcattggagaagcctctagtatagccatccgtggttttcttcattgagtaagacatcttagaactccaagctagaggaagtggtgaccaattcttttatgagagttttagaatcaacgttctacgttttattgaaagggtgaatatgttgtgtcagttaaatgataaatgactttgagtatctcatggaatacatcttgtcttcatgggttttctgtgctcacaacagcacaggacctgcgtgactagggttcatcagctggccagaatagacagttatgtggagttctactttgctctgtcaggaaccaccttgtattaggttaagcttcaagttccatcctagggaaagcagagaagaaagccatctcataagaccttttagcaaagagagtcaagtaggctctggagctacagagagacccaagcagccatggaagtcagtatggtcagcaccgcgggtcttgtaagtgttggaagacacttagaacatggaaaatgcatctaagaccacacagccagacaagattctcactatcaaagtgatgtcatgcaaagcagccttcagttaggctggccacaggtcagagccatggtcaggaaaactgggaaaaggcagagtgggatggttgtacctgaggttttagagtatggcaaacaggagacccattcctgaccagcttgtttatttctgtatgagcatagcttgttaagtataaataatggggaatttcaatttcatgtgtagaaagaaattcttaacatctgacactgtccatgtagtgtgtacttcttggtggcggggggggggggtggtattctaaggcatggaaagtttcctagtgtgtgctgccaagtctgttgtgagtataccgatgaccccaatcctgggcctaggtgatgcctctgggacctttctctcggcagtcactgagaagatgcttctgagagacacataaaaactgcactgaataatgaagggactgagaagtctttctgagagttggaggtggcttgctgctgctgttgttttgtggtacagagcatgatggataccttgtcagctggacacctaggaggtgtgcctctggacacatctgtgagaaatgcttatattaagttagcctttgagagtagcccagtggagttgtcttgactatattggttgacgcaagagacccatcctaattgtgagtggaaccattggctgggcaggaaattctgggttgtagaagagtgaagaaagagaggagaccactaacgtgcatacattgatccttgttctctactcccgaggtgtatgtaatgtgataaggtgcttgaatttcctggtgctttaactttttccacagtgatggtctatgatggaaactactagttatactagttatactagttatactagttatactagttaaacaacccttgttccactgaactgcttttgtccaagtactttatctcagcaacaggaaggaaatgtaagacactgatcctagggattcagttgatccactctagactgagccacatccccacgtgtgtgtgtgtgtgtgtgtgtgtgtgtgtgtgtgtgtgtgtgtgtgtgtacatgcgcctgcttaaaatcaatatgtcaagaaagaaaaccattacaccctgttcttgcaatgtgtttaggacacagtaagcttatgtaagtaagattgttgtcagttcacatacattgcgtgaatataaaataccaataagctcacatcagcttggtgagctagacacctcagggttagaaaaggatgctggtgaacttaggaagagagtagctataatttcctcttgggggtgaggcacaggactgatacccagttaaacctcggtaaaccttgtccctttcctaccctttggtggctccctggtttccctgatgctcccacttgactgagtcttaaaacattataatgtggaccataagaaagagttgacatgagagcattcgcagaaacatccctcagcgtgagcctatgctaaaggcatagcacattaaaaagcaggtttcgataactgtctgggtatgaagagaccactgaaaaggccactgtgaggcagtttccctgtacctcaactcagaggctgtaatagatgcatacagacatcaagacttcacagaatttttggcaatgattaaattagatgatgtatatacgcttaatacagtaagtatcctgcagttaataaatattatctgctataagtagtaacactctgtgttattactgtctgtttctgttcctttcaaaggactgtatgagaaaagaggccttgattggttctatctagtatcctatggctttggcatatcgtatgctctaattagttgttggacagatgggtgggtgtaaggatattcggatacatggatgaatgaatggatagatggattcatagatagattggtggatggatatctgggtaaacgggtaaatgtatggattcttgggtacaaggatgaatgagtggatgagtttaacttaatggataaagcactacagaaatctcaatatgtaaggtccttcccaaattactgcctcacatgcaacatgatggtaatcaagacgctgcatccatctgcagtgtccagcaagggagttcattgggctcaagtaaatgtttatattcacaagactgttgcacccatttttgacaccagcctttttagaaggacaagcatagaaactgtagagtctaggacagaaacatcagatgctcgcctatagttaaaactctgaaagttcttaggccagagaataaagcccatatggggcaaggaaaggacctggcttttaagaaagttacatctcacagtcaaaactcctataagatccaaatgtataccttgaagagtcctctctacatgttatgtagagtcttgctgcacacagggaaattcaaagcatagtctccctagtagtacttagtatctgtagctcccccatccagacgtgttctaccaatgaggggtcagttttaccacattcaatgttgcctagcaacataattgatgcacatcatctttatctgttcctggagcagtcaaactaagaagttagccaacagaaagatgttttgctaattctttggccatcatatttagaattatttgaagctattatttgtgacaacctgagaaaaccattaaaatgcacctgtgaagaattcattcttcatcttgtacctaccacaaatatgtccagatgtagactgacacgggtacggttgtgcttgtcagtctgtacccttcccctgtcagccaagcataaagctcagtgacacttagcaccacgccttcccttcacatcagccttccaccaacagtcccaccaggaaagcccaagagtagctagcacagtggtcctcaaccttcctaatgctatggccttttaacacagttcctcatgtagtggtaacctccaaccataaaattatttcattgctacttcataataataattttgtactgttatttgctatttgtaatataaatatctgatatgcaggatatccgatatgtgaccctcaccatggggtcacgactcacaggttgagaactactttagtacctatccacctgtatgaacacacagcaaatttccaattcaatggtcctatttgatttgaacagaggagctcagccctgagcctcactcctaaagaactttttagtcttccctttctaacggctgctgcagggggagggggagacgaaacgagaccaaaatgttaggaaattgaaaggatcccagtagaagatctaagatgcatttaactgttctgatagagtgtaaatgaatgccaaatgctgttggctggaatctcattaacttagtgcaaagctcggagaagccctcacttgcctggtgcatgttattagccatcgagtatctttgaaagtagttagagagggttttctgttggttgtttgtttctcttaccaaaatcccaaaatgagagacgcaatttatctgaccgtctaaacatgcatgaggttatagagatgtccgttagattagcagcaaatcattacccagaatgcagtggtctacatctctaaccatcaggaattatcattattttgtttgttttgagacagggtttcactttcacagcagtcctctgtctcaacctcacagatggtaggattacaggtatggccaccaagctaattaagaagaacttactttattcctcagtagctacaagccctgcctgagttcaccggaggcatatggtgcagccacaagtaggtcagtgcagcataagttcgaagtctatgtcttgttctattatgccttgtggaaatggtttatgagtagagcatcaccctagatgtcccatctacaagcacagaagtttcccattagctttcaaaattattccttttgtaagaagagagacagagacacacagagagagacagagagagaaagagagagagaacctcactgagagggctaagtttagataaatatactcatcagacaaagagaaaatttcatttcatttgaaatttctccctccattttataaccttttttgaaatggagtttatgatatgaatgaccctcttctaaaaaggattctaaaatacaaagaaaagtaaagaaaatagaggtcccagagtcaccattctgtaccctgtcttgtcaccacccttttaaaggaactagtaattacaactcattacccatctggaagacacgctaaataggttccaaatcggtaaaaagtatttgagatcttagacacatccctggttcattgtagcggaaggtctaataccctttccaaaaatttcaactatatgtttgatctacttacaacattcttgaacacgtattcctgccaagatgaaaaatcaaactaaatccttccaccatggctagcacgttcccacttcttgctgattaattcagctatctgtgccatgaaagcattcgaaactagcaagtgaagctctaagttaggaagtttatttgtcaagtaaatgttaagacttgcatgaggggtgtagaggggcttagacatgttacattcaggatgcaaaaatgtacattctcttgtagtccacactgatctcaaacaaggtgaaaaaggaaacacgctccagctcggtcagataaaaataactgtttccttaggaagaaatccactcaatcatataattactctatgaaggtgaatgtaataaaattttaattagcttcatttccttcagctcctcttaacacattctctcggaaaatagccacatggataaaatgacctacatgtgcaaaagatatatttaaataatttagctgcctgaattaaattaaagtgcagaagtcttgtcttctcagagaggagatggctttcatcagagcagcgtcatcctcccaaacagcgtcccctgaaacatcaaagagcaccatttatgcctttactgtttatctttgatggtattgttttatagagtactcttccccctatacattcttatttttcaatccagattttattgttttccattaacttacagaaattaatctgacttgtccattaaattaggaaaaaataatattattgcagtgtatataggacttagtagcctttcaaatgtgggacgctggcccagtgagttggctccgtgggtaaaagtgcttgccgctaagtctgatgatctgagtactgtaccctgagtgaaagaaccaacttccaaaagctgtcttctggcctctacgtgtgcatcatgccaggtataggcccacacatgcacatgcacgcacacgcacacaggactcctttttgtaatgacagttggtcttttattgtggagtgctgaaggtgtcccagacaggatgtgggattggagttctttcagaagagctgagaaactctgaaagatcccagattgtctaattatgtaccctccaggtcaacattttgtcaagtgggcatgaaagactcaactcattcttcttataaccatattactatttgatctaaccaaactgtttgttagtacttgatggagacatcgagagggtgaagaaagagagcgagccaatagcttcaaatgtttagcatgagcccagctaaggctgaacttcactatgagcgcgcctcctacgtgaactcccaaagcttacctgtgacgtcagtttcttaatcttgtttgtaaagtagggaaactggggctctgggatacagatgagttgtccagggtttcctttcacagtagcagagcaggaatttgaggtaaactgattagactttgaaccagaaggggagtaggtgaagtagcaggagtgaaaggaatttagaataggggtgtttggggaaagcatttttttcatccagcagctatcatttttattagatcttaagtgccatccctgtgccaggcaccgggggaagccacagtgaccaatagttaacaaagtgggcacacggtgccacatgggagtttaaccttccatccactggggtcctcttctcgggccccctgatcttttcattttaaggtccttgccctagcttaaaagttctttatcaagagtaaaacctattacctttgttacttgatgaaatcaagaatgggggtagggggtagacatttagagagaatgctagtgtaggctctaaaatggagttcctttggccttttgggcttctgaggagggtgaggagtggacaggatgtgacaaaataggtgttgcagctcctgggggtcacattttccaccaaaatttccattacacagattctctcctttagaagatattttgcaattgattttgggagacagacatatgggggaggggtagtggagaaaggaaacagggaaggaaggatccagttttgctggactagcgctcagagttcctctgtcctccccagggacactttcccacccccacccctccccccaccccgtgtaaacagagcgactctttgctaatgcaaatttggagggtgggactgtccagcattcaaggagcctatcacctgggtccactctgcaaagctgagagaccttagtccctccattaaaagagaggctgtgtgttaccgaattcaagaggaaaaggaaaacattattctggcttaggcagtacaccattcatagttttgaaacaaggatttttttttttttttttttttttttttttttttttttttttttttttttttnnnnnnnnnnnnnnnnnnnnnnnnnnnnnnnnnnnnnnnnnnnnnnnnnnnnnnnnnnnnnnnnnnnnnnnnnnnnnnnnnnnnnnnnnnnnnnnnnnnnnnnnnnnnnnnnnnnnnnnnnnnnnnnnnnnnnnnnnnnnnnnnnnnnnnnnnnnnnnnnnnnnnnnnnnnnnnnnnnnnnnnnnnnnnnnnnnnnnnnnnnnnnnnnnnnnnnnnnnnnnnnnnnnnnnnnnnnnnnnnnnnnnnnnnnnnnnnnnnnnnnnnnnnnnnnnnnnnnnnnnnnnnnnnnnnnnnnnnnnnnnnnnnnnnnnnnnnnnnnnnnnnnnnnnnnnnnnnnnnnnnnnnnnnnnnnnnnnnnnnnnnnnnnnnnnnnnnnnnnnnnnnnnnnnnnnnnnnnnnnnnnnnnnnnnnnnnnnnnnnnnnnnnnnnnnnnnnnnnnnnnnnnnnnnnnnnnnnnnnnnnnnnnnnnnnnnnnnnnnnnnnnnnnnnnnnnnnnnnnnnnnnnnnnnnnnnnnnnnnnnnnnnnnnnnnnnnnnnnnnnnnnnnnnnnnnnnnnnnnnnnnnnnnnnnnnnnnnnnnnnnnnnnnnnnnnnnnnnnnnnnnnnnnnnnnnnnnnnnnnnnnnnnnnnnnnnnnnnnnnnnnnnnnnnnnnnnnnnnnnnnnnnnnnnnnnnnnnnnnnnnnnnnnnnnnnnnnnnnnnnnnnnnnnnnnnnnnnnnnnnnnnnnnnnnnnnnnnnnnnnnnnnnnnnnnnnnnggtgggggtgggaaagtgtccctggggaggacagaggaactatgagcgctagtccagcaaaactggatccttccttccctgtttcctttctccactacccctcccccatatgtctgtctcccaaaatcaattgcaaaatatcttctaaaggagagaatctgtgtaatggaaattttggtggaaaatgtgacccccaggagctgccacacctattttgtcacatcctgtccactcctcaccctcctcagaagcccaaaaggccaaaggaagtgcattttcccccccccccccccccccgcaacattgtagacaacgatctgcagagcctggcaaagtcctgtgacttgagatagtcattcaccaagacgatctccacacagaggtctctctgagcaaatcagaaaggggctttgcttcccaagcgcagacttcccctccagtctctgtctcccagcctggctaccaggcttgcttgaagaagcataggctgtgtatcattgaaactagttattaatgacaagaaagaaatgttgatggggtgaaggtctcaatcaccttcctgtacccgaagccagggcctcagcctagtgcttctgtcctgagggtgcccatatatcaagaggggtgctaaccagggacgacacacctgccaatcaaatacctggcatgaaggtcttttatagcagatgaagaccaaaaggaaaacacagactcatcttcagggacactgacacctttttctttttttttcccaacacttttcatttccaaagaacacagccacactcaactctgaacaaaactgtaaatagacaaacttgccaaaggacttttatttttcttgactaacctctttccagcactcagttatatcgctgctctctccggctgttagacataccctttttagactattcttacttaaactattcgtattgaaaacccactgtgcaccaaaattaaggtttttctttcaatggcatttataatttaatgagaattccaaatcctagctcaatacttggaacacagcacacatttgataactacatgatgagcaaaaagaaagggaggatgcgaaatggtccacagcccatgaatgatgggggttcgggcagcgggcctgaaagggagtgactgtgagcgatgggataaccaggccttgtgtactctgtcccagcttctctggacatcagtgtaaccccaagaaaacccgacgcagacacctgtagcagatctctgaaactcttcttctgagaagggttctctcctccagacacctcagagttttaagattgaagatcctttgcatcccactgcttatcaaacccttgtctagcaacaatgtcctggacttctaacaaaaaccaagtctacaaagtatcacttcagaaacttccctccagacaccacacccagggttattcccagcacccttactcatctcttcactctcagacaatgatccgtacctgtgtctgcttactacaagtccacagtgagtggcttatacacacacatattacgtcaaacagaatccacagttatcgagatgattagagaattcccatctgcacgcctccgtggaagtctctttgtttccctcctgtgaggactcccatgaggagtaggtgtatctgaatactgccttgactcagagttcctagaacgaaggcaactgccccagagctgtttctcttcctaaagtgtcccgtgtacaagagtcctgtgacacctctttacacccagagtactcagccagccagttgattgtctatatgatctctgttttatccagaagttgcgggatttctcacgcctctgttcttcctcagctggggaaccttctgtgtttcacaacaattactttgccatctgtgcagcacacagactccagagtcttgtctcccaccaatggccagtaaagtccatttggcctcccaggggctcttcttttgtgtcccaggtgacaatatttatcttccttgctgacacttgagaactctagatgaattctttgtgacctcccctttttaaatagtgtatttgtttttaaaggggtacttatttagtggggaagggggctgtggtgtgtgtacagacacaggtgagccgcaggactcacgcagagatgacaagacaacttctgggagtcagttctcacctgccacattattgattcagggtctctctcgtttctgctgctgttttccagacaattgtcccacactcacctagcattttaaacatgagccacttcgtgaggcttttttaatgtatgtgttctagggatcttactcaaattgtcaaatgtaagtggctaaaggtttttccctgctaagccgtttctccagcctcagtcctcttgaagtactttcctgtatctggacagagtgagcattctgcttggacttctgtgtccatgctctcccattactgtgctgattctgtgagagaaagcaagaattgttagaactctaatctacacatgacttcttgtgcccctgcctgtaaaagggcaccagtgtcagctgctgcctttcctttccaaggtcaaactgaatgtgaagtgataagctagtcaatctaagggaaaactgtctttatgtaaacccaaggacccagtcctaagtcagagtgtgccctgtgttagagaatgttcagaggtaggtgataatgagcattgcattatccagggcttaactgagctttgtggtttgggtaaagcaaagagatggagaaatagcttcacagagaggcaagcttgggctggggaggtgactcagtgggtaaagcacttgcagctcacgaaagaagacctgagtcctcagaacccacacatgcatgaccccaaggttccctcctctctgcctccccagctcttgagttacaggtaaatgccaccatggccagctttttacatgtgtgctgagcatggaacccaagtccccatgtcggcatggtacacacctcccagctgcccgtcacccagctccatatctccttttttcttacccgagacgacctgttagagatctctgcatccgcattcccacagtaaagcaccgtcttctccacaaagtccagaacttgagaataacattctcaaggaattcgttttacaccttcacccattcaacatgtactcatcaagcacttacaaaacgctaggtgctctcctcagtgctggctatgcaagggtgaggaagacacacgtgtcttctgccaggttgtgatgtttcagtagaatgcagagactatacgcagtagagacatgcatacaaaatgtgggggctagtttgaaagtcggaggatgatctgttggggcgtgtgcactgtgttgtgcactgtgcattcagatgctgaccactgtgctcggagacctggttgccttatgaaggctgacactgtcattatccttggatcatcttacatcgagatgttgtgtaaaaattgttttccatcacctctgactggttaataaaaaactgattcagccaatagctgggcaggacttccggctccagtgaaaagggtctttggtgagaaccagagagagagagaggattttccaggagatagaccatgagcacttgccttgagcaggtcaccacggagtcagcatgaggacacggatggaacaggagcaaccagagcaagactaagatggcaagtaatggggcacgtggctgggaagcaggcagccatagagcattgccgaggataaacttctgcccagctacagggattaaagcttgttaatacatttactaggtctctgtgtcatttatttaggagataaaaggagcaatagaacccctccccagaattacttcacaatgatggcttcctgctcacggcaggatataaagaaaccctctgactgtaaagcttgggagaaatacaaactaaaggccaggagaagagcactgcaagtttaagtgttgaatttatccaagatttagttatatatttaatatcttacactttcctcagatcattgctttccagtatgtgtttaggagaatgcatcctgagcaggtataaagataagtatatgcacatacatttatatataatataattataatatagatgttgtcaaatctcagtaaaataaataaacgagtttttaaactccattttatagtctcttactacaacacacattgctgatgagtgagacagtggagtggcatagaattcaatttagactgctctcctcaaattcttttatatttttctactgcacaaatgcttaggtattaatagattctttagttctactggtaaaatctaggtagtagtcagtcccagtgttgttcttaaccaaaacatagatttttacctttctctttacttggttactgcatcttttccacagtcccatcctgactcgttttaatcttattatcttcacactgttaaccaagctgcctcttggaatattttatcatgttagcactgggagttaaaatattaaagggtacatttatacagtttgcaataaacagtcaaagaacaaggttcagatgcccagcgagatctcagtggttgtgtgcctgggatctgtgggtgagccacactttctctgaaagcaagaatttatgcaattgtttctggctgggtatttctggtctctttctccttgtgtgtactctgcaaactgtcctgaactgcatggctgaaaatagcctgaagactgggaagttgctgctcccgggtctttgctgcttgactgaagaactctgtttgttcattctttggtttccagtagatacagatacagatacacgcttcggcagcaaagctaagcttgcaagcagctgtccgatcaagtcctatcttataatcatgtataatatacctttgcttctaaatgcatttgtgtacaagagaagagcagccaagatgggactcctggacatctaagggaagtttagccaaagatcctgtagcccttggtgatttctaaagagaaaagaacaggggttcttgtgttattgtgggtggatcatttagctttacaggtttaaaagcaacagagaaagtacaaagccaatttttttctgagacattagttgctgtgaagaaaaacaagccaaagtttggtttgtgggcacagatatcccagcatgcagctgttgttgggcaggcagtgagccctggcatggacctaggtaccttggctccctgcaacagtgcaggaacaacctagctggtgctgatctctgattaaattttcagaatcagatttgaaattatctgctctgctttcatttatctaagaccatgctttgtgctgagggttacagtcctctgtgctgggaacagaggtgggaagatagccggtaggtgggaaggtgctggtaaacaccaaaggtgttgaccaggttggaactagcaatggcagacatgtattgtcattctggggaattgagggcagacaaaatattggaggcttacagctttgtgatttatgccatagcatctcagcctgtgttgtgtttacaactggatttcttaggtaggcaattcaatatatttgtgaattttgatatgaaattctttactcgccaggcggtggtggcacatgcctttaatcccagcacttgggaggcagtggcaggtggatttctgagttcgaggccagcctggtctacagagtgagttccagaacagccagagctatacagagaaaccctgtcccaaaacaaaacaaaacaacaaaaacaaaacaaaacaaaaaaagaaagaaaggaaaaaaataaattctttactcactggcaaaataagaaagggttaatattagacctaaaatccacatgctaccactattgccaaccttgtcatgggcacccgaaatcctttcctgggcttgtttgggtttctcaacaccactgccaacatgaccagccaagtgacccagcccatttcaggggaatgggtggggcttgtgtgctctcagtcagctctgtcccacaatcctgaagatgagcaaatacttaaccattcccggaatgagaggaactaagcctctagggtgcctcagcctgcctcaaactgccctccagggtgcctcagcctgccctccagggtgcctcagcctaccctccagggtgcctcagcctaccctccagggtgcctcagcctgccctccagggtgcctcagcctgccctccagggtgcctcagcctaccctccagggtgcctcagcctgccctccagggtgcctcagcctaccctccagggtgcctcagcctgccctccagggtacctcagcctgccctccagggtgcctcagcctgccctccagggtgcctcagcctaccctccagggtacctcagcctgccctccagggtgcctcagcctccagggtacctcagcctgccctccagggtacctcagcctgccctccagggtacctcagcctgtcccccagggtgcctcagcctccagggtacctcagcctgccctccagggtacctcagcctgccctccagggtacctcagcctgccctccagggtgcctcagcctccagggtacctcagcctgccctccagggtacctcagcctgccctccagggtacctcagcctgccctccagggaacctcagcctgccctccagggtgcctcagcctgccctccagggtacctcagcctgtcccccagggtgcctcagcctgccctccagggtacctcagcctgctctctagggtgcctcaacctgcctcaaactgccctccagggtgcttcaacctgcctccagggtgcctcagcctgccctcaagggtgcctcagcaggccctccagggtacctcagcctgccccctggggtgcctcagcctgctttccagggtacctcagcaggccctctttcttctggtgccatagcacacaactatttttaccacatgtttgtgtgcttgtgtgcttccctagtggatgtgttctacaacagggcttcagccacctggtcggtgacagatttgttctttcttacctattgtgaaagaacctagtggggaaacccccacactgttcccaattcggcgtgcacccaagaatcatgaacagaacgccttgatgtaaaaacactctcactcatggtgagagtctcctaaagctattgaagatggttcaagcaattcaaaaaggcagatttttttttttttggttgtttgagacagggtttctctgtatagctcaggctgtcatggaactcactttatagaccaggctggcctcgaactcagaaattcgcctgcctctgcctcccgagtgctggaattaaaggagtgcgccaccacgcccagatcagacaattcttagaatctgcttaactaagtcatttaggtacacagtagtctctgttattgcccagggcaaatattgaagcccaggtaaacaccaggaacagaaggaactggccctaagatcaaactgtgtgcaagctctgctcgcctggtatcaagtatcaaaaatgatgtaagggattctgggtgcccgtgaagagttttacagtcttattcctatgactttttctgctttgcatgaaaccttttcatgttaaatgaaaagaagcgccagtaaggtaatgaaatagcttgtaaataaacagttcaattaaaagatgtatttgtggaagttttaaaacaaaacacatgcacacatgagtacatatgtgctcacgcacacaggcacatgcacatatgcatgtgcacacatgaatgcacacacacactagtgagttccaggtgtttgaacaactgccccagcaaggctatgggagtcagacgctccactctttggagccagtatgtcagtcatcaaatagagaataaaaccctggcttctaaagtggccattctgtcatagatccagcaccaccaatcccctgcctccaactccagactacctaaagcaatagggcatttaaggccttgaattatttgactgtaattattacactgagttcataaatgcatctagtaaagtagattcagtggttatacttagtctgatttaagaagaaacagctcataagaaatattgttcttccctgaagaaatgaaaattcacaggaggggcaggactaagaataacatggaagcaaagctctgccttaaaccctttgtaaagcatgctctgttcttctgcttaacaaatgcagccttcatcatctttgattctgggaacagtgtcaagcctaagaaacaattggaaacctgcagtgctgtagcctgtcccctgctggtgattctaactgggtccaaattaagtatctcccttccaagtgttctgaataacactcatgacagaagttgggactcagccagaagaagccagaggctgacacaaccctgtgtcaccagggtttctaagaggtggtccaattgtctctactaggacataactctgcccccagctgtcccttcctcttcttcttctgttacagcatctgaaacagaagttgcataatcacaatcgctgggccctggtttcaaaccccttcttgagtaccaagctggctgaagatcatgtccctgtaggacttggaaacagggtctcactgtgaggcctggcatgccacctgcctgtcacatactctaagtgaacatcactactcccaacttgagacatggttaacctgagggactgtaacacacaggaggactaaggtagacagagaccacgtctgtacctcaggatactgatgtgcaaagatctgagtgatttgacagaaactaagcaactgttgtcgagcaccttgtctgtgcccaaggcagtcattttatttagtgaatatttttataattttacctgagtggtatgtataatctaagaaaaatcactaagaaccattttggttatcaaaaatgttaaggagtgagtactcgtccctttcagatcccagcttggcacagtgatggtctttcatgtctcacagtgaagacactggtatcatatttcttttcttttgcatagctttgaaaacactaattagcagtttcattgaaagtacaacatccatggattcacaatccagtgtgaacagggacatgagaatccatctcctaggcttctggtgggatgagacacagaaaggaacatttcacaagtttatatcttcctcagttattaagagagagaaagggattatcatgaaatagaatgtggaagaaaaggcagacatggtaatagcatcctttcttagaagacttgactttcgtttttgttttttttttaagatttatttatttattatgtgtaagtcactgtagctgtctcagacacactagaagagggagtcagatctcattagggatggttgtaagccatcatgtggttgctgggatttgaactcaggaccttcggaagagcagtcgggtgctcttacctgctgagccatctcaccagcccaagacttgacttttcaaatttcacataggttatcttgctaagtaaccgtgataaccctaacccgtgtcaacattgtctccatgccacagaaactgtcagatccagagcacagcacacattgggattattcttcatctctgatgacctctgtccccccaacttgcagtattgtagggctcagaagaacggtgaacagagggtatgatagccctctgtggttgacccttccaggacataaatcaaagtcagggtcattcaaagagatctatggttcttctgacatcattaccattgggcttcaagtgccctgggtccggttgttattgcacaccaggctcagtgaggttttgtgagggtgcttctgcttggcactctgtctggactgggcatgtgctcttctacccccacagctggaatgccgagctctgagcagctgtgggtctctgtaggtatgccctgcacacatggatgcttgtcacagtagcctgtgtgtgtcacacatcatcttctttcctcgggaatttgatttttagtctcatatgacaactgccctgatatttatgggtctatatctggagtgtaggttagttgctattatgttgacctactcattttttttctcaaaattaattcacacttataaatcaaagtggctcctactataaatgctggcaaaacaaaaaaacaaaaaaaaaatccccttcttattttattttttttaggaaatatgagctgtttttttctttatcttagagtgtttaaaaatattagttgcagaacttaagacacacacgcacacacacacacacacacacacaccctaatttgtggtcctaccaccacacactgcctcctttctgacataggtggaattctctagatgtgacttttttgtcttctttcttcttccttttcttacatggggaggtaggggtatcttgaactttctacatagctgagactggccttgaactcactacagagtccaggatggccttgaactcattatagagctcagcatgacctcgagcccagtgcaaccttaatctcacagtgacttccccttcttccaggatgacatagctcttatctacaagcccatcttttaccctgaaatcttccctccccacagctgcatcaccagtctctaagcttccactgaaaatagaaggcagaatccttaagccagagagtatcggcaggagtttgctatctactgagaacctaggactagggatatgagctatgtctcctaacacagtccatttttgagagctattctctcattccattcttaccctatgtcttccagctggaaaactacatagtctaagtaatcctctatagtatgttcacaggaaataatagttttgtcttaattatggtccattttaaaaactgaaaaaaaaaattggtctcccacgtagacagcatccacagaatgtaacattagaaatctggctattgtccttggacttgcagagttttacagtataaaaccaacctcttagatcacagtctgtccttaccaggggaacagtgctgcacaaacaagacgagaaccagttaaaaggtaatttcctgaaatggtctcatgtggaacaaattgaaaatccacagtccttcaacagagaaatctttttcattacttgatcttaaaaaaaaaaaaaaaaaaggcttcactcttcacttccttagcagatgttacaaattccagaaacagacaagggccttcgaactggaatgaaaaattgatccacttaaaaatgtaaaattcatttttttaaaaaaatgcttagaatacagtaagtggggtttggacggaccatgcccctggcttggaagatttctcctctgtttggttcagagtctgtcagtctagtaagtactgccctcacaatgtgaggaatctttacagtcttcaggagatggtccaggtcttagcagtctatggaaacaggatgctgatccgggtgaaactggtaagtttcctgctagagaagcactgttcccatgaaggccaaggccattttcccaatgccatgacacagtcttcctcttctattctattctaacctgtctcctttctccattctaattctatggcctagatttaaaaaaaactccaagtactgaatttttcctcttttaggagaaaaatatatcttattaactacatactcatttaatcattctatcaatatttgagtgtgtgttatattctaaacactttggtgatcaccgaggacatgggagtgaaaaagctagccaccggcttccatggagtttagtggttaaaggagataagagacaatgaaatatgggagcaaaggtttgagaaatgtcatcatggggggaagctggggatactgttggggtactcatcctaactttgggactgggaaagaccacctgagaaaggggcatttgaggtaaaatgtgaaggataaaggcaggtacgatgaattgcacgctgcagcgttccagcactcctccaggtcagcacattatctctgaacttcccttctgccatctttcctctgcagtctgaaaatctcctttagacagttcgtctctcgtctttgcctcagcgaatccacacctttgatagctgggctttccatcttatatgttcttcctgtgtcttttctcctcaagtctgaacaactgagtgaagtggcagtgtaattaatctgtcgatttcctgagagaggtgggtttactttagatgattctggccttggtcacagtcagctcagtttaggagccagactttacctctatgccttctcaccttcttctctgctcacagcttaccagctgcactgcctgtgctttgcctgcaagtgttagtaatataaaaaactaccccacgggcatggtggcgcacgcctttaatcccagcactcaggaggcagaggcaggcggatttctgagttcgaggccagcctggtctacaaaatgagttccaggacagccaggactatacagagaaaccctgtctcgaaaaaccaaaaaaaaaaaaaaaaaaaaaaaaaaaaactaccccaggtgaaacagctttgtcacctgtgtccccaggaaggatgtgcttaggctccctttctattgttatataattcaggatccccagcctggggatcggcaacagacaggtcttccccccttaaccaccctaaccaatatcattcctcaccaacaggcactaaatagtaccgcaagggtgttcccaattcctaggtgattctagatctcctcctgttgacaactgagattaactatcacagccccatagttcctgctccacagatgggagggcccatgtatgtcctgctgagtttctaatgtaatctttcccttgagggatggtggttcagcctttttaatgggacatcttatccagctatttctttgtgggcatgggtgagtgggtgtattgaaattaatataaaaccatttttcaggtgcctctagactacccaaagacaaaatgcacaaataatgactccatcaggaggcaaaactctgtcatctattatctggggctaacctggtctgcctcgttggctacaaactgagagggaagcattgcaggaaacccacccatgaggatgcatgaagcacttcccgtcagtgtcctcatgagctgagagtcctcccaagtgcataagtgcatcctgtccagcctctgcagggcgctccggcctagcccacatgattttccagaactcccgagaactccctacctctgtgagtaaaatgcatctctaactatatccttcccttttgcacaatcttgtcagtctatctatgatgagatggttgcctggttctagttgactacaaagagactataatcatgagtttcaaggttaagacaatactaaccagcctagtccttccctgtggtttcaaacatccttcttaccaccatatgacctcttttagctaagactttcctaaagtctgaaagcttcttctcacactcctccttcagatccctgtgagacactgtcatcctcattgtagataatattagatacccagtttaatttcacacctgagcaaataggcacagagaggttaattgatctatctgaggtcacaaagttgcactccaaatgtggtccttctagctcttcactctagagttctttcctctacagagattcatgggaacttcaaacagtcaagggacagtgatggtgaaataaacccaacaacaatcaatatgctgacagggcccagtgactcttgtcaaacaggcccccctcatcctctactagccttcccccatgagggagaaggcctaatccttctagaactcctctgctctctatatcttaattccaggatgccatctgttatggctcaggacacagatactcatggcccatttaactacactgattagggatagaatggggaaggcaggaaactagggcacagttcctctctgtaacaggcctgcagggcttcaggcagatccagggcagggccttgacatggagaccactgggacagacagacaggaagagtggcagttcagtcagtacaataaagtataacattcaaggtgacctgagccatagataaataaagtggaagagaaactagagccatgactgctcttccagaagagcacactgggcaggtaacttctgagaacaacacagctcagtggcagaacatttgcctagaatgggcaaagccctgggtgcaattcccagcaccacaaaagtccaagacccagaagtcctattttgttcacctttctggctgatacataaacgcacaaccctagaaagtggttatacaataaagccacaccactacagctttcaagagttcatccattcagttttagtccctggtgtctcatctccctgagtgatctccaaggcagcagcacttgcatccatgggagtttgagcccagtagccctttcaccaaaacccatcagataagactctgtcttacaaaaagatcgcaaagtgcttcacatggtacccattaaagattgaggagccaagactgatgggcccaaagcaagggaaatgggctgtaggatagataattgaatatggaaaagcaggcctttataaatctgagtcatgaagtcacagtagggaagaccggaggcatcagaccagaaccacacagaagactccagagaacaggagggagctgctacggagaatggagatgcagggccatgaggacagcgacggagagctgcagctgtgccttttacccacatgtgcttggggaagatctttcttcacttagctggcctttgtcagggtttggtggtgacgtgagactcaaggagagtctttcttgcatgtatttatttcttcttagcaatctgcaagtcaaactgcctcctccttcagaggctcacctactgtctgtccagccctggtcataggacagatctatggcatcgaactttataaagacccaggtgacttctgtgctcttttgtcacaaatacagagagaaagttttagtctagcaatttgacttctttttctcttatttacttgtgggtgggttgtttgctgtattttgggggtgggcaggagtacatgtggaaatgaaaagataatttcttccactatgtgggatcctaggatctaacccacctcattaagtttcctaacaagggcctctatcactgagccgtgtcaccaggcccggactgttgtattaaacagtagttttacttctaagattacaatcacatcctataagaagttgcatctactaaatgtgacccatgccttcagctagactgtttctagcagcttatcaacccaggcacctgctttttttacttatgtgttatcattagcatctggctgctgaactgatgtaatgggtaactgaaatttatatccagggcctagcaagttgtgttaccttagcccaaagaaaatctaagagctacttctgaagcaagtggattctctacaaaaacattttccatatatggctctaactaattaatagaaaaatttgtggttgctggagttctacacagaggactcccaatgaagccattacctgttgttgtttggtattagcagccaaatctgtaggtagtatattcaacttggtttctaaagagagggtggcagccaagattacaccagcgtgattgtggcttcactggtcacacttactatgctacctactgtattatcaaacttgccccgagggacttgatgcccctaatcagcaggaagtagtctaacaataactttctccttttctggcccttgactttattcaggaatctcttttctttcccctctacccttttttctctcttatctagtgttaaggggttgttgaaagggtgggagaaaagggatggagaaggtggaagaagggtgagcccacaaaatagccaagctagttacttgggttggacgcataactctgctctaaaccatgagacctgggctctacctcagtgtcacaagagaaaacgaaaaaggaaaaaactgctgctacatggagattaagcatcacctcacctttacagataaactaaggtttggaaaagcaaagcaatccacctagggttacagtgttccagtgtgcaggccactgattgcaattgcaatcattcaatcacattgcttcatatttctgcattttccgatatgtgcctgtcatgaaggtctacccctgctttataacagggactttggctgtggtagagcttacacaacagctctccgggctctaccccagcacagggctgcctgtgttggcatctctgatgtgatgctttctaagtgaatgaagtaacatctcaagtgtcacttctctcatctgtgcagagggagcactgagggatgctcatggacctgatcggtcatgcagtgggatcatttgtaaagtgtcagtaacaccaacctgtacatctccaacacgtgacagccattcttagtgcttgtggataaacagctcaagttaagcaggatttgaacacaagatctgcttacttgagctttagaaattgctttgatgctctgtgctaactgaccatagttctagagtctccatcatggttgatctagatctttgtttgagaacttgggcttaagccactgtttatagctgtttttgttgtttgtgagcctgtcaagagcagcttacaaaggaaagggttgtttgggctccctgtttgagtgtaagatctatctcagccagcaaggcatgacagccaggctgtgaggcactaggcacttcacacctgcagtcaggaagcatagagggatgaatgctggttcccagcaacctttctcctatttgctccagaactgcaatgcatgagatggccctgcccgcattatcttgggacttccctcttcagttcaactttgtgaagataccaccatagacatgcctactggtgtgtcaccatggtaatcctaaatctagtcaggttgacagtgaagattaaccaccacacccaccacatagcacagccttgggtgctagttggaaagactaagaagatcagatcaatctaactgttgttttaaagtatagtcataagccaatctgccttaactagagagatgtatcccaccagttagaacacgaaacagtaaattgaattaactcaaaatatccagattggatggttttaaaatatcatccgtgaccatgtcaaaacctaaatgcatcttttctataatcctccactgtttcatttgtttgtttggttggttggctggctggctggttggctggttgactggttggttggctggttggctggttggctggttggctggttggctggttggctagttggctggttggctggttggttggttggttggctggttggttggttggttttccacaatccaagctcactgatattagttttaaagatggattctggaaagcttaagttgagagacatttgctttctgaacagggctcctcatcagactcctttgatcgtcataagtctgtgatcatcttatggtctctcttacctaagtttccagtattgaggtagtccttctgtttggtttttttattttttgagttatatatttttaacaatttgagatataaaacaatgtatttagatcatatccatttgtccctcttgtcccagacctcttcccttctctccctcttccttcttgataagtcactgagttcagttagggctctgtgtacatgtatgggcacacggccattcagtacagtatgttcgactgaggagagaccacacccctgaggaaaagggactctcccttccccagcagccatgacttgcccaaagcttcgcagctaggtgtgggtctcatgagtatctcctctgttcattctggaacattaactggcttgatctccatatcacagctccgtactcaagggccaagctgacacttgctatttaatgccctgcttcagctttcacactgtggatggaggtattaaaatcattcattttctggaaatctgtcactccataattctagagttaacttgaaaagagaaccaagtagacataaagaatccccagggatggactcctctcatagttaaatgtcactgcttgttagaaaagcagcaccttgctcatttttgttgttaccagtatttttatagtctttgttcctcatcttttagaaaacggtatcttgtattccatcgtccctcctcacctgactctgacccagctcagtgttaaaagtgagggcaaacaattcttcaggtccccatatcacctacaagacagatagatccacagtgcctaagcccaagagcagaaacacagaaagaaaggagaccacaaagtggctggcattccatcgcctgaggccgctcacggtgaggcttgctcaccccgcaactcttctgccttgagaaacagaatatttgagagaggatttctgaaaattccttgattgcttttaagcgcgatgtttcatccgtcttccaactgtttccatacagaagtgttactgaaggtagccatgttcaccagccataggactgaagaatatcaacttatccgtggtaggttaagggatcagatttccaaggttgtttctagaaaatggtttttaatcaatttcttcaactatgcttgagcataatctagtaagcagatgtgaagtgaacaacttattgtggagctccctacatccgttcagagtctgccaggctcagaatcagagccaggacactgcacagaccaactgccgatgcctgcagcattggaaatgagaattagagagcaggcttcaggcagggcacagtggagctcagagacaggaaacctgccagcctgcctccgctggaggaacacgtgcagcaaggaacaaggaaccacttaatgattaatcactgtcaacctttgttctggtcaaagactcggttgttgggcgagacttgtaatgagggactgtttggagtctgttgctatgagattgcattcaatcctcagtggctggaaggcacagtggagctaacttgaaagtgctctcacagtgcctactagaggtgaggaagaggctttggagaaatctgctcctaagcatcactccagagcccgagaaaaaacagccgagcctaggctcggctcagttgacatgagatttttaacaaattctaaaaaattgacaataagtgaaatagatcaaggtgatttataaacgaacaaagacacactccaaaaatatgcatgaagcacagaagtatacagacagcacataaacacacacctacacgcaacttttcagaaagcaaaatgtaaactgacgtcaccgttcctcttagcataagatactgaattgtgaatttcaagccaggttccataaaaggctggagtctctcttaacattttctttaaagttaaagaggaaaaaaaaatcctatttttgattagttggctttcagacttttatattggcattttaaaaaccttgattttactaacgagaagcattataaggaaggaaagcagtatttttaaatttaaaaaagtattcttctgtgttgaaatgaccttataaaactatggaatttttataagcatttttgtatcattattctaagatatacacgtaggtggaagtattgatatagactaagaagtgtgagtgatacttttagatgagagagagatctttctcactctgtctgtctttctctccctccttcccttcttccctctctccctcctctaacaaatgtatttaccattgttttaatatgtctgtaaaatgtaccttatatcgtgttttataacttgattatgactgttagtgtcaaagtgtcactcatcccttcccttcacccatccacagtgaaatctgaaaagctgagtaagaactgggcctcaaaaaccatcaaaactgcagtgtctggggaaactctcctcccctacctgctctgcagattgccacaagctctccatccaacatcaaaggagattctactaatcccagtgaccagagagctagaagcaacaaacccatcaggtccagtgtctcccagtagatttcctctaactcgttccaaacatggaaaattcatctttcatttaaatgtctaaataaaatccagtttccttggaaatatttatgacctgtaagcactgcaattttcattatattgagactatgttcaaatacgatctataagtaaagaagaggggagaaaggttgttctctcactgtagttatgtgttgatcttataatgtggttatataattaagaaaaccacaatgataatgggtaactggttaagaccttagagctgccagagaatagatcaaccttgatgctaccctctgtcccgctcttgttcaggaaacagcttcccctaactggaacttcataaatcttggtaggcctgcctgatttcctctccttgaccatagacatttacatgaaggagtttgaccattgggtaatgctgtttggtccttgagcacatgtccttgaatactattttaaagcagctctcctgaagtctttaggagagttggaaaatgtatcaaaataaatcacttcatacagaacactgtgagctattatttgcatttaaatagaaacactatagccttcctttactgtgacaaatgcccattggtaactgaccacatttctgattcccctaagaggtacctgtcaaagtctgtgtttctcgatagcctctgaacacttgcgagcttgaaagtaagtgtaatagctgtttctgtgaatattaaatttgactgtgaaatatatccactacataccaagagcctctttctgatttttagaaataataaataaagtaaaattggtgaaatcacctaactatgcagtgttttccccatgcaaacagtgactatcccactatctcttgtcattgacatgaactgcatcctaatttccaaggagaaaatgactaatccagctgccagaaatatgctgaaggcagagagcagagacactgtgtggaagtgttcacctgcattgggaggtggaggacatgtggtggcagctcactgaagaaggaccgcagttcatgggcctggccattgtcacacttggtgctgtttatttatctgaaaccaattaaattacttttcctaacactttaagttaagaactctcattaacatcacgtctaacagtgtagtttagtattaaaacacataggtttaattaactctccaaatactcagaggctgacttttaaacacagagtgctaaagctagccagataccctgaaagcagcaacgtttaaaagcaatgctgacctctgagtggtgtagaagaagcctgtttctatgggaggaaagcagaagtgaatattgtgagggagtcagatgaacatgatgaacctcaactgaaaatctattaagcaaatcaggccctcaggtgagacgatcgagctgtgtcttgctgatgccaaaaccaccacagtagccgatgctgttaatttaagcattcttttcaaaacaacttttttgcaatatgtgttgcattaagctgcatggtgtcagttggtgtggcctttcacatggttggcccaagctctgcaatcttacaggggatgtgaccagttgttgtttttaaatttttgcctcatttccttctcaggatagctgactagcaagacttttaaattctaaaaggatccaattggctcaagtttagtcatagttttgatttaaatgttagatgtatactaaatgagctgttatttggagtcagccggctacttagggagttgcagcggacccagatgtacactctcttaagaagtgccacatgggtctggaaagcacaagacaaagtaaacactgaagattacacaacatatcagtctcctcatatatgctcaactgatcagcagttaggagaataagccacaaatgtttacccagttcaaagatggccggccagttagagttttgatctgtttaccattacaagtaacagaactcaatgcaaccaaccttcccaaattgctgagaaacaggggtcacaagttcctgtccacctgtattgtggagtttacatctcagcctttcatggtgatcttgaccaatattgaccaacaactgacactccaagctaaggcactggctgttatatccaagtttggtatttgtaattttattgaaacttttcattagatatgttactttcttaacacttggataattatgaattgtaagtgaagtttatctgatttttaatcaaatacttgcctgttacttctttgacaagtaatttcatatgtgaaataatctatctctctgagagacagagacagggtcagagaggcagaaaaatcccaaatcctattgaggcaggtggatttctgagttcgaggccagcctgatctacaaagtgagttccaggacagccagggctatacagagaaaccctgtctcaaaaaaaccaaataaataaataaataaataaataaataaataaataaatctacagtcatggttacaaggtgactgcagagtggacatttgtgcagctgacttaatcaaaatagaaaatataagaccaaaaaatcattgacttttctcattcttagagtagatttttaaaaatgtatttgtatagtttacataagtaagatttggtaaataacttaattttctggatattggttcaagagaaatctccattcttttgaaatttgtcccttctagtcttaaggagaatttggtttttttgaagtcccactgaagcatttagaggtttgtatcctaaccagggaacatttcagtgctgtagtaatagagagcacacagctcttccctaatgtcccatgtggccattccaacaaagcactcgaagattctcaaaaatgtcatagaacaccaagttgtttgaagacattagccaggcagtgtgcattgtttactcctctgtagttccaaagtactaagcaaaacatgacaatgaaatagcctctatttctcttttaaaaggagtagcttgtcttagatttgttttgtacattttagtacagatacagagtcaaagcttaaaagttattcctaggaagctgtaggattggttgtttgttctttgattttggttttggttttcttttgtgtacagaactacagaaaagataggccttcttacagaatcacttgagaacttataccagagctacacaattttacattgtgctttctgacatttatatgtgcaaacatgtctggcattcagtctttacatttctccagtgtttcatcgcaatcctctgttcatttacagaagagaaggaacactttgaaatcccctctttcaccccacctggcccaaagccattatttgattatgatagagtgaagagataatgattttgcatgccatgttgctaaagcgtattttagactcatctgagaaatagaaaatgaattgttttcttccaatggtatgtattgttcacttgaccaagtacaaaaggaatttcaactatttgatcagattagaactaagattataatctaaattccacattttaaagttggagagcataaggtcacaaaagtcataaagaaagactaaaattgactgggttcacaggttacaggggccaactcctagacgaatgtacacacacacacacacacacacacacacacacacacgatttaactataaatcaataatggttaaaaacaaatgttaactttcctacatgttaaaacaccacagaccctatcacttacaaagaccatgactctgcagcctgagaaagctaaagtcagggtgccggcatggcatgggcagaggcctctttcgccaatggcttcttccttcaaggcagacagaaaaggtagaatggacctaaaaggagctctgagagtggcgccttgcaattccagtatgaagataaagtttcagtgtgagttttggagggttattcagcaaacactgcttgttagctgggcacagtgaccatgtctgtaatcttagcacaagaatgttgaagcaagaggaccaggagttcaaggtcacctttagctactcagtgagtttgagaccagcctgagctacacaagactccagctaaacaaaagaaaacaaaaataaaaacaaaacaagcaaaccaacaaaaaccatgaggctgaagggatggcacggcagttaagagcatcaactgtgatcaattccctgcacttatgtctgctcacagtgatctgtatcttaggcccagtaaatgaaacgcccccttctggcctcaattggtactgcttgtacatagtacacagccatactagtagacataaaatgaaaacttccctccactcccaacacacacacacacacacacacgcacgcacgcacacacgcacgcacgcacgcacgcacgcacgcgcatgcattacatccattgggaagcaaaggctgtgactgatgtgacattactggactccctcagcaatcatacgatgaactattacttaagggaataacgtcaacaccatttatgacatacagtctaccactgataaaattgcccacaaataccacttcccagtcgttttcatttgataggagcagtattgatagcgttactgagtaattactgctcattgctgtattgacagtgttaatataaaccccacattgcttactttatcgttatttagccaaatgtttgctatctggttaatttaaacagagagcttagtacctatctgaagttggatgcatacgccatgctagtttactaagtattttattcgcttcatgctgcttgagcttaaaagtcttctgaccctcttttaaccccatgcagcttgatgaaaggtggagtggggactttagccaactatgtctgctgcccacctttcaaattgctttttagaacacaggaatgttttctaaacattctgtgtattaacaagctcatttgccttttagaacaagacaagtttctttatttttatctcttctgatttaaatttggaacaataatgaaatattgttattgcagggattaaacaaggtgtcaagcttttgatgcatgtcctctagctttcaaaacctgacagctgctaatgggaaatctcgggttgcacagcactgctgccctcactgtggtcactgtggtgacaacataaagttcctatctcccacccttggaagcggcttttcatgggggctctgcgaggtgacacccccagtttgcaaacactggaattaagaacatgactacacccctgactcacatcctcttctacataggttcccagttacccctgaggagattagcactttaataccttgtgtctcattgacaggaaggtctgtccttgtttctactctgaactgcatccttgttcgttcatatacattttaaagatcatttatacatttatacattaatgcagagagagtccaccatacctaaggactatcctgatgactatacctcagtcatccaatcacattgctgggagacaaatgggcataaactatggagccattgcactactgactgacaaatgctgcggctggcatgggctggtgccttttgtcacagacacagaagagcctcaaccttagggactcaaagaggactgcctgacagacatttaactgagcccaggaaaagcaagcatcagcgggtggggcgggtggggagagcaggcagaggaggaatgtcccaacagacaggattatcatggttcgaatgagaatgtccccatatgctctatatttgaatacctagtcccctggctggcgattctgactgtaagacatatcattatgttcacaaacaaatctttgatgagcagagggtgaacttcacagactgaggtctgtggtctgatggtctggacacacttagggaatgtatacgcttcttgaaacagaagaccaacttgctggtttctgtgtgtgtttgttgagatgagaagagaggcagaattgatagttttatgaaatcttcacagggcatcataatgcaatcgcatatttggccctagagacgaagcgctaaaggccaatttgcagagcagaaatctcaggcccgtcacaaagagcccttctaaagctgaagaatttctcatttaagaaaagcgtctcattccttcccctgagtgagttcgttttttcctgctccaccctgacccactgatgttcctggccacagcccaccccagagacacctcctcgtggagctgctctcacagatgacccataatagatgtgtgccctaaggctaagaatagacaggtcctggtgacttgaatattacgcaatatctgaaagagacctcatttccattggtggaaacagagagaatacacattgcaggctcagactgttagactgttagtgtaaaactctccaaaagaaacacgtctacccgatgatctatctcaaaggaaaacgctaagatcaaaacatgtttccctcctaatcaaactccacctccacccgccccgccccgccccgccccgccccatgccaaaagacaataccatgccccccatttctatcaggcaagatgaaaatctctcaagcaaatgaatcttctcgtttacatttttaaaaatgagtgtgtgtgtgtgtgtctatgagtttatgtgtaccgtgtatatgagtgtgcccatggagacctgaataatgtgtcagtcccctggagctggagtaataggtcactgtgaatagccatgtgtatgctaggaactgaattcaggtcctgtgtaagagcagcaagtgcccttagccactgagccatctctttcaggcggtgagtattttatataatacatttcccaggatttagacatgcactcttcatcttttggctagatatgtgaccttgtgtaactcaagtccttaaggatgggggctatatcttcacctaaaatgtagagttggacagagactttgtaagttccttccattttcagtggatgctatgcgtgctgaggggaggagaggggtagggatggcattaatggaaacacatatcatgatagcattatttattcattttgtcaattacttctgaggatttcagggtcccttccctaaagcactccccacccaatttaatgcaaaagattaaagtttctagcataggtaagcaaggcaagagccacttgttctgttaagaccagatatatttgggtcacaaggtttcagccacagctcttgaactctgtcgttataatatacaaacagcgacaatatgtaagcaaatgtgtggggttctaatatgatgacattctatttagtaaaaaaaggtggccagtgggatgtgaggtacaatctttgtgtcatttgaaactgagccctgaagtttccaacccgagatggaaatgtctctgattttcaaactccatctgcagtaattccctgacagatccctctgcagcgcttgtccttgtgtcaaacaagggccattcaatcatttcagctgcccacagccacctcgccatgcataccccgaagaaatgatttgaaggatctgctttaacagcttagagggaatccgaaagaaaccgctcaggcagcgtgcttctcaggcagagatataaatacatggctttatcagcagccagtgctgaagatgaatagcccgggggaacagttgagcagttagttcattgagccggggaatgcaagaagggaggagagaagaaagattgattgaatagaaacccagtttgtgagatctactgtgcaggttggcccagctgggtactttatcttggatttgttttgcaaattgcagatgcctagaagccaagaaaaagaaagggtagtcaaacaacccaaaatactcccaggggtctctagtaactctaaggactttgttttgtaagaggaaaatcattaaatatcctccttgtagattagagacacagagccatttcaatcagattacacaatagcacatattcttcagctattctttaagtaacaagagcacaatagttattttcaaacgttgagtcctttatgaaagctgctgtgtgtctgtacagctcacaaaactttttaaacaatgactaaattcaataagccttaccatatcaaatatctctcaaggaactggcagattcgattctttgctatcttctgaaatgtctaatacactagcttcctacctctggctgaagtcagttctccatcacagaaagaatgtttgtttcacattagaacaaaataactaaccacatcattcttattttgtagtatctgttagaaagattagtcacatgttggtcacaatatactgagattctttgttgaagtaagatctacgtgccaagcgttgactcttccgttgatcctaagattttcttcatacaaactgtttcattaaatatgtgttctacattgaggcctcaacctacacaaaaagttctaggcacctgagaaaagttgagagtgggagaggtgttcttccccaggaaagagcataccaatcagttgtccagtgacaaacagtcgccctgaaaacatactgtcttagtcggggtttctattcctgcataaacatcatgaccaaggagcaagttggggaggaaagggtttatttggcttacacttccatactgctgtttatcaccaaaggaagtcaggactggaattcaagaaggtcagaaagcaggagctgatgcagaggccatggagggatgtttcttactggtttgcttcctctggcttgctcagcttgcttacttatagaacccaagactaccagcccagagatggtcccacccacaaggggcctttcccccttgatcactaattgagaaaatgccttacagttggatctcatggaggcatttcctcaactgaagttcctttctctatgataactccagctgtgtcaagttgacacaaaactagccagtacaattgaccccttgtcaacttgacacacaaacacatcactagtaagcctcaacccttagtttcttattcatccccaagatctaaataactttaaaagtcccacagtctttacaaattcttaaaattttagatttacaattaaaattgtgggcctcactaaaaaacttccttcaagagggaaaaatatctgggcacagtcacaatcaaaagctaaaatcaatctccaaccatccaatgtctgggatccaactcacgatcttgtgggctcctccaagggcttgggtcacttctccagtcataccctttgtagcacacgtgtcgtcctctagactccagatgcctgtactccactgttgctgctcttggtggtcatctcatggtactggcatctccaaaacactgcatgaccccttcagtcctgggccttcaattgtaactgaggctgtaccttcaccaatggccttccatagcctctcacggtgctgagcctcagctgctcttcgtgaccccttcatgccttcaaaaccagtaccacctgggtgactctaacacattaccaagtcctgctgcagcacaaagtagaactttggttatctctggaacacagcctctttgtgctctcagaaaacacttcccagaagatgtcacctcaatgatgctggtctcttcttaatcaccactaatttcttagctccagctaaccagcatcaatagtcccagtaatgcaaaggtttcattttactagttctggtatcttgttaatcacagatgattcttcagccccagctaaccagaaccacagaatctttacaatccaaaatagcaatggccctgaaaagagtctttaattttccctctgaaatttcacaagccaggcctccattttctgcactgttctcaacattatcttccaagctcctatacaacatctcacagagctcttaacactgaatagatcttctggcccaaagttccaaagtccttccacagtcctccccaaaacatagtcaggttgtcaaaggaatacccacttctggtaccaatttgtcttagtcagggtttctattcctgcacaaacatcatgactaagaagcaagttggggaggaaagggtttactcagcttaaacttccatactgctgttcatcaccaaaggaagtcaggactggaattcaagcaggtcaggaagcaggagctgaagcagaggccatggaggaatgttctttactggcttgttttccactggcttgctcagcctgctccgttatagaacccaagactaccagcccagagatggtcccacccacaaggggcctttcccacttgatcactaattgagaaaatgccttacagttggatctcatggaggcatttcctcaactgaagttcctttctctgtgataactctagctgtgtcaagttgacacaaaactagccagtacacatacatacaagtaaaattatacagacttaacaggtatatatgtgtaatcaaatacatacatgcatgcaataataattgctgaaaaaagaagtcatgaatttgaatagggagagctgtaaaggagactttggtggaaggaaagggggaaatgtaattaagttattattttagcaaggaactaaaagtagaaaattatacacacacacacacacacacacacgcacgcacacacacacacacgtgtgtgtgtgtgcgtgtgtgtatattctaaagctggatgagagagtacacacctataatctcaacatacacacatatacctcaagtattaaaacttatgactatatattaaatgtaaatgaagacagggtaggttagcatcaaacattatatcattagaacttaaaacagtaaaagaacacataaatgaaagttacttcaattattttaatcaggtgtgtatttgtaacttgttactaaatcagtctttaattccaagtttctagaaccttgggttttccatgctgataacactaccacaatggaaatgacatgattgtttactgccacacgagcacatccatacacacacagtatcatggaaggtgaggacctgccaaatttaccatggcttccatttgccctctaggaggaaagatgtattgggtgaggggagaaccggctgatgtctgtggtgttgagttctccatgggtgaatctggggtagcaataaggctgaatgtagaaactagagccaatgcattggagcatatttttctttcaaaatattttatgtactgcagtttgcacaacatcttggcaatgaaggcatgtctgtgaaggaggtgtcttgtgtttcacagctaacataagggcaaaaatatgacagcagctaaatgtgacttcaatcacgaactgaaagagtgtgtaagagtaccatgataaggtctatgaggtataagttcaaaggtaaaaatatctacaaaattccaagagaatttatttctccctctttcttccacaccaggacatgtccctgtgctccaatactagtttcaaatttggacaacacttgagactttacggaaaagggtcctagaatatttttggtattgtctaggaatgaaactaagtttagaacagtccatctgtttgattagagagaaaaagagctgcgttttcttggcatgcacatcctttctaaatctcagagatgggcgttgttccagcttcctctggaagccattctgaagctatcagcctgccaacactgagctcgctgtccatctccttccttgtagttttttgaattatattttatttcttctttggaagtctcgtgtattgctgcaatgcagtttgctcctgtctagcctttgcttccttccaactttccctcacttgcacctcccagtccttcccaacttcatgttctctcttttttgtgctattagtaactccaagtccgattggtattgtggatatgttcatgggtgagggactatgccctgggcatggacacctaccagtgtagtttgtaaactcatgtgttagctgagggtgtagagctgtgtgtccccttccagttccaaatgaactctgcatgtctgatcaagcttttgtagaacagctttcagtgacctgcacagctaacttatctgcttcaaaaggaaaaagataaaaataaacatgcacacttgaaataacattagtagctatgagtgggcatcgttaaagcccttccttggagccagtcatttaatcatcacagggcgttggtgacatcaacacctcaatcctattgtcattttccctattcctgttttacagatgaggaaagcgaattcgcttcttctaggtgcccatgtaataaatgctagaatggggcatggaaggggcaggccacaccccagagcttttgttcactatagtcatgcaaagagattctttaaaaagtcctttgacatttccaatggtcctttctctccttccaccctgcctctttcctcccaccacagactctgcttccctctcccttatctgagaagtcccaagggttctgccctcagtcctccctgtcccccaccccctgtatttcctactctgctttccttccaagacacccaactctattgattttcctctattccactctgccaggggctcaaaagcccttgtcttcaagcctatattcctagtggcttgtaagacacatagagacaggtgacttccaggcgctatgtggatttaaagttgaaagaaggtcacaaaaaaaccaaaaatgactgttttggtcatacaaaattccaccttcagtgattaccgtctcagctcagagcagcactgtactacaatgagagggagcattcttcagtcaggctgacctggctccaaagcctcctccacttcacacctccagctccaaggtctccctcagctcagatagctcatctgcaaaatcaaaatcaaaatactagttctttttcattttggtgggaggatcagataaatggtgtaaagcattgaatgttgggtctggcctgtgtgctgagtcttggtgtttggctgtccttataattattcgagatccctttgctgtttgctatgctacaagatccagtttcctattgcaccagggttcagactgacagctttctaccaaaaaaagaaacaagaaaaagagaaggaaagctcagaaggtaatagagtacaggagaagataattcccaggaatgttgcagctcctcactactcagcaccatgaaagtcctgctgggatctgctgagtacttgctgtctgcctggagagtgggagttggactgtttgcttctgtgtattcatggttcccagaggcaccatgaacatgagctggtacatgttcaaagtaacctgcctcccagtcactgccatcaatgggtgaagagttttctaaatttttattttataatcttttgtttgctgtgttttgtattttgtgttttgagacattgtctcctgtatcccaggttggccttgaacttgttatatatcagaggatggccttgaacccatgaccctcctgcctccaccttctgagagctagaatggcaagaatatttcactatgcccaagctgaacttataattcctagcctctgtaatatgaacatttcctatcccttggttagatatgaatctacaaggagaccgtgttttctagtcttcttggagttctactactacagagctctgcatacttcactaggacataatgatacctcagagggcttagctgctgtccttgcagagttctaatgtatcaatgcctaaaaactggtagatcctcagatcagagtggtaacttccaaatgtccaatattatttgatatatgacattatttcttcatcattgccagtgagtgggttgtccccttaccataaactgctgtgaaattaatgagtctctaagtaagtagacaaatgtctcctgcctcctgtcttctgttcagaatggctattcaactttaaacacatggttgggaattccattttcattgtagggtcagaaataacaaatgcacactcacttgctagagaaaagaaatggctgtcactctgcgatgcctttgcttcagagaagttgagggtatcactgaatattttctttgaggttccataaacacctctggaatgaggagactactaagaggctgggggagcttatcccatgatactcaccgttcaccttcctgctctgcttgctgtgttacacaacaatggctttcaaaagctattctccagatgtccaagtcattaaccaaatttgatctccaactggatgaaaatatttggaatctaagcttctcatctttgtgctccccgtgtcttctttaattcacagtagcttcccctcctcctctcccttctacaggatcaacacactgtggtaggccagaacacaggccccagtccaagtcccaactcctgctcaaatccaaacactggaagtggttacatgaactcccagcagtccctgttgaatcagcagatgatggggaagaaacagaccctgcagagaccaaccatggagcagaagcagcaacttctcctccagcagcagatgctggctgatgcggtaaagctttctctacttctactgtagacacttgttggcctcggagagataaattgtcctctgtcctgtttcttgccatgttctagtcctctacttatgtgacagcaaggaggatgtagtggatacaacagaaactgaactgtatgaatttaaagtgcaggggagcaggggaaagcccgatttaccatctgctaggcacatggagtcctcagccctcatggctagccctgcccagttcaggaatgtctgtggccagcagggcatctgaagcaagcaaaggaaagctcagttgttcccagcctcaaggggtggaaatagtgaactgcactttaatcacccccaaccccaaactgatttttagaggtaaatgagttttaaaggaaagttttaaaggccagcatggagtttcaccaccaagatttggcttcccccaaagcaaagcatctcagaatgggggatggttttcaaaataacattttaaatgaatttccacttcactatctttgcctgatcccttaagaaccacaaggttgttttccccaaacaccaccagagctttagccttggttccgtatttatgtacacactcctctgcatcctcagacatcagcatctacgtcagccaaaactccatgtcctaagactgcagcatcctctcccttcagcctgccctgtccagtgaaatcaaaagagacaaagcctagcagttcagggtaaatagacccacactgaaagggagcgtgaggtcaggtggtgcagcgcagtgatagactgtttgcctggtctgcctgaggtcctttgtttgattcccaacagtgttagatgtggaagatgaactaagtcattttatatacaaggaactttttagaaacagccctaattatcaagtgttataaacaccataaatattcagcaaatactgaaagagcatgaagatacagctacaaaccaaagaacctcttcccctctcgttgccctaatggatctcacacacacacacacacacacacacacacacacacactcacacacacacactcacacacacacacacacactcacacacacactcacactcttacacacacacttacacacacacttacacacacacacttacacacacacacacacacactcacacacacacacacacactcacacacacactcacacacacactcacacacacacacacacacacacacacacacacacacacaccacatacataggctattgtaatgcatatgcttaaatgctgtgctgtaggaattgctagaaatggccgcagagaagaacctccaaggatcagaaggttcagagggagttggagggaaagcaagtgggaagggggtggggaggttgtcatcccaatccaaagatgtagaacactcaagacacaggtacacaaaggacacacatactgtcaaggcatagagtatggtcacggatggagaagcatgacatggaggccagagaagaagcctgcaaaattacaccgtctaaaaagcaactgcttttcaaaaaaaagaaacactgtgttcagatttgtatccaactaaagacagaggctattaggtatgtccagctccagtttgaaaatatggcaaatcatctcccaaaatgaggtaaaatttgactttgacctggtaagactacagcattctgatagaaatggtggaagccacagtgttaagcagagggcagaccaaagaccaaaggaggcagccctggtttctacttactgattagttgcagttcgaactagtaacaatgtagcaagtacaggagtctttaaagaattgcatgtggaagtgagcccttaaactacagggtctgaaatctgtgttcaaacctgttcctcccgcctccctttgatctttataacctgaatagcctagaaacaaggatgaagaggagagagtgtcatttccaactgacttactggcaagactttaatcattcccatcgatactgcaaatttgatcagttttacacgatggtgttttcgggttttctgcttccctgattaaaagtgacacacacattcttgggagccggcgatggtgctggcctgactcccactggcttccctgttgagtctccctggacaggtgcaaggggcagtggtgggttgaatgagaacggagctgcactttctgtggtccttacaaagcatcccacttctctttgtctggatgcctttgagggcgcctatgctttttagcatatccaggaagaagcagcctttgacgcccctttacattagcatatgctttgtagtcattcaaggccttggcaaggccggacaggcaccgtatagaggcgttttctcataaaagttcgttagtctctctctaccattctctcaccagtgaagcaaaaaaaaaagtgagaccagttgcagttcctctagtgatcatcatcattacaaacacgcattataaacctactgtgtgccaggcgccatgctgaggttttacagaacaaaaggattcatccttctacaggactctgaaagagatcctagagcctcctaaatcttacacttttatgactgaggacaagacgaaaccactgtagcaagagacactgggctatgatgaaaagctcttgtcatttggcacagaggtgatttcagtagtaggtgtgagtttagacgggagcctcactgtagcttctgttcagtgttggcatccgaacctctctggccttgtagcatggcaagtctgtgctgtatacataggtatggtaaaacatagagttttaaggtttccagaggtgtatatgttaaagctttcagcagattagctcatcagttggagaagaaaaggccaattgcttatgatacattaagtcaatctggatttgaaatctagtgtgtgattgggaatcaaggaactaattgtacgcgcatgcacttacacacacacacacacaactgcttcttagaaaagggatttcataagatcccgttcttggcttaaacatcgaaactttcacgttacacacatgttaacaacagggttgcttgctcatagccatactgggttggtggagggcaccaggttcttccttaaacagttagggtttagacaaaaccactccacactgaccactttttcccttaatttgtaaaactgtgtttaaaagaaatgtaatccatatgtttctgattcatttacacttagctcatcgaaattatgttttatatgaattacttggtgttcaaaaacactctatgagtcttttaagtttctttttttcttagaaacaagaaataaaattggtttgctgttattttaaggcccttccctgccccctccgagcacacacactccactaagaattcagagctgagtggaagctgtgagtttgggtggtgcagatgcagtactggctctggctgatggcctgcctcatctgtctgttacaggtttctctgtatttattgactttcctctaatttcagtcttatgtctctacctacgccaattattcttatctttagaaacggatattgctttatagtgtatacagaactgcactgaagcaattccaaaaagttcccaaatgcacagtaaggaagaaaagaagcaagcatttctgtcctaagctgatagcaagcgcacagctgagccatcttgtttcctatataacataaagcctcaatgcacaccaacctcagacagacgggcttattctgatatcatgataaactaagaccaaataggccacttcatgatattttctaaaagcaaacaaggtaaatatgtgacctccaagccctagatgatgtcctctcctgctaatgggcatggccacttctcccatcaatctagaaaaagaatccacttaccaaggtcacccacgcccaagtcttatgatagggtcgttttcacagccctcctgagacagctgaggctcctcactgcccccttgctgctgtgaataatgagagcactgggggtcagtgacctgaaggtggacaaggtgttggctatggcaaacggatgtccaaattcacttattaggaaaaatctaaagatagctggttctgggacattctgtgcttttccaacaggacattgagaaggtcttttattgagtggcatgaaagattctgagttcccaactctggaatttgttgtatctgtagtatttctgtgtgaccctgggcaagttacttagcctaatgaaactggccatgtcctcttttaaatgataatagtcaccattaccttcaaacatttgctaagggaaggtagaagagaagtcctgtgcctatggtgcctgaaaggttagcaagtctcttgaaacctcttccgtggagagttggtggggctgccagaccaagttactgacagctcaggtgctctctgttgtatctggctggccaactattttccatagtcaacagacaagaaagctcatcagacacactacaacacagaacaaacccacagacatttgttatcattgaatctaattagcaaatgacggaaaggagcatgctcagtagacacaaagcaggcggaagtgtatggaggagcagaaaggacagctccatacaggaagtgattcagaccgaaagtcctgcctctgagtttacactaccacttaacccgaaacccgcacagtgaagtctcccagctcctccaaccgagtcctcattacataggctgtgcttgcttcaagcttgtggtcttcctgccgctactcccgagctcgcggatttcgggtatacaccgctgtgcttacaaaaagtcattcttatacttgtacctttttgactatcatgcagattgtttttagtgtaaaagtgttcatccaattcaatatgttttcatttgtgttttcaaggagaaactttcccctcaggatcagatgaacagacatctgacaaggccgcccccagactacaaagaccaaagaagaaatacgggcaccctgcagccagctgctcagtattcgggtaagagttctttgaaacaaatataaatcataattgtgaaaaagcaaagcgattctctttcccctattttctttctccatcttggagaataaatctgccctaaacctttctctagctcccatttagctttcatagccaaacatctagaactcagggttgtggcttacacctgtattcgcagcactctcgaggcaggaggagcactgtgaattcaaggccagcctgagctacatagtaagttccacgctagcccaaattatattatgagattctttctttaccccattgacctcagagagctccacgtttagtcctttcatgagttctcgtgcttgctcggtgattaataccttcactgcttgtgagaaccttaaaaacgtgaatattttctaactgccttgttcatccaatgttgactttgacccagacagtacaaggttaagaagaaacatctcccttttagaacatgtgctggcaactttcacaaggtctttcctcattccgcctttgagcccatctccccaagtattctcctccaaagacagtacaccctgacaaccaggaattattaaaaagcagaacatgtttttaatgaagcctcccttaaccaaaggtgaattctgcttaagtcacaaaaccacagtttttaatcactctctttctcataatgaaatgggtggaaaggagctgcggtaactgaatctccaggctgggagcatagggtctccccagtgttgtcagagtacaggcttttgtctttctgctgccttagcaagtggctcctgtcctaagggctgccttgtagccaccacagcagtcacctccatatccattttccaggcagggagaggaagggggagcaggaggagccatgcccccttgtaaagcactctgctggggcctctgcccacttttatctctggccagtggtgttcctgtggattttccatcagcaagaaaactcagagtatgtgctttgtcacatgaccacattgctataaatatcagggcactgtctgagaggaagacagacacaggacaaggacacccacccaatcgctccttccaagcaaggcctgtgcttctcctgagagcagtcttttgcatatcaccgctgaccccaaagcaagtaaaagtattttcttcctgtaactctgagaataaaacaggcacagcagagcaagacagcccccttcatattgctttaaatcttaacattagtccagaaacaattcttcctcagctattatatcagggtaaagaacaaaaagaatgtcactacttatatctactacacattaggggcatctaagtcttacctgctgtcttgtgagctttacagaaattccctttgctttggctcttttcaaatgctcttttctggactggtaagatggctcagtgggtaatggagcttgctgccaagcctggtggcctaaggtcaacccacagaccaccacactggaaagagagaaccacctcccacaaattattttttgactttcacatgagtatggcagcattctcacacccaacacacatacacaaacacacacagaagtaatcaaatgtaaaatgcaaaccaaccaaacaaaaaaccgctgcctttttcatatgtctccttagggtgtaccatttgagcccagggtcttatattcggcaagcatcctcctgttgagcagcatctccagcttttaaacttcttatttttccccgtattatttgcatagaacaaattcctttgtcacaaaaatcttcagctgcaaagatgacattgcttaaattcatagccccttgctctgagttagcctgatcatacaccaatgtgcagcacaccatagaggatcttggtgaggaggtagaagagactcctcctgcacaaagaacttgtggtctggttagggatgcgctttgcaatacagaacaaagcgactgtgctgccttggtcctgtcttttgggttgtacatcataatgtgttgtcttcaaccaataggtggtttcttaagtggtcacttgtgggcatgatctttactcttatctcacacgtgtgcatgtgtgtatgtgtgtttctgtttccatatcttaatgaaagtcttgttcttccttcaatctctttcattaaatcattcaaaattcaattggacaacgattctgtcagccattgtacttggaatatagctgtaaaccaaacaagagcaaaggtcttcccttgtggcttagttatctaagggacttctttcctctccatttttgcctctaatcttatttcccagggttacttcaaaccttactgagccagggatatttcaatgcatttattggtcactgtctgttgaatggagccaccctgttcatcaacttgggattgcccccatccaatcatttgttgacaggcatcagtttcactctttagaggcttactggattaccttagtgctcaatggaagggtcaaacagaaaatagcagacgaagaaacaagacaggacattaggaaaagcttcacatcagagcgtcaggctcagtctgaaacctgaggaaaatataaagctcggggacttagtggccatcctgggagcaggaaagagatgagcaaaggtggctggtggtgtgttccagagaggtgcggtagtaaccacacagcctccagcaggctttccatatggaaataatcgccagagcccagattacaccaaagtccagatgcttgaaactttgtctgccctttggatgcagggaagccactcacagcagcttcctgaatgagggcgatgcagataaagaataaatcatgattgtctaggccaaaggttaggaatattagtgtggtagccatgaataggatttatctccacttcctcattgtgaccctggggtgaagagtaacctggatttcatgacagctagctaactaaagttgtaatcttcgaatttggaacataataaaaataattcaaaaagaaagattgattatcacttcagtgacttcagaagacaaaataaaaaccataaaacagaaccatcctatttcactatgctttctgtaatgtgtaggctcttaaccaaggagtggcacaggacaatgcttccttccaaatctcttctgttcttttctgatatgttttttgtctaaatcatcttgcacacaaaagtagttctggagatgataagttgttcaagctgcaataagagatgtggtactgtcatgaatgaatgtgattctcttctctgtcttaggtggctcctctacagtgagtttaaactctaaccaggctctgacaaacccagtttcaacacacaccattttaactccaaactccagcctcatgtctacgtctcatgggatgagaatgccattgttatctacagttcagaacatagggatgtatggaaacctgccttgtaaccagcctggcacctacaacgtcacttcaacaatgaaccagctgacacaacagagaaatacaactcaactgataacaaatcagaacaaccctctgatgtctcggccatctcccttaggggcaaataacggtaacaatgtggccacctttggagctggatctgctggcagttcacagcaattgagaccaaatttggctcacagtttgtcaggcatgtcagcccagaggtcatcaactgtcatgatcacagccaacacgacagcaacaaactgggcttctcaagaggtgacagggaaacaacaggaagccctcaaatccacaggagtccggttcccaacaagtacacctgcagcctataccccaaaccagtctttgcaaccaggagtagggagccagccattttcccagagggcagtggcaccccctagccagttatcgccagcagtgcaaatgagacctatgaaccaaatgaatcaggcattaaatgggcaaaccctgggttcactcagggggttgaacctcagacccaatcagctggccgcccagagcctgtctaatatgaacccatcagggacaggattgaatcatcccaggacaggcaccaaccagcctccatccctgacacctaacgcttttccttcatccaaccaaagttccagggcttttcaaggacctgatcatggcagtgatttagcttttgacttcctcagccaacagagcgacagcatgtgccctgccctaaacagtgatgctgatttcatcgattctttattgaagacagagcctggtaatgacgactggatgaaagatatcaaccttgatgagatcctgggaagcaattcctaaggtggaaggaagatgatccgcaggctctgagcagggcttttcaaggatactgtaatgccaaactgctgaagtctgggggaactacagacctcaaaacagaaggttggcgggaaccacagtggtgaacattttgttttacatgcttgttttaaaaaatcttgagcctgatagtaaaacattgggattgtttttccctgcctgaacttcaggatatgtaatccagtttatccaaacacaactgtgatgctgatgtgtaattaattgtgtaaattggtcttcccaagttccttttctcagtgaaggaagtacaatagaacttgagacctgtttcaatcccatatcataatagacagatgcttgttctaaacaacaggcagcagactgtcatctagtagataaatatggtttgacttctctgttgttatttgtcttgcaggaaatattgaaatgttacatggctgtgtggagtaacctaagagggattcagagaacctagaagctatccagcagattaattgatttccttcctagatgcactcctcatttttgtaactttcccacgtgttttgtattttggtgagatgctgtgtctcatgataaaacaggaatgcagggcttgcaacctgactggggcttcactccctcccattttttttttttttttttttttttagataaccaagactggtcctgattatgctgaaataccagtgcacaacagcctgtatcgaatttcacttcaaaaaaaaaaaaaaaaagttaagccttgccatgtaggaaaaaaacatggccacgaatgaccagcagtgttgctcactgtgattaatagccactggtctgttcccaagcagaatgaaatggagcctcctaggtcttggtagccagagactggtttgtaaaaaaaaaaaaaagaaaagaaaagaaagaaagaaaggaatgaaagtgtgaattagagtcagattagagaatatcctgttttggttgaaggtaagaaacagggagaggcatgagagggcacgaagcatttcacagagctcagaggaaacagtacctgacagacagtatagcttttccttggacatactacatggacttaggtgagcagctaagcccagtgtggtctctgtggagccacccactcactattcatgatgcagcaagcccttgccatatggtgcctggcccttcttatccaggtttcctccctcagggctgagtgttatagcagaacatgcatgtgtctgggtcacggaacctcagtgcacacatctatgtacactgcaaagtggagctggtatccaggtttgaaaggcatctaaaagagcactaccaccttcctaaatccagagaatcaaaggctactttcaatctttgagttagcaatgcacacactaaaataccaagtgtgattgacttgaagttatcaagcacctgatcttcacaaacctgttcagaaaaggaacacggttttttaaagctctgcaaagtcctcttcttgtctttacgatggctttgggctctctgtctttcccactgcaccaatatcactggcccagagtattttctgtgctggtttgtaaatattaataaatttcttgttttgtaaacttttgtaaagaatattttggtagaaatacttaaaacatattctttggattatatttatacatatgtgaaataaatatactatcgaaaggttatattttatacaaaaagtaaattgttaccttttgtatgctaatatacaaagttttgtatcatacaatggtttatttttagctctacatttaaaccatacgtgattgagtggaagctttgaaaacccactaagaggcttgttaggtaaatgtgtatcctgagacctccctcagaaagcattcctgggtccatccctccctgttcttgttttccagctcagatcctttatgaagcccagagtcctcatgtctcatttgatgattctgctgtgcacacaacagttcctgttgcatgtgtcctactgtgtgtctccccattatacaaaacagtgtttctccatgagaacagagagggaaaacaatgtatatatataaacgccatggttttgtggctcctccagatggctggacatatctgcaggacttctcagtctccgaccatataattcagcttgtttctccctaacccaaacagtacattctacagcagctgtccagttgtccaactgaagaggcaaaggaaacaacatggctggtttttcttctcttaatgtgaatttcataattaatgtctatttattcagctattcattaaaatacaggattctttgggggagacagtatagcctatagtttttctgtttgttagcagcctattaccaaagatgatgtaattttcctgaaagctgagataatgacaatttgatagacaaacttagtaagagcctcaggatttacaatgtaagagctattgggatacaaactcccatttatagacatgctagactacttagttgctgacattgtttatcattctgacatctaacagagaaagtaagagtcgtttgtctttcttctacttccttcttccctccttcctccctcctcctcctcctcctaattcagagactagaaagtaatgtaggcaaataattccttcttggctttgtgttcagcctaatgaatggagtcactgaatgaaatgctaatgtcacctgcattgctgtcctgaacccacgaatgtaaagatttcaacttgtaatacaagcattttgtattgtgtgtaattccatgtgtaaaaaaatagtttaaaacaattcagaagtggttttcttctatgaagtcatactgtcagttatcaatagcatcattacagttaggataactaatgttaacagtaatgggcacatatacacaaattgttctatttaaaagatttattttatacttttaaattatatgtttgtgtggagtgtacgtgtgggtgctggtgcctgccaaagctagaggatgccctggagacggtgtcaccataggctgtgatgagccaactgttgtgggggctgaacccaggtcttctgaaagcagtgaataccacgcttagctgctgaggcatctctccaggcccctgccaactgtattgtgcagaaagctttagacagtagtaaaatgcagactcaacttttttcaatgttggtcttttcactgagaaagcttatattttacaaacttaagattatatacgcacgaccagagagatagagctaagttggtaaagagaaggtggtaaaagaatgaggacattcagtctccggcacccatgtaaaaagctgcatgtggcggtgcacacttctggtggagaaacagagacaaccgacctagcctaactgccaatctccagaccagtgaggcatcctgtctgaaaaagtgactagtgttcctcatgatggtcatctgaagtcatagtgtggcttcacacacacacacacacacacacacacacacacacacacacacacacacacacacacatattcatgagtacacacacacccatcaacatgcacacacatgcaagcatacatacacactcatgtacaaaaataaaataataaaacgttatatatgtaacatctactaaatgctgagaatgcattgattacttttaaggcaccatggtcatttgtctgtcctgtatgtggcatttggtcataggctgtgtggatacagagcttagtaaacacacctgactatacatgtctacacagccttcggcagaaccaaggtgactaagagaaggaatcactctccgttctccagccccactaattatgctggaaaggttctgtgtcctttctcctctgccaaaatggaagtgtgtgatactgctatgttcactagctttatcagtggaaccataacaaaactgatatttttcatggccttgtcccaaagaacctagaaggttggatggaagagacaagatcaacagcaataagaatgagtagtatccacatacattaggagaaagacatgtgcaattcagaactgacctctggactccaccttctaggctcagaggggaatctgaagaggagggagtgggaatgggggtgcaggtgaccgacagcagtctcttcctatggcaggtgctgagggccgggccagattttcatcatcttacccacagtggccatgttatatctatgtttcatatctaggtatgtctcatcacctaagaaagtcgggggcatggctgaggttgaaacagaacatccagactctaaaactcagcgatttattttcatttcataaaagtaaagtgtccgccgggcgtggtggcgcacgcctttaatcccagcactctggaggcagaggcaggcggatttctgagtttgaagccagcctggtctacagagtgagttccaggacagccagggctacacagaaaaaccctgtctcgaaaaaccaaaaaaaaaaaaaaaaaaaaaaaaaaaaaagtaaagcgtccaccaaaaggactcagtagcattctttttaagaacctttcagattgtcagtcaagttcaggcaacacagcaaacgtttcctttaaggttaaatcataagcaagagtgcattgcaaggagccagatagaggcagcgggcaaacagaaaggccatgcagatatccacaccaccagctgctgaccaagcctgaggagtatgtaggaggaagccctcgatgtccactttcctgtgacatcacagaatcacttaaagttctgtaccagggaggagagaaagttttcttgtgtatttgtcagattctcatcccggtgacaaaacacccaaggaagcacttgaagaaggataggtctgtgtccctcacagtgccaggtctccacctgtaaggaggggctgtgggcagcacagatcgctagtacaagcttcccaggaagctcagggaatacccagtctgctttccacctcccctccaactccacccaggccccagtctttaggatgcgtcttctgtctctaatatcctcacctagaggtgaactttgccaatgtccttggtgcttctcagtccaatctatgtgacaatcatacataccaagtaataaactccactagttaagtagcagtaaacatttgtgagttttcaataactatgtaagatatttcaataactatgtaagatatttcaataactatgtaagatatttcattttctactctaatctgctctactctgttttgagagtaattgaatctctaattcaagttagatctggaatttgcaaacagaggataactttgaacttctggtttttctgcttctacctcaaaaatgctggaattccaggcatgttccattatgatgaggttttccagtgctagggattgaacctggagccttgtgcatgaaaaacaaagactttactaattgagctactttcctagtcttttggaggttgatttaaaaaaaaaaatcttttaagtatgaatactaagttcctcagtagagcgtataggtctgatcacctataggatcagtctgattcaaagcagcgatacatgtaacaccctgtactgtgagaattaagaaatcacattgactttgaaactaaatgctgccatccctggtctgcatgcagtcatgacagaggactttcatttatacaaatagtattttaagtttcccccttgacaaacttaagtacttttagtaccaagatgtgtgtcaatacacagatgtagtttacagtggttacaattctttcatagaaggaagaaaggagtgaaggtattatatgaacaattttacatgaacacaaagatacttcccacagggatctatcagtgtaagagaggaagtgaagggaggaaagcacatctcagataggcttagagattgactgggaagcacaaggttctctgagtcctggttgtcctggaactcactttgtagaccaggctgaccttgatggcaaagcagaagagggcatgacttcatctatcgtgtcccctcccactcttcaggaaactcatttcatatgctgagctccactggaatatcatctgcctgcttcgagaaaacaagcccagaatgagcctgcctacatgcaggcctgggctcaactgaagaaatctgcagacaactgggtgcaaaacaaagctttctcagcaaaacctgctgagcaaaccccttctgttcttttggatatgacagttgatctaaatttatttactatagaatggtaccaattaggaaaaccaggttgaaagtgcaacacccccccccaacacacacacataccccataatgggtcagagaatggtattttatatttcaatgactcaaacaaaacaaaacaaaaaacaatgttctgcacaggtattctctagggctgcacatgagggaaaccatcatgttactgtataataccattctttgtgggaggtagactagtagaatgtggatatgtcttacaattaacagcatctttgatttggtaacctgctgcatctgtctgacacaacaagcatagtaagtggcaatccttactctctgtaatggtcaaagaatgctcccaggggaccaggtgttatacctttaactgtcataaggatgttcaggagcattttcctccttcttgtcatcttagagtgacaacactgttgccccagtttccagtctatgttccaacctaggaaaaagaggaaaataaaacactatgaagagaaaaaatatatatactgttgtctgtagaaaccttttcctttttctttgggcaaggcaggcaagccagagacttgtgtagatatacctcttcagccatgactgttttgtggccttttggatctttgggagaggctgcatggcaagtatttagatagagttggctgtaaatgaccataaaccagagtattcagactcaatggggaggagagccagaaaccctagatcctggtggtctgagaaggaacaccgagcagagcaatggggacacgcagggccctcaacacaactctgtcctgcttcctactgcatggagactcctctgttggtgtgtttttatggcttggcatgagaacatagctgagtcaaacgcttctgatttctgtcagtagtggtctgctgtgagtgaagaattatcatcttggatttatatcggtatgaagatgatagataatggaatcacctcctaatagaaataaccaaaaccccatatttaaaagtaaaatttactggaagtctacagacacaaagatggtgtggtatctatcgcatgagcagagccttaggaatagatgtgaaacccatgtttatggccagctgacctctgtgggacaccaaagcaattcaagagaatcaaaacagtcatgggacaattgattctgaatgtttcttgaagaaatgcctttaaattgtattatgacaaaggctgcagaactctgaaaaatactcaaaatcactgaactgtatttttttaaatatagagtctttcactgggactgggtctccagttagactggctggcccttgagtcccagggatcttgctgcctctgtcttcccagtactgtgattggagatgtgcatccctgagtttggcttttagaactttacccaccaaactatctggattgtgttcttttcggggagaaacatgcccggctaaaaagtgcctgtctttctttttctctctttctttctttctttctttctttctttctttctttctttctttctttctttctttctttctctctctctctctctttctctctccctttctctctctctttctttctttctttctttctttctttctttctttctttctttctttctttctttctctctctctctttctctctttctttctctccttcctgcctgcctgcctgccttcctccctcactctctcctctctctctctctctctctctctctctctctctctctctctctctctaccagacagggtttctctgtgtactcctgattgacgggaaactcaaaaatctgcctgcctgtgcctcctcagtgctgggattaaagacatgaaccaatggaattgtgttctttacaggaatacattttatgatcttcaatttatagctcaataaggttgttctaaaagcaacaacaacaaaagtgtctgcaaatacaactactgaagtaaagacaagacaaacccagagatgaactggaagccagagtaagtaagcaagtgtgggtgtggcttttcctgacagatgggcttgggaggccttgaacctgcaccctggcaactgtgaaggtgacaatgtgtaggatgtacaagggaggacttattccaggtgggaactataataccaagatcccccatggaaacctatcactgttacataaaaacagaatagggctgctatttcacaggatctcatctaagaacagtgataataaattgaatccttggaatcacagaagggaaaccctaccttgaagtcatatgagcacaataatcattcatgtgagtttgagtctctgttccatcagtgggcattcatggggaggaaagagagacagagaaaggatgggaaagaggaagaaggggagggaggaggaatcatgaattgagaaacaaggagaaggggtagagaaagaaggtgagaaagagagggagggaggnnnnnnnnnnnnnnnnnnnnnnnnnnnnnnnngaagaagagaaaaaggacaggagggaaaggggatgggaaagagaaaaaagatttgaaattgggagagaaggtagaaatgattcttggaggaattatggagaaggctgagtagtaaatatgatagaatatattgtatgtatatataaaatctcaaaagataaaaatatacttaaaatgtatatgtccaagagcaatatcccgtgtgaaaataattgtatgtgaagtgtcccctgaaagagaaataagcaccaatcctcttagaaggctcaaaaattcctacaaagctttaaggaagactaatatcacagaccttacaaaaatcctaaagtccagagtgcagacccgaaacctggcacaaggtatcctgatggaaaggctacccagagactgctccacctggggatccattccatatacagttaccaaacccgacactattgtgtatgccaacaagtgcttgctgacaggagcctgatatagctgtctcctgacaggctctgccagagcctgacaaatacagaggtggatgcttacagccaaacattggactaagcacagggtctccaacagaagagttagagaaaggactgaaggagtttgtagtcccataggaggaacaacaatatcaatcaaccagaccccccaacccccagagctcccagggactaaaccaccaaccaaagagtacacatggagtgacccatggctccagccgcatatgtagcagaggatggccttgtcagacatcaatgggagaagaggcccttggtcctgtgaaggctggatgtcccagtgtaggggaatgccagaatggggaagagggagtgggggagtgcgttggtgggagaacaccctcatagaagcagggggaggggggtttcaataggtggtttttggaggggaaaccaggaaagggaatatcatttgaaatgcaaataaagaaaatatctaataaaaaaattaaagtggaaggaaggaaggaaggaaggaaggaagaaaggaaggaaggaaggaaggaagaagaatggagctaggtaagcctacaaccctgcctccatcccaatgcctaggctcctcccagcctcgaagcaggcctgggacacacctggccttccttcacaaccatgcgagcaagctcctgcagctgaactctaacgcaactccaagtcagacttgtggctgcttccaccaccttttctcctaagttcggctccagaaccttgatcaagagtatatcgccacctgctggggagaagcactcagcaacgcagattttagcaggagcacaaactgaagactttttaatgtagatcagggctcacagatagaggacatagactgttggccatattaggtagtgaggtctgcatcctcctcaagggactgcagcctccagtaactctgagtctcaggtacttccagcttagtgtcttcctttgtggccaaaggactgtctccagcatttatctaccaacctaaggaagtagctcctatggccatcagtacaaccaagctatctaatagtcactgtaaaaagaccagccccaagctctcagggtaggtgtaattatggctctctataaaccaaactatcatgatctaggcccagcaggatcagcatggtgctagatttggcccaaggccacatcattctgaatgacctatcgttgcaggggacacatagcccaagacagtgcagctagagacagctaataagctagcaggaataagggtcaggagaagttgctatgtgatagctcagtggtagagtgccggtctagcattggcctgatggtttggatccagtatgaagaagggaaaggaagaggaggaatcacagaaacaaaaactgtggggaaactctggtaattagggtcaaagtctaccattgatcggaaagccttcaggggcacagcacgtaatagagtactcccctcattactgggacttctccttctctgaccctggctggtgagttggaagcccccacatgaggaatgtcacttagcctcaattagattataggatcaatttcctttgtactgataagaacctgttcagccaacaccagaaattcctgagctgcttccccatgctaatgaggttctccaggtaccctaagaccccagccaacgaccctttgccatcctggatgttcctatcctcagtccccctcgcccattttctctttttttaattggatattttctttatttatatttcaaatgttatcccctttcttggtctcccattccccaccccagtgcttctatgagggtgttcccccacccactcactcctgccaacccaccctggcattcacctacactgggtatccagccttcacaagaccaagggcttctcctcccattgatgtctgacaaagctatctgttgtatatgcggctggagccatgggttgctccatgtgcactctttggttggttctttagtccctgggaactctggagggtctggttgattgatattgttgtttttcctatggagttgcaaacaccttcagctccttcagtcctttggttgtctgtgagcattcacctctgtacttgtcgggctctgccagagcctctcaggagacagctatatcaggctttttgtcagcaaggactccttggcatccacaatagtgtctgggtatggtgactgtatttgggatggatacccaggcagggcagtctctgggtggcttttgcttcaagctctactccacactgtctccatatttcttcctgtgagtaatttgttccgccttctaagaaggaacgaagcatccacacattggtcttccttcttcttgtggtttgtgaattgtatcttgggtattctgagcttttgggttaatatccacttctcaatgagtctataccatgtgtgttcttttgtgactgagttacctatctcaggatgatattttctactttcatccactttcataagaatttcatgaaatcactgtttttaatagctgagtagtaagtactccattgtgtaaatgtatcacatttcctgtatccattcctctgttgaaggctatctaggttctttccaacttctagctactataaataaagctgctatgaacataatggagcatgtatccctgttatatgttggagcatcttttgggtattgtccaggagtggtatagctgggtcctcaggtagtactatgtccagttttctgaggaaacaccagactgatttcgataatgtttgtaccagcttgctatcccaccagcaatggaggagtgtttctctttctccacatcctcaccagcatctgctgtcacctgagtttttgattttagccattctgactggtgtaaggtggaatctcagggttgttttgatttgcatttccctgatgactaaggatgttgaatatttatttaggtgcttctcagccattcaatgttcctcagttgagaattctttgtttagttctgtacctcattattactagggttatttggttctctgaagtctaacttcttgagttctttgtctatgttggatattacctctctctcagatttagaattggtaatgactctttcccaatctgttgcttgccattttatctaacagtgtcctttgccttacagaagctttgtaattttataagatcctatttgtctattattgatcttagagcataatccattggcattctgtcgaggatttttttccttgtgaccatgtgttcaaggcttttccccactttctcttctattagtttcagtgtatatggttttatgtggaggtccttgatccacttgaacttgagctttgttcaagtaaataagaatggatcgatgtgcactcttctacgttctgaccaccagttgaatcagcaccatttgttgaaaatgctgtctttttcactgggtagtgttagctcctttgtcaaagatcaagtgaccataggcgtgtaggtgcatttctgagtcttaaattctatcgatctacatgcctgtcactgcaccaataccatgcaaattttatcaggattgctctgtagtacagcttgaggtcagggacggtgattaccccagaagttcttttattgttgagaatagtttttgctatcttaggtttttttgttattctaaatgaattttcaaattactctttctaatgctatgaagaattgagttggaattttgatggggattgcattgaatctgtacattgcttttgtcaagatggccatttttactaaattaatcctgcca

SEQ ID NO: 138 - DNA, 4680 bp, Mus musculus
ctccagggctctttgaaaagaaagcaaatagtcaacttgtctcctgccaacagcaagaggcccaatggctttgttgacagctcatttcttgacatcaaaaggatcagagttggggagaacctttctacaggtcaggggggcctcccagtaaataatggacaaagtcaaatgatgccagggcccttgaccatgaatcaagcacccctgaggaagactaatgctctaccacctcctgcacattcccctggcaacaatttgtttaacatgggcttaaaggaggtgaagaaagaacctggggagaccctgtcctgcagtaagcacatgagtgaccaaatgacacaagagagtgtttttactaataggtttggagatgaccctggagatcaactgatggaccctgagctacaggaactgttcaatgaactaaccaacatatcagtgcctcccatgagtgacctggagctggagaacatgatcaatgctaccattaagcaagatgacccgtttggcattgacttgggcctgggatatcaagtcactcaacagcacagacaggatcaacacactgtggtaggccagaacacaggccccagtccaagtcccaactcctgctcaaatccaaacactggaagtggttacatgaactcccagcagtccctgttgaatcagcagatgatggggaagaaacagaccctgcagagaccaaccatggagcagaagcagcaacttctcctccagcagcagatgctggctgatgcggagaaactttcccctcaggatcagatgaacagacatctgacaaggccgcccccagactacaaagaccaaagaagaaatacgggcaccctgcagccagctgctcagtattcggttcagaacatagggatgtatggaaacctgccttgtaaccagcctggcacctacaacgtcacttcaacaatgaaccagctgacacaacagagaaatacaactcaactgataacaaatcagaacaaccctctgatgtctcggccatctcccttaggggcaaataacggtaacaatgtggccacctttggagctggatctgctggcagttcacagcaattgagaccaaatttggctcacagtttgtcaggcatgtcagcccagaggtcatcaactgtcatgatcacagccaacacgacagcaacaaactgggcttctcaagaggtgacagggaaacaacaggaagccctcaaatccacaggagtccggttcccaacaagtacacctgcagcctataccccaaaccagtctttgcaaccaggagtagggagccagccattttcccagagggcagtggcaccccctagccagttatcgccagcagtgcaaatgagacctatgaaccaaatgaatcaggcattaaatgggcaaaccctgggttcactcagggggttgaacctcagacccaatcagctggccgcccagagcctgtctaatatgaacccatcagggacaggattgaatcatcccaggacaggcaccaaccagcctccatccctgacacctaacgcttttccttcatccaaccaaagttccagggcttttcaaggacctgatcatggcagtgatttagcttttgacttcctcagccaacagagcgacagcatgtgccctgccctaaacagtgatgctgatttcatcgattctttattgaagacagagcctggtaatgacgactggatgaaagatatcaaccttgatgagatcctgggaagcaattcctaaggtggaaggaagatgatccgcaggctctgagcagggcttttcaaggatactgtaatgccaaactgctgaagtctgggggaactacagacctcaaaacagaaggttggcgggaaccacagtggtgaacattttgttttacatgcttgttttaaaaaatcttgagcctgatagtaaaacattgggattgtttttccctgcctgaacttcaggatatgtaatccagtttatccaaacacaactgtgatgctgatgtgtaattaattgtgtaaattggtcttcccaagttccttttctcagtgaaggaagtacaatagaacttgagacctgtttcaatcccatatcataatagacagatgcttgttctaaacaacaggcagcagactgtcatctagtagataaatatggtttgacttctctgttgttatttgtcttgcaggaaatattgaaatgttacatggctgtgtggagtaacctaagagggattcagagaacctagaagctatccagcagattaattgatttccttcctagatgcactcctcatttttgtaactttcccacgtgttttgtattttggtgagatgctgtgtctcatgataaaacaggaatgcagggcttgcaacctgactggggcttcactccctcccattttttttttttttttttttttttagataaccaagactggtcctgattatgctgaaataccagtgcacaacagcctgtatcgaatttcacttcaaaaaaaaaaaaaaaaagttaagccttgccatgtaggaaaaaaacatggccacgaatgaccagcagtgttgctcactgtgattaatagccactggtctgttcccaagcagaatgaaatggagcctcctaggtcttggtagccagagactggtttgtaaaaaaaaaaaaaagaaaagaaaagaaagaaagaaaggaatgaaagtgtgaattagagtcagattagagaatatcctgttttggttgaaggtaagaaacagggagaggcatgagagggcacgaagcatttcacagagctcagaggaaacagtacctgacagacagtatagcttttccttggacatactacatggacttaggtgagcagctaagcccagtgtggtctctgtggagccacccactcactattcatgatgcagcaagcccttgccatatggtgcctggcccttcttatccaggtttcctccctcagggctgagtgttatagcagaacatgcatgtgtctgggtcacggaacctcagtgcacacatctatgtacactgcaaagtggagctggtatccaggtttgaaaggcatctaaaagagcactaccaccttcctaaatccagagaatcaaaggctactttcaatctttgagttagcaatgcacacactaaaataccaagtgtgattgacttgaagttatcaagcacctgatcttcacaaacctgttcagaaaaggaacacggttttttaaagctctgcaaagtcctcttcttgtctttacgatggctttgggctctctgtctttcccactgcaccaatatcactggcccagagtattttctgtgctggtttgtaaatattaataaatttcttgttttgtaaacttttgtaaagaatattttggtagaaatacttaaaacatattctttggattatatttatacatatgtgaaataaatatactatcgaaaggttatattttatacaaaaagtaaattgttaccttttgtatgctaatatacaaagttttgtatcatacaatggtttatttttagctctacatttaaaccatacgtgattgagtggaagctttgaaaacccactaagaggcttgttaggtaaatgtgtatcctgagacctccctcagaaagcattcctgggtccatccctccctgttcttgttttccagctcagatcctttatgaagcccagagtcctcatgtctcatttgatgattctgctgtgcacacaacagttcctgttgcatgtgtcctactgtgtgtctccccattatacaaaacagtgtttctccatgagaacagagagggaaaacaatgtatatatataaacgccatggttttgtggctcctccagatggctggacatatctgcaggacttctcagtctccgaccatataattcagcttgtttctccctaacccaaacagtacattctacagcagctgtccagttgtccaactgaagaggcaaaggaaacaacatggctggtttttcttctcttaatgtgaatttcataattaatgtctatttattcagctattcattaaaatacaggattctttgggggagacagtatagcctatagtttttctgtttgttagcagcctattaccaaagatgatgtaattttcctgaaagctgagataatgacaatttgatagacaaacttagtaagagcctcaggatttacaatgtaagagctattgggatacaaactcccatttatagacatgctagactacttagttgctgacattgtttatcattctgacatctaacagagaaagtaagagtcgtttgtctttcttctacttccttcttccctccttcctccctcctcctcctcctcctaattcagagactagaaagtaatgtaggcaaataattccttcttggctttgtgttcagcctaatgaatggagtcactgaatgaaatgctaatgtcacctgcattgctgtcctgaacccacgaatgtaaagatttcaacttgtaatacaagcattttgtattgtgtgtaattccatgtgtaaaaaaatagtttaaaacaattcagaagtggttttcttctatgaagtcatactgtcagttatcaatagcatcattacagttaggataactaatgttaacagtaatgggcacatatacacaaattgttctatttaaaagatttattttatacttt

SEQ ID NO: 139 - protein, 577 aa, Mus musculus
LQGSLKRKQIVNLSPANSKRPNGFVDSSFLDIKRIRVGENLSTGQGGLPVNNGQSQMMPGPLTMNQAPLRKTNALPPPAHSPGNNLFNMGLKEVKKEPGETLSCSKHMSDQMTQESVFTNRFGDDPGDQLMDPELQELFNELTNISVPPMSDLELENMINATIKQDDPFGIDLGLGYQVTQQHRQDQHTVVGQNTGPSPSPNSCSNPNTGSGYMNSQQSLLNQQMMGKKQTLQRPTMEQKQQLLLQQQMLADAEKLSPQDQMNRHLWPPDYKDQRRNTGTLQPAAQYSVQNIGMYGNLPCNQPGTYNVTSTMNQLTQQRNTTQLITNQNNPLMSRPSPLGANNGNNVATFGAGSAGSSQQLRPNLAHSLSGMSAQRSSTVMITANTTATNWASQEVTGKQQEALKSTGVRFPTSTPAAYTPNQSLQPGVGSQPFSQRAVAPPSQLSPAVQMRPMNQMNQALNGQTLGSLRQLRPNQLAAQSLSNMNPSGTQHPRTGTNQPPSLTPNAFPSSNQSSRAFQGPDHGSDLAFDFLSQQSDSMCPALNSDADFIDSLLKTEPGNDDWMKDINLDEILGSNS

SEQ ID NO: 140 - DNA, 32757 bp, Homo sapiens
  misc_feature (1)...(32757): n = A,T,C or G
ccaagggaaaaatcattttattactttcataaataccaacgtttgcggtggggagtgagggggggttgagttctcaacctgagctctatggataatctgtggatgtttagagagtttgtaaactccctgaaattgtagacaaaattattagttgtatatgtgtttgggggatgggaggagatgcagaatccatagctatgtgaaatcctcaaaaggaactatgatccaaatcaatgtttgaaaccactgctctagaggcagaaagctaaaagccaacttatagagcagaaatttgaaatctgccacaaagaatccttctaaagttgcagaatttctcttttaagaaaaatttctcattccttcccctgagttaccaaactcttcccactccaccctgacccactgacgttttgttcctggccactctcccactgaaggctgctttctcactcatggaactggtctctgtgccaacccgtaatacgtgtccaccccagaggctgagaatagacacagcgtcctggtgacttaaaaattgggtaacatctgaaggataaactctgtagtgactatgaaattcattctaatcatttgaaataaacattataaacatatgattggggtttctctgcacggtgcaggagaaggtactgagcaagtaaagaaaatttcctattaaatagaaggggaaagcagctactattcacaattgtgaaggggaaagaagaatactaaaccaaatactttcttctgttttttcaagcttgaccttcatctccaccacccaacctctcacccccaataagttatatcagataagctacaattctttcaagcgaatagactttgttctgtttatttcttcttaatatattttcccagatttgggatctgtgttcctcatctctcagttaggtgtgtgaccttgtgcaagtcaattccttaaactttctgggcagcgtctttatctgtaaaatagagttggatgaaagatctgtaagttgttttttagttcctgctgtgtgtaattgttactgaagtggaaggctaatgtaaacagattttatgataaatatttcttattttcaacttgccagttatctcaaaggattgctgggtacttcatctaaggcatttttaaaatttaatgtgaaagaccaaagtatctcacattatttgtccaatacagccaagtacagcaagggtcaagaaactttttctgtaaagggccaggtagtaaatattataggctttgtgtgccgtaggtctctggcacaactattcaactctgttattatagtgggaaagcagccacaggcatatgaatgaatgtgtatggctgtgttccaataaaattttatttaccaaaaacggtggcaggctggattaggccgtcatgccatagtttgctgacccttgaaatagaaactgaaagatctggtaacctgaagataggagagtttcatcccttcagccttttctgtttacaagctgtttcctggctgatttcctgacaattgttttgttgtcattgttgttgtcgttgctgtgttaaacaacaactgctcaattattttggccacccacaaccacctcactattaatgccccaaataaataactttgagcaagtgggcctgccagcttattgggaatctgaaacagttcagacaacttgtttttcagtcacagagataaataaatggcttcatcggcagacagttccgaagatgaatagccgagaggaacagttgagcagttagttcattgagacagggaaagaaagacaaaaagagggaaagagagaagtgggtagggagaagaaagattgaatagcaaaccagtttgtgagatctactgtacagacttgcccagctgggtattttatcttgaatttgttttgcaaattgcggatgcctagctctagaagccaagaaaaagaaagggcagtcatcccacgccaaaatactctcatggatctcaagtaatttacattacttcatttttgtggggggaaaatcattatacagtccccttccaaaataagtgaagaggaacagagagctattttacccaaatgcctagaacaagacaaatattttgtagagcttttttttttttttttaattaagagaacaatacctgcctggtaactttgcctactttgtgaaagttactgtgtcagtgttcagcccacaaaactgctttaactataaaactgactgaatccaacgagtcttactatttctgtatatacttcagtgaaacaagggatattttgtaccccattctaccttttgctgaaatcaatcctgcctgacagagtccttacaattccattgaaatgaaagaaagaggtagtcccagtgattttattagttaacatcttttttaaagatctctcacatattgaccatgatttacagagacactttatcaaagtaacacccagtagccaggcctatcctctgcttttggatagattttggatagatttacaagattttcttcacacatactatttctttaaatatttatcccagaaaatttaaagaaaaggttagtggtgaatacactggtagaaggctgggacagtgaggtttgttcttaattttttaatttggacttttttacaaaaggacttcaaactgcctttgagagaaacacaattaacacagaggacaggtaatttgtcttctaaggaaaaagggtacccatttaaaagagttcatgtgttctcctaattgtctcccaggtttgtagacatagattgcaacctcagtgagctagtacttcccatggtcatccataggcaagatattaaaccaatgaagtaaaaaattggggaaagcatttttaaccagatttttttccataagttaaaacatgcatccagcttccttgtgagcttacttaacttgtgagcatgttttatttgcctcaagctaaaagattcggtcatcatatacctgatttaccaaatggtctcctaacatccttgagaccattctaggaaataaatgatccatcagtagcacagttggaaaacttaaaaatatagtcaagtggcaggattttccagcaggctgcatgaactttgttaccctcctaataagactgcccacaatccagggtgtgactatgactatctcctctccttggaggtaaaagcgttgcaaacaagaactgtgtccaaattatctccatttctctagcacctgatgaaatgcccaggacataggttattcttagtcagtacctactttttagaaaataagtgaatgaatgaaacccatcatgtccaaagcattttctttgctcagatgctgttaagaatagcagcttggagttctgaagagcattccaaataatacatcaagaatgtttctgtaattttagcagaggttgaatgatcatttgctagggatgtggtagaagaaagtgcactttggagatttggactagaatggacaggtaaggaggttgggtaggtagatggatggatggggtggatagatagatagacagacagacagacagacagacagacagacagacagactgacagacagactgacagatagatagaaaagtggataaatgggtagatataggctttgctatataaggaagctgttgctatataaagagtctagtatctgtatagagtttgagtccaaaattcttgagtatagcagtttgatcaagaatatctagcatcttcttaaatgacagatgaggatggaaacattttaaaaatatatatatatatgactgtattatgagatcttcactactgatttgagataattttaaaacattctcagagtaaaagagcagagataggatgactaaatactagcagtggttagggacagagcagtgaatttctaatgacaaggccaaagccttagaagaagaggatgctcaccagtgggccttagagtgggctcgggaccacttgtgtacagctcagaaatattgaaatgaagatctcaaatgctttttgattgggatggcattttgagaaaaagatgtgtatcccactaagcgattatgattctaaaactcataaaaatgttgtttgttttaggttcatgagaagtcccttcagtatctttttactgctttatccccaaggcccagaagaatgcaatgcttaataaatacttgttgaattaatgaataagaatgcagtgaacttaataattctaaagacaggttgattgattgaaccttataaaaagaatacaaacatgttttcattggtctggcagtcctgtgctgggttaaaacagggaccaagaagttttatccatacttaagcactggcatgctacactatctcagggactaatactataaaaagacttttaaaaatctcaaatgcgcatgcacacacacactcacaaacgtggaaaactatctaggagtacacaataaatatacgttattgtgcactcataattgatttaaaacccaggaggattggatgcgaaacctattttgtaggttagaaccaaactctgtaattttgtaggtaaaaacagaaaaagaacatgtaaaatgaaagatcatgcaagttcatgatttgaaccagtcattgactattccttgctgccaaatcaatctttaactacggtttgtctagaaaactgggttttctattatgtgaaagactacctagatggaaatagcctaattctttcacaatcacacacatgcatgcatgcacacatacacacatactctcatctatcagctgagaatgtgcgatttttaccacagccttcatatgcccttcaggagaaaatgtgtgttggggaaaaaacagatgatttctattaagttctacatgggttgaatttaaggcaaagagtgaggctgagtatgaaaatcgaagccaatgcatcaaagcagttttttctttcaaactattttatgtactaaagtttgcacaacatgttggcaatgacagcaagcttgtataaggaggtgttttgtgttttacagcaaacataagggcaaaaaaatgcaagagcagtgaaatattacttcaatcatgaattcaaagaatgtatatagtaggtacatggtaaaacccatgagttagaaactacaagatttaaaaatcttttacaaaattacaagaaaggatttatctcattctttcctccataccagggcacctcccttcacccaagcaccagtttcaaatttggaaaacccttcagaccctagggaaaagggtcctaaagtatcttttggtaccgtgaaggaaataaactacatttagcacagtctatctgtttgattagagagagaaagagacatagttacattttcctggcatgcagatcttttataaatcttagaaaaggttggttttccagaattctctggaagttattttggagctcatcaattctgccaacattgagcactctgtctacctcttttctttctcttcattttccccatttctaagtacattttggtctctagaaaataaaaaactgcctagcacagagtagacattcagtatactttgtcaaatgcattaatggattgatggattcatgggtgactaggcattaggtgatctgagattgattgattgattgattgattgatttttccttcaacttttaagttcccgggtacatgtgcaggatgtgcaggtttgttacataggtaaatgtatgccatgatctgggttttaatcttaagacactagtaggtatcataccacctaatggaaatgattatgcattgctttttgttgtcataactttgggtgagtggatatgtggagtgtgtggtatgtgtagcttatcttcccagataaactgtatgccagagatcttaaactcagatggcctacatggaccaggcaaatgatagaagtgaggaaaatgggtgggtataataaagtaaggagtagtagaggctgctgtggccacctggagagcaaaaagagcaatttgtgtttcaaacatgatgggggccaaacacaccacatctgtagtccaggtacacttacagtgtgagctccttcataagactcattggatataaaacatctaatatttaaaaatacagaaataacaaaataataatagttaaagtgtatcaaacatctctactaagtccctggcactgttctaaaattcatcttgttaaattttaggtaattaatgtattacctttatgttgcaaatgaggaaactaaggcacggtacttagtaaatgtacatgattgcactatgcataaataattggatgttaaaagaataaaaaccagaacagcaaagagcaaagctaacagagacctgagctaagcccctaactgagaagaaagaagcacaccccaaaagacagcccatcagagaatgataccccacccatcttctggcatcttcaagtaggaggatgaaggtaatttcccaaatccctggcagctcataatctgcaatataactgagacctctacatttctcagagacctgacacagaacagctttctgtagtctgcgagttctatctcctttgtttcacaatgaaaacaaacgtaaacagactattgttcctatgtgtagaaataactttaataattatgagcagctattgtttagtaagtgcttactacgtggtaggtattggattatctcccctaactcttgtagggaaactgtgacatccatactgttattatttcccttttacagataagaaaactgaggcttagagaggtgaattaacttctgccacatcacacaactaagtgtcagaactggggtatgaaccaaggtggacctatctccggagcttatggtcttgtccattgcatggcaatgcaaagaagatgaaaagaaaagtgttttgaatttttctacctatgcttgtcagctacttaaaaaaataaaccaaaacaaaaaaacacaaaatcttcttttgaaagtcttacataaaactccaaactaacaaagaaaagagcagactctttctattctggttcaagtggagagtagaaagcaaactaccatctccaatacattctctcccaccttgatgtcttcccccaccacttccagctgtctttacgcttccctgatcctgcctctttccccctgtcacaggctctgcttccctgtccttactcagggtgcaccaaaaggcccagcccccaatcctccatgtatttcctcctccttttgccctccaagacactcagctcaccgatcctcatttgccattctgtcaatgaccctcaagtacttgtctccaagtccacattcttagtggcttatagaacacaggcggtgaagtctccgaaattcatgatggatttaaagttgaaagaactgactggtcataggggtgtaaatatattagaggatggtttccttaagctgctcaaaggatgtacctcagagatggctgtaattattttttactaactagtgaagaggatctccccaccctgtcctcactcccctgtccttctctccaacacacttctttccaccttcctgacctgagggtgctcaaccctgggaagagtgctgcatgaactgatgggttggcccaggtttaaagtacaaaaatctttcttctcaatgcttcctgtctcacgtgacaggcagtaaagtgtactgattgagaactagagttgtggggtcagacagacctggcttcaaatcctcctcggccacttacagctatgtgatctctctgagctcaggtttctcatctgcaaagttgggttaataatacaagttcttgctcattgttttgttgggaggagtgaatgagataaatcacgtaaagcacggaccacagtgactggctgataataagcctcagtggatggtcgcccttagaattattttgtaaccctttgcttttgaggcagctggtgagctctgtagcctcagagattactaaagcaaggccaaggctttcggcttgtggcttacttacttacttgtttatttatttcagctcggcacatagttaaagaaagagaaagaaataaaaaagataatttccacaaacagtgtacctaccacctctactcatgtggtatcatgggagttgctttgtggttttttgtttgtttgtttttgttttgagacagagtcttgctctgtcacccaggctggagtgcagcggcacaatctcgggtcgctgcaacctctgcctcctaggttcaagtgattctcatgcctcagcctcctgagtaagtaattgggattacaggcatgtgccaccacacccaactaattttcatattttagtagagatggggtttaaccatgttggccaggctggtctcaaactcctgacctcaggtgaaccacctgcctcggcctcccaaagtgctaggtttacaggcatgagccaccgcacccaactccctgcttaatgtttttatgtcttgtaaccttacatagtttagttggtgaatgacagatggattttttttttttttttctgggcacagtgcttcatgcctgtaataccagcactgtgggaggccaaggatctaggatcacttgagcccttgactttgagaccagcctgggcaacatagtaagaccccgtctctaaaaaaaatttaaaaattagccaccctgtctctaaaaaaaatttaaaaattagccaggtggcgcacgcctgtggtcccaggcactttaggaggctgaagtgggaggactgcttgagcctgggaggttgaagctgcagtgagccatgattatgccactgcactccagcctgggtaatagagtgagactctgtctcttaaaaaaaaaaaagagagagttggatttcttttgttcccatgtattcagtgtttcccaaagcatattccctggaccaatgagtatcagaataacctaaggaggtaccctgatctatagcctcagaatccctgggacaaggccagggcatctgccttataagctgattcccagatcattctgatcaaagtataacaatttttgacttagtgtttatatcatgtaaactaaaatttgattttacattttcttatatttatacatgtaagcatttctccctcacttgggtgataaattctctaaggtgataaccatattttctagtcttcttgtaaccctactagtgtactagtgtagagctcaatcctaaatacatcattgggaattaatgagaatattcaactgggtttagcttactgtcttgcagagtcctgatctgtcaatgccaaaaaattggtagagacctcaaattagaaaggcagttcaccaatacccaatattatttgatatacagttgagtttttaatcaatattttctcattgtcagtgtgtcgggtattcttttactgagattcttgcgccgagatacctgaattgttgactgcggaacaaaatttacaaggccctgagaagtgaagtcctttccaagtttgagtttataaaacagaaacttagaggccttcctgcctttctgtcacagaaagctgggtaaggcaaaatgccttctgtccaaaatagtttcaacttttaaacacgtgaattaaaacatgactttcattgcaggatcagcaatgatacatgctaactttgggaaaaggaaggatttgttaggttatgatgtttattcctgagaaattgagaggtttgccatatgtttttatggtagttttctttgaggttccataaacaccttctggaatgtggaggttccacaatcagagtcctcatgggagcttttccagtgccctaatgtcattaacccagctgctttggttgctgtgttatgcaattatttcttctacatttaaaaagcgattctctgatctccaacccatttaaccatgtttgatctttaataagatgaaaaatgtttggaatctgagtgtatgatctttgtgctacatttttctttttttaattcacagtagcttttccttccccctttctcttctttaggatcaacactctgtggtaggccagaacacaggccccagtccaagtcctaacccctgctcaaatccaaacactggaagtggttacatgaactcccagcaatcactgttgaatcagcaattgatgggaaagaagcagactctacagaggcagatcatggagcagaaacagcaacttcttctccagcagcagatgctggctgacgcggtaaaactttctcttaatttctactgaacaaacctgttgacccaacagagggagtttattcttttccatttatatttactgtgcctacttacgtgacagcaacaaaggtgtgctgactgtgagagaggataattccatacatttagtgtactgcaggaagaaaaaaaacccaaacttgatttaacaactgctggacacttggaatgcatggcacctctgctaaccagccctgcccagcccaggaatgtctagaacaaccaacatgggcatttgaatcaggcaaaagaaaccagtgttgttccccaggcttaaggggcagaaacagtaaactgaacttgaatcaactcaaatccaaactgattttagagataagagtttcaaaagcaattttaaaagccaacatggagcctcaaaaccaagatttggcttccaaaataaagcaactcacaatgggggattttttaaaagaaaatgtaaaatacatttcccatttgcactgtatatattaggttgatgcaaaagtgattgcgatttttgccactacttttaatggcaaaaaccgtaatcacttttgcaccaacctaatatttgactgtttaagaaagacaagattgtgtttcccacacactcttcatgcattaaccctccttcagtatttatctgctcagccctggtttcattgcctcccttcaaactatttggccaaatgaaataaaaagtaagcatctccaggtgaattagagctaaagtatacagaaaagataacaacaaaatcaaataattttatattcaaggagctttgtagtgagagtcagaaatgcagggtatcacaagtgctataattattcagtaaataataatttgcaatgaggggagagccataaacaaggcaaatcctctcttcaccctagagaagccttgagcccactgaggatatgtcagataaattggccaattgtaatgcatgtgattaaatgccatactctggtaactactagaaatgatttcagaaagaactttctatctaccgaatatctgaaagtggagtaagagatgagtaggagggttatttcagccagaacaaccagcatattcaaagacctagggacaataaaggatactacatattatgcctgccaaggtattgagtgtgcacgagaagggggaattgatgggtaaagatgggataagaagcaggaggatagggcttgagaggccagaatttacattaaaaagcaacagaagagattttaaggatttaacacaaggggaagtactagattcagatttgcattatagtaaaagtataaaatatactaaaaagtataaaaagtaagagaaaaaagtatactttttacagtaaaaagtataaaaagtaagagaaaatgtaatggaaagaaagattaaatccagcctgcaaagattgaggatagtctcccaaagaagtaaaatttgacattgattttgaaggactgtaggattctgatagagtaggtggggtccactattgtaggtggagggtggagcaccaaaaggtgcagcctgggtgtgaatttgttggtgagtttgagattgcattatgaaatatttaatgcctgataaaaagtaaacatagtataacaaccacacttttaaaggaattacaagtggaataagtttcgtattcagggcatgtgaaaagaaatagtgagaagtaaatttatttgacctggaataaggaatattgagaaataagattacagatgacgttgaatactgccataaggtttaagggagtcacagactggatcacaaagtgacacaactggtttcttctagaaatcatagttttgaaaactccagtcctcccccctgttcccttcccctcccatttttatccttataagctaaagaacttagaaacaaggacagcagagagaaaaatgtgtaatctaaggttgacttactgggtacactttcatcactaccatcaatactactaatttcatgaattataacacacagaggttgattttcagctcttgttaaaaggcaaggaagtggtagcatatacattccatgagggtcctggcctggcactgggctaactcccactgggccccagttgagtcaccactaggacaggtgcaaagggcagtggcataaactgtgagatgaatgagaatgaggctgctgtttttgtgatttttaaaaaccattcacatttctctttgtttggacaccattgagggtgtctgtgctttttagcatatccaggaagaagtggtctttgataccactgtacattagcatatgctttgtggtcatttgcagtcagttggcaaggccacataggcacctaaattgagacgttgtctcatgaaagtttgttatccttattctctattattctcctaccaatgaagcacaaagaagagacatgaatagtacttattacaacggacatcgtaattaccaacacgcattgtgtacctactgtatgccaggcaccaagctggattttcacagaattaaatagaaatatgagggaggtcctataattatccacatctcacatttttacagatggagaaactgaagcagaacagatatgtactataacagatgatttctataatgggttttcaagtccaacagattgggttatcattagatattagttcataaattaaatttcatattgcataaaagtattctcaagaatggcctatatgtttacacttgcacagaataggaatgtcagtcttttgcaaaatgtagccatctctattcagtattgcaggctagtctttgctgctcttcagcacaaaagaacaacatggcagttctgtgttatgtccatatgcaaggttattaatctaagtcatttgtgaacgagtagtttaagaaacctaaatttctggatatatatatataaatgatatatgtaatataaatattatatataataatgtaaatatatataatataaatatatatactataaatattatatatatataaatgaaaaccctttgaacaacagtttagccctctggtggagacaagcctgacaaacatggtaaaactccgtctctactaaaaaaatacaaaattagctgggcatgatggcgggcacctgtaatctcagctacttgggagactgaggcagaagaatcgcttgaacctgggaggcagaggttgcagtgagctgagatcgtgccattgcactccagcctggatgacaaagtgagattccatctcaaaagaaaaaaaaaagtcaataattagattgaagatatataaaaataaatccaggtttacaatatagtctatgatgggaagtcaagcaccttcttctctttatctctctctttctctctcactctcacacatacacacacacacacacacacacacacacacatcctgtcttcagtataaacggtagaaacacctaattacataagaaagaatgacagatgcttttggaaaagagtggatttcagaaagtccatgcttggcataaaaatcaaaactgtcatctcacacaacagtttacagcagagctggttgaacatcaccacatttgggttcatggaacatctcaagctgtttcttaaacatttagggtttgggcaaaaccaaagagcatttcaccaaccactttttcccttaatttgtaaacccatgtttaaaagaaatgtaatccatatgtttctgattcatttacacttagctcatcaaaattgtgttttatatgaattacttatgtgcaaaaaactgtgtctttcaagcctttttcttagcaacaagaatttaaatttggtttgttgttgttttaaggctttttcctctcctttatagtagacttattctactaagaaggtttggaatgtgatgggaaactgagaaacacatggtttaagtcagttctaagttaggcagtgcacatttgttttccagctaatttacccatgtatctattacaaagttttcttttctatttgttgacttttctataattatagtgttctccgtctacctatgctgattatttttattttgaaaattgagattgctttgggatgcatacaaaattgcagtgaagtcattctaaaaactccctgatccataccaaacaagataaaaagcagcccttaattcccaaagctgatatgatactcacagccaagctgttttgttctctgttgggtataaacaatcctacagaatgtcaacctcagacagggttactctgagaccatgataaaatgagacaaaataacacttcataattttgtctaaaaacagacacaaacaaggtcactgtgcaacctccaaaacaccaaacacccccctctgttgttaaatgagtgatagctacttctttattcagttagaattgactttactttgtgacagcttccaatctagaacaaagccccatttccttagactcttccgaaatcactcaaagtccaaatctcaggacagattctttctaacattctcctactgagacaccctgtgacccctcatgatgtgtgttctcccttgctgcaacaagtaataaagccaacagctgtgttcctagtggtctttgactgaggatattgacatattaaaagaatgtctctttttttttctcttagcttccaaagtcacctattctaaagatcaaaaggctgattccaaaaggaagaaatgaagggaggacagcaaacctgtgcttttagaatggggagctgagaaacagagtagcaaggggcctcgtattgtgtgtcaggaaagagcctgagttttggactcaggatttggtctcagttctaccactgtgtgaccttgagcaagttacttagcctaacaaggctttaatttccttattttttaggtggaaataatcatacctacctttaagaattgtttatgcgaaggtaaaaaagagataaaattcatatagtgcctatatcggtacctgttggttatctcctgacatctcctcctacctagggtcatcagatttaacaaataagaatacagagctgggcgcggttgttcatgcctgtaatcccagcactctgggaggctgagctgggtggatcatgaggtcaggagttcgagaccagcctggccaatatggtaaaagcccatctctattaaaaaaaaatacaaaaatttgctgggcgtgatggcgggcacctgtaatcccaggggctcaggaggaggagaatcacttgaaccagggaggcagaggttgcagtaagccgagatcacaccactgcactccactctgggtgacagagcaagactccatctcaaacaaacaaacaaacaaacaaaaacaaataagaatacagaatacctacatgttctgtattttatctgaaaaccctacctcctatgctttccccactgtgtgggaccagaattctacgtaggtacctgccaaagcatatcagatgtgctattctcattgaataaagaagtagctatcactcatttaacaagagaggggggtgtttggtgttttggaggttgcacagtgaccttgtttgtgtctgtttttagacaaaattagaaattagcatcttgaaaaatcacagaaatttagttctcattgaaattgaattgcaaaataaagaaaataggagtagttactagaaccaaaacacatgttgactgttatggaaaagtagaaattatacttccatacaggaagtttattgaaattgaaaagatttgtctctgaattaagactacaaaataaggtcatgatttgtaacccatgattgcaaaattgttcttatattttctgaaattttacaaaattttacatgtattttcacaagtgaaaagggaatgatgcaacataatatgctttcatatcatttctcaaggagaaaattgctccacaagatcagataaaccgacatttgtcaaggccacctccagattataaagaccaaagaagaaatgtgggcaatatgcaaccaactgctcagtattctggtaagtgttcttaaaaattaataaaaattatagctgtgaaaggaaaaaaaaacttcaattttcaataatccctgtaactcacatatgattataatatctttcttagaatttctaactcccatttgactttcatgccaagactacagttaaatattttttagtcctttcatcagtttttgcttagtcatgccctgtactcacatatttcaccactctctggactacctctgagaattcaaaagagctaaatatttttctgttaggttcaatcattctccttccaaagatataccttaacccaggtagtagaaggtaagcagacatttctccctcttagacaggcacatgtgtaactttcacaaatcctagtctttttgtatccaccattgagcccatctccaaggtttccccttcaaagacaaatggtcctgccaccaaggaatacttgaaaagcagatttagttttcacgaagtctctcaaaaacaccaaaggtgaactccatttaaatcacaaagcaaatcttcttaatagctctctcagtataaaataaatggtaagtacaaaagtcccccaaattctctctcctcccgctcatgaaactccaaaagaacctttcccaaacccagcctatattgctctgccttctcctattcagcaactattcaatacgcttctgcccaaaactgtctaaaatgctctgcactttttgatgtaagttaagtttacgctcttgggtttcctaagttctctctgccttacctgttaccttcatctgtccaggaagccataaagaagattctctaaagaaagaaaggctgtgaacacccctattttataaatacttcctggtactgttaagtgtacttttaaatatgttgtcctgacttatttaaaccccctcaaatacaacaggttgcctctttcaactaaaattgagaatggagctgggctcagtcgcacgtgcctgtagtcccagctattctggaggcagaggtgggaggattgcttgagcccaaaagttcgaggccagcctgggcaacatattgagacactgtctctaaagacaacaagtaacattaggaatgggatgtatgttttccactctctaagattacttcgcctcagagcaaaaacaggattctctagttgattgtctcaaggaggctgaaagataagatgcagtttccagccatgtgttggttaatgttgggggtatgttctgagaattgcgttgttaggtaatttcattgtgcaaacatcataaagtgtacttatacaaacctagatgatctagcccactacacacctaggctatatgatatagctgattgcttctaggctacaaacctatacagcatgttagtgtgatgactactgtaggcagttataacacaatggtaagtttgtgtgtatctaaacatagaaaaggtacagtaaaatataattaaaaagatacaaaatggtacatttgtatagggcccttaccgtgaatggagcttgcaggactggaagttgcactgggtgtcagtgagtgagtggcgtgtgaatgcaaaggcctaggacatcactgtacactactgtggaccttataaacactgtacacttaggctgcactaaacttatttttaaaaatttctttctttaataataaattaacttttacattaatttttttgctttgctttacaacttttaaattgtttaaacttttgacttttgtgataacacagcttaaaatacaatcacattgtacagctgtacaaaaatatttcttctctatatccttattctagaagctttttttctattttcttacaatttttaaattatttttaattgacatataattgttcatatatatggggtacagtaggatattttgatgtatgtaaacagtgtgtaatgaccagatcagtgttgttagcataaccatcacatcaaacatttatcatttctttgtgttgggaacgttcaaaatcctcttcttggtatttgaaaacatagtataaattatccttaactatagtcatcctagagtgctacaaaacaccaggacttattcctcctatctagctgtaattttgtatccattaaccatcttctgtctagctttttctccccacatcctccccacctctagaaaccgcaattctattctctacttctatgagagcaacttagcttacacatatggatgagaacgtatggttctgtgcctggcttatttcacttaaaattttttaaaaattttttgtttttattttttaaactaagacacaaacacacacaaacacacattagcctaggcctgcacagggtcaggatcatcaatatcactgtcatccaccacatcttgacccactggaaggtgttcaggaacaataacacacatggagctgtcacctcctatgataacaatgccttcttctggaatatctcctgaaagacctgcctgaggctgttttacagttaactttttgtataagtagaaggagtacactccaaaataattattgaaagcatagtaaaaacatttactatgctttttatatatgataaaggaagataaaaaatgttacatatgtgtagggcactcaccatgaatggagcttacaggactgaaagtcacactgggtgtcagtgagtggtgagcgaatgcatttaataattattttagagtgtcctctaaaatacagccataggaatttttcagctccactataatcttatgggaccactgtcatacatgcagtccttcattgaccaaacattgttatgcagtgcatactgtacttaaaacatggttttttaataccatggcctatgagcgagctttgaaaaagctgggcgccctttggaatactatacacaattcaaggtggatattgaggtttttcttttcctactcacataaaaggatcccaggcacagtagtctagggctggcttgctggatttcaagcatcttttatctttccactccatctctttcagcatgtggcttctatcctaagggctgcctggtagctaccacatcactagtctcatacctgtattccaggtaggaagaggaaagaaaagaaatctgattcccttagccagaacatattcacctggaccctcccgcccaccccatcgacaaggaagtttggggaatgtggtttttcagctgagcacattgctctgtttctaaagaaggctctgtttctaaaaccaaagctctgtttcgaaggaatatagagaggttggatattgggtaggcacctagcagtctcttccacagtgaatattggtgtttttctaagggagaaatccttagcatccaactgctgacactcaagtgggtcagaatcattattctagagcattgcgcttcccatgtcttctgatgatgaaataagcaacaaaacgcaatacaaactctttttaaaatcattttttattttaatcttggtacaataatgattacctttcccagattttgatattaaaaatggagtatgaaaagcacctggaacagtctctgtcacctgttaggagcttttaaacattaactgttactattttgtgatctttgtggaaattctctctattctggttgtttaaaaagattgttttccttataaaccttctcaggccatatcattaaaatacagggcgactacaggtgataatttttaaaacctctacatttttttccacagcattttcataatataaattcccttgatatgaaactttcagatacaaagatgatattgctgaatcttactggcattgtatgtcatctcagttattgttcaagtgtctcctacctggctgttatgtctcttcatcaaacactgcccactacacaatgcactacacagatacaaggagatacaagagactgttcttgccttcaaggggtatgtagtctagttgggggcatatttataaataaatagcaaagctaatgtgttcatttggccctcagtttttcaggatgtataccacctacgtatccttaagcagcaggggatagcccacgtttacaattgcagacatgctctccccatccactgacattgtgatattcttatgtgtatttagctctgtatttctcagaatctctgactctctgggcctccctgatcatctttgcctccaaaaatatttcctcgtgatgactttaacctccagaagtcaagaagatttcaatatgttgattagtcactatctgttgtgtggagcctcttattacacagcctgtggcttaggcacttgttccatattgttgcagaactttctccttagttcagctaaaaccaggctctcgtcacatggcaaggaaagattaggttcgtggacacatggaaggatgaggaaaaatggaatttattcggcaaaaaggaaaaataactctcagcaaagtgagagagagtcctgctagcaggtttcccacctcacagattgaattccaggtcaccacacaggaacaggagaggccaggctcctcactgctgcaaatggcacgaacttcccaaggctccaccctgtcttcccagtgcacaggtgggcattattcagaaagagtcagtcggaagcggtcttcatccaggaccagcagtccagtttttcagccttcaggctgtgttaggtttgaaggcgtgggggagacccttgtctgcctcctgggtctctgtcaatatcctatcagttattgacaggcatcagtttaactggcaggcactttgagactccacagattgcccaatactaagtgttaaatgaaagattcgaagggcaaatactgctggagagaggaggctggaagataaaagaaagtttaatggaggagcttcggccttagcctgaaccttgaggaaaatatagggctcagtgaggaagggaaatcccataagcaaaggtggctcacagtgcattgagtaacaatttgatagtaactacacctcctggaactgaagaatttctttatgagataatttctagagcactgaattccagatgtttaaagagatggagatttaccctttgaacactggggagtcactggggtagcttcttgaatggggatgattcaaagaatgggacatgattttcaaggccatagtttgggaatattaatctaggagccgtgtgtagcattcatccacactttctcatttggacctggggtaaacagtaacatggatttcatgagagctgactaatcaagactgtagtctctggacttggaacatagtaaagctaattcaaaatggaagattgactattacctcccttcaatgacttcagaagaggaataaaataaaacctacaagatagaactattctattttagtcttctttttgtaatatgtaaacttctgaaccaaaaagtgacctcaggtgctccttcctcctaagagctgtcttgttccttttatataatttatttgatcattatttcgcctaaattgtcttacacctgaaagcagtttcagattgatgagttattgaaaagtgcagttacagaggagataacatgctgctacgaactaataaaattctcttctttttctcaggtggctcatccacaataagcttaaactctaaccaggctttggcaaacccagtttcaacacacaccattttaactcccaattccagcctcctgtctacttctcacgggacaagaatgccatcattatctacagcagttcagaatatggggatgtatggaaatctgccttgtaatcaacctaacacatacagtgtcacttcaggaatgaatcaattgacccaacagagaaacccaaagcaattgttagcaaatcaaaacaaccctatgatgccacggccacctaccttagggccaagtaataataacaatgtagccacttttggagctggatctgttggtaattcacaacaattgagaccaaatttaacccatagtatggcaagcatgccaccacagagaacatcaaacgtaatgatcacatccaacacaactgcaccaaactgggcctctcaagaaggaacaagcaaacagcaagaagccctgacgtctgcaggagtccgcttccccacaggtacacctgcagcctataccccaaatcagtcactgcaacaggcagtaggtagccagcaattttcccagagggcagtggctcctcctaaccagttaacaccagcagtgcaaatgagacccatgaaccaaatgagccaaacactaaatgggcaaaccatgggtcccctcaggggtctgaatctcagacccaatcagctaagcacacagattttgcctaatttgaatcagtcaggaacagggttgaatcagtcgaggacgggcatcaaccagccaccatccctgacgcccagcaattttccttcacccaaccaaagttccagggcttttcaaggaactgaccacagcagtgacttagcttttgacttcctcagccaacaaaatgataacatgggccctgccctaaacagtgatgctgatttcattgattctttattgaagacagagcctggtaatgatgactggatgaaagacatcaatcttgatgaaatcttggggaacaattcctaaagaagaaagggaagacaatttacaaactccaagcactaaaaggcagtatattacagaaactctgtagaggctgaactgttgatgttcaggtggactacatgaagataacatgcttaaaaatggaaagcagaaagtaactgcagtgatgaacattttggtccaaattcttgttttaaatcttacacctgaaagtaaaatattgggatcacttttccctgtctaaactccaggatacagtatccaatttatccaaacagaactgtggtgtcaatgtgtaattaattgtgtaaaatagccttcccaagtttctttttccctggaaaataaaaaaggtaatagaacttgtagtttatttaaaccccatgtcatgaggaggtactagttccaagcaacaaactccttaatttgctctaatagataggtatggtttaatctttccattgtgtcttttcatttaattttcctgaagcttgcaggatagattgaaatgttataggtttgtttggagtaaccaaacagtatgcaaattaagaaaaagccagagaacctagaaaacatccagtggattacagaatttcttccccatattcactcctcacttttacaattttcccacaatcctctacttcagtgggatgctgtgtctagtgattaaacaaaaatatagagctgtgcaatttgattttggcttccacaacgaatatctgaatccattccaaatgaaattttagatataacaaagacttgtcctaatcatactgaaatattggtgcacacctctctgcattagatttcacttttttaaaaaacccagtggacattgctataaataagatttatttggctacaaataacctgggatgttgcttattatgattgatgcctgctggtttgttcccaagctgagtgaaattgaacctcgtcctccctactcattttgatgactgaggctggtttataagaaaaggaagtttggagaagaaaaccgagattagaaaatatcatgttttggttggagataagaaccagggatggcaagtaccagtgtgtacaaatgtatttcacggagtttgaaggaacgcataatcaagagggaaaacaatttgtccttcattggacgtattatttggatttgggtgagcaacaaaatggaatgtggtctgttaggagcattctgtttgttcttttgtccctgatgtgatgaatcattgccacatgctagatggactcttcatatccaggttttgtccctcagggctgagcactgtattaaagagtttttgttgagtcatttaaccttagtgtccacatccagatcagctgtaaaatggggaagacgtgtgctgatttggaatgaatgcaaaatatcactatcattttcctaattacagaggagcaaaggttatcttcagccctttcagttctatgctcacatattcaaatatcaaatgtaatttagctgaagttatttaataatcaagtctttcaatatctgttcaaagaaaaagaacacactttgaaaattctgcaaagctgtctcccagtctttaaaatgtctggaagcactctccttctttacaataccaacatcactggcccagaatcttccctgtgctagtttgtaaatataaataaattacttgttttgtaaacttttgtaaagaatattttggtagaaatacttcaaacatattctttgggttatatttatacatatgtgaaataaatatactatcaaaaggttatattttatacaaaaagtaaattgctaccttttgtatgctaatatgcaaagttttgtataatatgatggtttatttttagctctacacttaaaccataggtggttgagtgggaacttttgaaaactatcaagaggcttgttagacaaatttatattctgaaacctcaataagaaagcattccaggtttcaatccttgttttttgtcctgctcccaaattcttttttaaacccatagttcttgtgtcttatttgattcttctgctgtgcacattgtattggtccttgttgcatgtagtctactgtgtgttttccgattttataaggcagcatttctccatacaaaaagaaaaaaaatgatgtacatataaacgcttttgttgtatggctcctccatgttactgtatatatctgccagcacttcccagttacactcctgtgagtcagcttatttttaccctaacataaatagtatgttttgtagtagttatcaaatttaagagataaagcaatcagaatgtttggattttcttctatcttaatgtgaatttcataattaatgtctatttattcagctattcattaaaatacaggattctttgggaaaacatgatgtgtagtctgtagtttgtttgttagcagcctattaccaaaggtgacataattttcctgaaagcagagataatgacaatttgatagacatatttagctaaaaccttaagatttacaacttaagagctattggaatacaatctgccatttttagaaataccagaccacttaattgttggcattgtttatcatcctgacatagagaggaggtagaagcaatttttcttttttgttttaagtcaaagactagaaagcagtttaagcaagtaattcggtcttggctttgtattaagccctatgaagataaataactctgctctaagtgaatgcgctaatgttacctgcattactgtaaacgtaccataacggtaaagatttcaacttgtaaaacaagtatgttgtattgcgtataatttcatgtgtaaaaaactgtttaaaaaaattcagaagtaggccaggcgtgatggctcacgcctgtaatcccagcattttgggaggccaaggcgggtggataacgaggtcaagagatcgagaccatcctgatcaacatggtgaaacctcatctctactaaaaatacaaagaattagccaggtgtggtggtgggagcctgtagtcccagctcctcgagaggctgaggcaggaaaatcacttgaacccgggaggcggaggttgcagtgagcccagattgcgccactgcactccagcctggcaacagagcgagactccatctcaaaaaagaaaaaacaattagctaggtatggtggcacgcatctagaaatccgaactacttggaaggctgatgcaggagaatcccttgaattcgagaggtataggttgcagtgagctgagatcgcatcattgcactccagcctgcacaacagagcgagactgtctcaacaacaaacaagtttgctgtgagtctacctttaattgcaataacaataatcttttnnnnnnnnnnnnnnnnnnnnacatggtgaaacctcatctctactaaaaatacaaagaattagccaggtgtggtggtgggagcctgtagtcccagctcctcgagaggctgaggcaggaaaatcacttgaacccgggaggcggaggttgcagtgagcccagattgcgccactgcactccagcctggcaacagagctgagactccatctcaaaaaaaaaaaaaaaaaaattcagaaatcgttatcctgtatgaaatcatactttcagttatcaacaatattgttgcttcattatacaaagttctgaaaactattcataataatgggtacttaaaggcaagtttagtctctcggaagcttctgaacgagtgaaatgttgacttgtcacagtgttctttagttgacttaaaaagtttgtattaacattctatatgcatggcatctactaaatactagggaaatacaacctaattcgcaggcactgtgggcatttgcctggcctgctgtgtggcatttggtcagaccggctagtgaacacaggctaggtaaacacagcccgactggacatatttacacagcccttcttgagagtcaaggaggttgagagtaagatgggtctttagaggaggcaagaagaaccattccaaattctcctgcactgctgtctaaatatgttgttaagctctcattatccctttcccctctactaaaaaagtatgtgacattgtctttgttattagcattattaataaaccaataatgaaattataatgaaattgaaaattttttttttgagatggagtctagctctgtcgcccagtctggagtgcagtggcgtgatctctgctcactgcaagctccatctcccagtttcatgccattctcctgcctcagcctcccaagtagctgggaccacaggcacccgccaccacacccggctaattttttgtattcttagtagagatggggtttcaccgtgttagccaggatggtctcgatctcctgacctcatgatctaccccccttggcctcccaaagtgttgggattacaggcatgagccattgcacccagcctgaaattcacatttttatatagtccctattctaatgagcctggaaggtcagataggaaataaaatccacattttaaaaaaataaataatgtatatacagattaagagaaaaatgtgtaattacaaaattatctatgaaccccattgtgtagccatggaagtagaactgagagtggaaaagtaagtacgaaagagagaaaagctcagctccttcccaacctttagttgccaaaggctgttcaaattgttaaccattttatccacaatttctcttttacatttctgtgactgtttttgcaccccaaaaaaaagggtttggggctgaaataacactattccctttcaactctaaaaccctgtgttagattttcttccaaaactaagtagaaaattagccaaaaaaagactcattagcatcctttctaaaataaagaaattttattttaggagaaaatcagtactttgagtaatatactccattgggtatatattaatgaacttctgtgatttgtaaatggcagtgtaacagcttctaatatccttaagttcctgttctcgtgctgctataaagatactacctgagactgggtaatttataaagaaaagaggcttaattgactcacagtgctgtatggctgggaggcctcaggaaacttacgatcatggtggaaggcaaatggggaagcagatacgtcttatgtgatggcaggagagaaaatgcacagtggaaattgccatttttaaaccatcagatctcatgtgaactcctgcactatcacaagaacagcatggcggaaccaccccatgatccaatcacctcccaccaggtccctctcaacacatggagattactatttgagatgagatttgggtagggacacagagccaaatatcatagatgaagtaccaggagtgtcctaggatcagcttcattggcagcaataaaataactaaaaccttgtaccatgagaattaagaaaacatattgaccttagatttttaaaatcaaaatgctgttgcttaggtttttaaaaccaaaatgctgatctgcatgcaataatataaatagagagcttctgtttgtttacataaatagcatcttaaattcccttttatcaaatgtaagtcatcttcagctctaggatgtgcaagaatatacaaatgctttctacaatacttaggattctttcagcaaaagggaaggaggaagggtaggaaagagaaaataatatatacaatactgcatacatatatagaaacttcttttggggttctttcagcaaaaagaggatagaaggatgggagaaaggatggaaagaaaacatgtctccaacaggcttagaaaaaagaatgtactgcttaacataactaaaacttctgggagatatttagtttaggtatggctgtatacagcagctcaacaatgtcaagaattggttcctttatgtctctcgcctttgcttccctgtgtcttgtctccatccttgggcatgcccttctcttatattggcaaagtggttgacaacctccagatttaacatcctcataagtccatgttcagcataaacagagtgaatgttttcctttcaaaagacctaactgtgtgtctcatagactttaattagggtgtgtgcccatccctgaacaatcactttggccaaggaggtacagtgtactgattggccaggcctgaatcaaatgtctatccctgtaggcagaagtagtattaataccaccgaaaccaaatgggctgagggtgagaaaggggtaatttctcaaaggaaaatcaggttgttattgtcagggaaaaaaataaataaatacaagaaaccgatgtaaaaaaaaaaaaacctcacaaatatttactacctttttctggctgccctttttttcatacacactgtattccccatatcttaaattacaaaatctcactaataatccaaacacactcaccttcttcctatagagagacaatctaaatctcatctgtttgctgcattcacctcttagaccagcacagctaggtgaggtaaactcttttgccaagtgaagacagaccagcaacctaagcccaaaagatgtttattcacctccagtgtatacaataaacattcagtgtggaaagagaagaggataatggtaaggatgagttctacttggaagagaaactaaaatgtatagataacatcttaagagtaaaaattattttgcccttgagcttttgaatcaacagcttgggggagaagagacataaaaactttcttctgtcctcaggatgcatgccagttgcattttacattgagaataattgtctctttcctcagagagtatattatataaggtgcttgggaggggcctagagaatcagaattctctctggtcccagtcatatctcctgctaacatccctatctctctgacttagtatacaataactttagcttaggattgagaattcaacattctttaaaaagtctcaactgatttctaattagagaaatgaaaaccaattcaaatatttcatgtgtcagggagattttaatgcaaggaattggttgcacaggtgatagacagcagagatgccaaatagagaaaggtgagaaccatttagagatgaacaaaagcaagaagccactacagcttctaggatgcaagggcaaaaatacaaggagccaggatcactaagcagatgctgcaacattggctggcctgtctggtaggagccagatccagggagaagtttcagctgttaatggaaacatcacttacgacagagagggaggagaaggaatacaatccccaccctcactcatcttctctcactctccaggaaatgtatctcatttgctgaactcagctggaacgtagtctgaaggagggcattatagatcagaacagaaaaagggaaaggaatacatctgccaatacattggcccaggtctgatataacaagcctgcagctttctcaggaaagcctgattttcctcattctctgttttcaaatacattaacttaatctaaatttgtccgtttattacagaatggtatcaattaggaaactgttcatcgcaggtatttgaaatcccacctgatggtggtttaaacagagaagggtttttaaaatatttcatgggctctaagaacacaagtttttcatattttttatttgtaaaattaggtaatcatttacaattgatgtgaagagaaaatattatattattgtataatagcattttcttttcttagtggtatatggaataatgatgtgtcttataatcgatggtatgaatgtgatgaaacatagtatttgtcttgtggaacaaggggtctgggtgggcaatcctgaccaggaacaagggtctaacagtgctatcaggtactcaggctattttcacctttcatctctgccatgggtatgcataaaagccttcttcctcattcttgtcaccaatgatgacaagactcattacctcagcctcctgtctatgttccaagctaaaaaaaagtggaaaggaaaacaatatgaagggcaaaaatattgcctatagcaagtctttacgttttcatttcggaaagatcacccaagctagagacttttaactatacctcattagctctgactgtgttttatggcttttcagatattcaagagaggctgggcatcaagtatttaaagtatagcctctataggagaggatatatagtagagcaggtggttggaaatgacagtaacgctataaagatatgcatgggaatggtaaacataaatttaagatgctgatcatctttgaataaatggattataagaaatgtgattgggaaattgtacacagagatctttattataattgtgttatgttattttcttagctggatggggactacatggttgttatattgtttattttaaatgtctttttataccggacatagatcgttagaaatgaaaaaagctcagttatttggaatgaccactaatggcattctactgtaaataaatgaataaatagtttttgatttagagttattgcaggatgcagatgaaataccctgaaagtcccaatactagatttaaaaataaaatgggaatttcaaaagttactaaaaagctacagaaataaagattttatggtactggcataagtatagacatacagatccatggaatagactctcaattctattccatggatctgtatgtctgttcttcacatttatggtcacttgagttttgacaaggtaccaggacaattggtggggatggggagaggacagtattttcaaaaatagtactgagacagctggatatccacatgcagaagaatgaagttggacccctaccttacactgcatacaaaagttaactcaaaatggttcatagatctaaattaagaactaaaactataaagctcgtggaagaaaataggtgtaaatcttcatgagcttgaattaggcaatggtttcttagatatgacaccaaaaacataagcaacaaaagaaaaaatagataaattgggcttcatcaaaattaaaaatttttgtgcttcgaagccactatcaagaaaatagaaaaatggccacagaatgggagaaactatttataaactatacatctgataagaggcatctaaaaatagttttaaaactcttacaattttacaaaaagacaatccaatttaaaaacagcctaagcatttgcatgggctttttaccaaagaagatatacaagtggtcaatagacacaagaaaagatgctcaatataattattcatcagggaaatgcaaattaaaaccacaatgagatagcgataatacttcatacctaactaggatggctataataaaaaagacagacaacaaatgtttgcaaaaatgtgcagaaattggaactctcatacactgctagtgggaatgtaaaatggtccagccacttggaaaaagatctagaagttcttcaaaaggttaaacaggctgagggcaatggctgatgcctgtaatcccagcaattttggaggccgaggtaagtagattgcttcagctcacaagttcaagaccagccggggcaagatggcaaaaccccttgtttctacaaaaaaaatacaaaaattagccctgcatggtggcacatgcctgtagtcccagctacttgggaggctgaggtgggaggatggcttgagcctgggaggcagaggttgcagtaagccaagatcgtgccactgcactccagcctgggtgatagagccagaccttgtctcaaaaaaaagaaaaaaaaagttaaacagcattatcctataacccagcaattctgttctgaagtatatgaccaagagaaatgaaaatatatgttgtccacttgaaaacttgtacatgaatattcaaagcagcattattcataatagccaaaagtagagacaatccaatgtccatcagctgatgaatggataaataaaagctgattcattcttattgtggagtattatttggcaataaaaagaaattaagtacgggatacatgctataacatagaagaatcctgagaacattatactcagtgaaagctgacaatcacaaaacactgcatgatatatgactgaattcttagaaaatatccaaaatagacaaa

SEQ ID NO: 141 - DNA, 1311 bp, Homo sapiens
cagaacacaggccccagtccaagtcctaacccctgctcaaatccaaacactggaagtggttacatgaactcccagcaatcactgttgaatcagcaattgatgggaaagaagcagactctacagaggcagatcatggagcagaaacagcaacttcttctccagcagcagatgctggctgacgcggagaaaattgctccacaagatcagataaaccgacatttgtcaaggccacctccagattataaagaccaaagaagaaatgtgggcaatatgcaaccaactgctcagtattctggtggctcatccacaataagcttaaactctaaccaggctttggcaaacccagtttcaacacacaccattttaactcccaattccagcctcctgtctacttctcacgggacaagaatgccatcattatctacagcagttcagaatatggggatgtatggaaatctgccttgtaatcaacctaacacatacagtgtcacttcaggaatgaatcaattgacccaacagagaaacccaaagcaattgttagcaaatcaaaacaaccctatgatgccacggccacctaccttagggccaagtaataataacaatgtagccacttttggagctggatctgttggtaattcacaacaattgagaccaaatttaacccatagtatggcaagcatgccaccacagagaacatcaaacgtaatgatcacatccaacacaactgcaccaaactgggcctctcaagaaggaacaagcaaacagcaagaagccctgacgtctgcaggagtccgcttccccacaggtacacctgcagcctataccccaaatcagtcactgcaacaggcagtaggtagccagcaattttcccagagggcagtggctcctcctaaccagttaacaccagcagtgcaaatgagacccatgaaccaaatgagccaaacactaaatgggcaaaccatgggtcccctcaggggtctgaatctcagacccaatcagctaagcacacagattttgcctaatttgaatcagtcaggaacagggttgaatcagtcgaggacgggcatcaaccagccaccatccctgacgcccagcaattttccttcacccaaccaaagttccagggcttttcaaggaactgaccacagcagtgacttagcttttgacttcctcagccaacaaaatgataacatgggccctgccctaaacagtgatgctgatttcattgattctttattgaagacagagcctggtaatgatgactggatgaaagacatcaatcttgatgaaatcttggggaacaattcctaa

SEQ ID NO: 142 - protein, 409 aa, Homo sapiens
MNSQQSLLNQQLMGKKQTLQRQIMEQKQQLLLQQQMLADAEKIAPQDQINRHLSRPPPDYKDQRRNVGNMQPTAQYSGGSSTISLNSNQANPVSTHTILTPNSSLLSTSHGTRMPSLSTAVQNMGMYGNLPCNQPNTYSVTSGMNQLTQQRNPKQLLANQNNPMMPRPPTLGPSNNNNVATFGAGSVGNSQQLRPNLTHSMASMPPQRTSNVMITSNTTAPNWASQEGTSKQQEALTSAGVRFPTGTPAAYTPNQSLQQAVGSQQFSQRAVAPPNQLTPAVQMRPMNQMSQTLNGQTMGPLRQLRPNQLSTQILPNLNQSGTQQSRTGINQPPSLTPSNFPSPNQSSRAFQGTDHSSDLAFDFLSQQNDNMGPALNSDADFIDSLLKTEPGNDDWMKDINLDEILGNNS

SEQ ID NO: 143 - DNA, 120144 bp, Mus musculus
  misc_feature (1)...(120144): n = A,T,C or G
ctaccactttgtcaagagcatggcatttttaggactcttatcccttattccagttttcttcgaggaaggggactgttccaaaatgtctttggtactgtaggagtggagttcttcaaatccttccaaatactaaattttacaataattcatatatttttctggtgctatgaactatataaagcgacactgcagggctggagctatagacagttggcatgaattaggccttggggtccaatccccagcatcaaaactccatacaatacaagacagtaaagtgctaccacagctgtcctgatgtgcccttctaagtcaggcactaggggtagggaagatgggtcagtgggtcagagtgcttaccatgccaccctgatgacttgagtttcaggtctagaatccacagaagaagctggactcgggtgatgcacatctgtgaacccagcactctgtgatggagacaggagattcacctggccaatgcagcacagagacagagacctcacaagaggctttgcctcagaataataataatagtaattaataataataatgaattaacaataataatagggaaaactgactccccaaaacctgtcctgtgtctccacatgtgcacctgccaacacagacagtctctctctctctttctgtgtctcagtgtgtgcttctctctgtctctgtctctctctctctgtcgctctctctctctctctctctgtctcacacacacacacacacacacacacacgcataaatctttaaaaagaattcagaattcaggactcagataatctttaatatatagtaaaaagttcaggataggtggggtaagtcatcccatcatatttattgtgaacttggtggtcctttaattgctgtttggtaatattgttactgctataatctgcttacatatttcctcatctactgataattgccaaagtttcttggctgtttatccagccctcaggtttcaaccccagcacaccagcttagagtgcttacccagaatgagggccctagggaggagcagggggcatgcggccagcgagaatggaaaccaaagttccctgagccctagacagtgctctttctcacgtcctgcatttcccactgctttctggaaatgcaaatgtctcaggaatgcagctgtgtgatgccttccctcccagccctccctcagcagcccagcagccatgggctgaggttcccactccagctgtttgtgattctgctccttggctccgacccatggtctcaaggactctcttaagagctgggctccagtctgtggcgcttcctactgttccctccacgctactgttggcggtggagttgcctcaggtcaggtctctgcctgtcttgtttggctacagtgttcttcccaggctgaaaggctgcttctcccccacatcggcagtggccagccacgctgtgaggattagctttctgtgcaggtgaagggcctcactaatcatgatcagcagcttctattctgacggaagcatggagggttgtgtctcaaagggtgtggagccagatgtcatattctgccctcagtaactgaatggacaattctatcacatccataagggtgtacctttatttcctatacacacacacacacacacacacacacacaggtgcacttgcacagagaaagagagggacagagacagacatagacagagatagagagagacaaagacagtaggccagtaatgcaggtgatgaaagagaatgggaggagagggaaagggagggagggagagaaagagagggagagggagagagagagagagagagagagagagagagagagagagagagagagagagagagagagagaaagagaaagagaaagaacacatgcactgaatgtagccagttttagcaaaatgctctggcatattaatagagtcaggggctaggttgcctgggtttgagtcctggctcagaaggaggttcccgagatctgctcaggtgagcattcggtcctttctttggcagggccttttgttgttatattgttctatataggtatatcctacatgcccaacctgttttttacatttgtttgtttgtttatatagagatggggagctgccctgatgcctagattgggctcaaatgctcttcccatagccttttgtagctggaactacaggcatgtgccactgtgcctggctcttcttattcttgttagctctggaaagagacactgatcataggaagatgggcagataaaaccttacctaaggggcttctttctcagtcagtgggcagttctgtatggcctttggaggcagagtaagagagctttatcctggtggtgactctgacttaaacctatgtcagatggaagaactgaggcagggtgtctgtgaaggccatagtttctgctggcctggcattgaagttgacgtggtgacaccagtttatgagccacctctcctctcctgcagtgtccatccagatgctcaggcttcgtcttattcagggtctcctacccctcctcctggtttgtatgtgtatgtgtgtgtgtgtgtgtgtgtgtgtgtgtgtaaactttgccaagtgatgctagatgggctagccaggtatatgtggggaaaacagaccccctttatcactcctccttcaaaatatgtggcttacggagtgctgaagcagcaggttgttatttgaactttatgtgccaagcctaacatgactgtaatttgaaggcacgccaatccaggaagctgtgaagttgctctacatggtaaattctgaagcggtaaaaattgatgaattttaaaagctcgggtttctgctttgcaagctctcaggttagggcagaaaacccactcaaagctagaagtggaaaggactgagaggatgtatcatcttatgactgtttaaaaaggccatgggggtgaagtgtcttataggctgtagagcgtattgcagagaggttattcagatgggtaagtcaagtagatggtcacttagctctggaggctggcatagagtgagcctgggagctccttcatcagccgagttataggacctcactcatacagtgcaacacggacctcagttaaatgcaaagaccagcccccaccgtaccccatctctgttgctcagtataatgccacttctggagtcatgggacgttcaatagccagaaagggtctctgtggttttgacattttgttaaaagtgttccacatttctggtcccattgtgttgcttagcatttccaattacatgctttttgttgtccttgttgttgttcttaggtgtgaacccagaggtgggggggcgggggcgggggcgggggcggggaaatgtcaaggtgagaatgctcaaccactaagttctacactcagccccatctggttacatatattcaaatgatcactgttagagcagtggtcagcatgcattcaatacctgttctcttgaggatgttaagtattgtcccaatgccctaaagtatagcttaagacttgttttgaattctagttttgctctcactgtctaatgactgagcaattacaccttgtttctctgtgtgctatgagccaaatatgttaccgtcccctccagttcactcgtggtagtattaggaggtggcacctttgacaagtggtcaggtcatgagggttgttatgatatgaagatgaaatgtccctacgggctcctgtgttggtcctcgatggtgctgcggttttggaaggtgacagaacttttaggaggtggagcctagcctcaggtgtttcctgtcagacatcctgtcacagaggtgagaaaagtcgctagcataaagtggaaccctcccgaatgggattggtgccttgtcaaaagacctcagagaacttcttgccactcgtgatgagaagacttatcgaatagataagagttaggagttgggccttcaccagacactggatctatgttaacctcagactcctccttctaaaatagtggggaaccagtctgtgtcattttcaagccacccagtctagagtattttgatagaaaagccttaatggactgagacactatgtctctatttcgccacgtgtgaaacagtaggggcagcagcacctctatcctctgatgatattggagggatgggctgacttacatgcaaagtatttagggcagggctttgcacatcatgaatgctacatgagcatttctaacatcagttctcacagcagcagctgagttgccgtagtttaagacagtggttctcaacctgcgggttatgactcctttggggggtcacatatcagatatcctgcatatcgggtatttacattacaacttataacagcagcagaaattacagttatgaagtagcaatgaaataactttatgggttgtgggggggtcaccagcatgaggaactgtattaaagggctgcagcattaggaaggttgagaacaattgctttaagatgtaaatggtgccagagttggaacagtaggtagcatttctgcttcccagggtagggctaggtattacattgttgtttatgtaggatcttgagtaatggtttccccaaagaccatctcaccaagacattgcctcgattttcttgctgctcttggacagtttatcttccaacaatgagggagaaaaataagaaaggatgcagtatggggatttatacattttgattccccaagcagacaatttcaaccacaaagtgaaactcattacatcaatgtattttctaccttagaggtttatacagataactgtcttggtaggccatacgccagcacgcacaaaggtccatagaaggacaaggtctgtatgcttagatgcatggagactgaaagaaatacatgacagattatcactgtaatggcatgtggataggccatttttatagttagttgtagctcattccataagctttacaactatagctgggtcttcgtagggtttttaaaaatttactacaaatatcctatatcaagtggaattaaaacctgatataaagaaaggtttctttttcctcctcctcctcctcctcttcctcctcctcctcttcctcctcctcctcttcctcctcctttttgtttttcaagacagggtttctctgtaagtcccggctgtcctggaactcactctgtagaccaggttgaccttgaactcagaaatctgcctgcctctgcctcccaagtgctgggattaaaggcgtgtaccaccaatgcctggcttaaaaaaggtttctgatttaaattcttgtcaagagacaggatggtgagatgaggtagtgtttcaacaagtgctaattgtttcacctcctagccttagtttctaaataaggattgcactagttccatcaggttcttatgaagtatatatagtcatgtaggtatcatgagttctctttcaggacatagttcctggccatgtggtttggcctttagtcagtgagtctgtagaatgagatgttctctttgcttcaggcatccttgaactaaggcttatggttaactccagcccctctgccttggacactccatgtacagcaaacataacagcactacgtaagtgatggattgcgagagtccagtgtgacgatgagaacacggggatttcagcagagaaaacagagagtgagggctgttgagatggctcctcaggtaaaggcacttgcttccaaggccaatagcctgtattgttctccagccttccatgtgatgcaacaagaactggcttctgggtgatgtgacaagaactggcttctgggtctctgcgagtttgaggccaggcttgcccaaagagccaagtccaggacagttaggcataaaataagattaaaaaaatataataaaagagatttaaaagaagaaaatgcaaaggctcaaagatgcttttagtactggtgggcttgaagaacatgaagaccattgagctgaagggcactggctattggaaaggccaagttaagtaggcagaaggtgggcactgatagttctcttatagttcttatgggattactctaataaaagttttactctaatataagttctgtttctgctacagaaaactactggagagcttcatgcacaactggggctctatttttaagtggccattctggatcagttgtgatgtaaggatcatgggagcagagaggccagtacaaggacgcacaggcacctgcgcgagaggctgggagcaggcacggcaataacagggatggtggaaaggtaagccatgggaaatagtctggaagtggacacattatgattttttttgataaatttaaagggtataaaggaaagaagaattaaatatgactcctgggctttggcttgaggaactaggtagatggtggtaccacaacttgacttttaagactcggaagtattatgtctggatagatgaaattaagaatttgagacatgtcatgtttgagatgcttataatacagtgagctattaatgacaagtaggcagttacattaagagtggagcttccagatgtgctaaaaatttgagactcacattcttaaagatagtaacacggggctacgagcccattcagagagggtatgaagggtatggaggaccacatcccaagactcttgctgtaaaggctgggcatgggaggaagagttgccaagagaatgcctaatgtcttagcttcttctacactgctatcaaagaatactacggagtggataatttataaagaaagaaatgtattcctaacaattcacaacctgggaaatctaacatacctagtttgtgcctgcagggagggccttctttcagggcagagaattcttaataattgtacacactggaggcttcaggaggtaagatggggtgaagttatagcaagtggctaatgaagtagctcatcaggtaagggctattacctctaaccatgacccacagttcgggtcctgggacccacatggtagaaagaaagaatgattttatgggctatcctttaacttccacacatacaatcgcaccgacatactcaataaataaatgtaaaaataattctaaaaaaatggtgtagcaaaaaaaaaaaaagtgcctttgaatcaaggaatcagtttgcataccaggaatgtaggtttcgaccctatttgtgggaatttccttctagtcagagctgaagcttagataccagtggcttagtgaaactcttggtcttatttcattggggtgaggcctaagactgattgatgggccagcagaaggttgctccatgtataggaattattccaaggttggaatgataaatgaaatgttaatcaacagctaattcacacatttgcctattagtatcaaatttaacactttataggtatgccacacctccacaatgggaataaattgtagtacaatttctagcatttcttgagtacctaatggcagatgtttagcatgccttatctcacctcatctccacagtacttcctgggacttagcatggctagtcttctctagattagggttgttgggtttaccatttgagtcaaatttatataggatgtgtcaagatacaatttgtgtatagactcgcttttcatctgtactctaaaaaaaaaaagttaaaaaacattgttaacatcatggatgttttaaaataagaactgatattgtcattgtggttttgtggtgctgaggatcaaagccagggtcttgtgaatggggcaagggtggcgctactgagctacatccccagccttcttttccttttcaatgttgaggtagagtctcataaagttgcctaggtggtctttacatgtcctctgctgcccctaggatggcctggagagttctctattctcctgcctcagcactgttaaccagagttcataggcctgggccactagacagagttgagggtgagctttttgttactgtgttttgctttttgtttttagtttatgacatagatttaacaacaacaacagaagctaaataaaaagaataaagattttcctcaatttctcagctctaacagtctgtggctctgtcattaacagggatagcaggaacacagcacaaatacataggtgctgtctttggaaaacaattttaccttgaaacatgggagctgcttattggaccataccttcctgttgctcgtgagtcagcacgaaacatccctccagagaaggccaagtgggtcagatttatctaagaagacagctgtgtggtcctggatccttctccagtctcgtggcactgcagatacacgcttctggcttcgtgaataacggtcagttacccactttgtaaagaacccaacacggaagtagcagtctgccctggaaaacctttggtaggagaataaatgagagcagactcaaatatggcctacggtaatattcctcagtcttttaagtagttctctttgagagtgtgatacttttttaatgtgagattttattagtaaaaaggtaaaataatttaaaaatcggtggagttttgcatcatgacttttaaattatacctgtcaatatttgcttgttttcttagtatgggtttaaaattaattaacattaaaattaacatttaatatttacataataaatagtaaaaactgaaacacctagtgtgggctgaaacatgtgttggttttgtggtactgtgacctgaaccaagagctttgcatgcgatagccgggacataccatcgattttctgagacccttgaatgcagtgagggaatttcagtatccgaggggcaaatagaaacccagagaagtgaaatgaagaggaaaaaaagggtccaatgggataggacaggacatccttgccagggatgcacccaagcaatctggggggggggggagtaagaaataattggagctgctcaagttggacaaagcaaaatgacatttccatgtggacatttgcttttatcaagtgttaagtatggcaaagaaatcaggtggtttaacctcatttagagttacatccagacaaagagattaggttcacagtatggtattatgaagagagcatccatcattcatattgtccttgaccaacatctgacctgctatgagactacattttttcccatagtctagactggaaggctccagaagcaattaaacagaagatcaatgtaagcagacaggtgtacaccatcacttcctgaagctcacagtctctgagtttcatacgagctacgtttgctgcacacagcaaatcaacttaaaaaaaaaaaaaaaacagaggcagaaaataaatttccaagtatgacttacactacttattaatattgttaactggcaggcgatctgtgccctccacttcaactacgtttagcaagtggctggctcacttttgcagtctgattctgcaggtccatctgcagggctcttgaaggtctaacctaagctctcccacctgtcaggatttggaccgtctccacagagggcgctgagcgcattaccgccacgcggcgctgaggtcagcctctcgggtgttgggagagctttttattctaaattacagacctcgcagccaccggatatcctcgctgcataacaggcagtagctgtgcggctgcactcgcgtttcctgacaaccacagcaatatttccactaatatcctgttcaaggccaagcgctgggctacgattcattcccaggacccctccccccggggggttagtgcccccaccgtggcccgggtgtcatcgacaaagagaacctcatgaaagttcacgacaacaccctctccccgtgggccgcgagccccagcccccagagtcaagcttctgggggccctcgggcacgtgctgcgcgctgtgagcgttcgcattgtcttcgtccctccgctccccgccgcgttccatccccttctatctgcggagcacacgcgctcgggagcaagcgtcgcgccggcgctgagcagcagtccaacagctgcgggggcgggcccaacagcggggggcgggcccggaggcggggcggggccagggcgcgggggcgggcccggggcgcggcctggcggccgcggcgccaccaagcaagagaacaagatcgctgcgagcgagcgcggcgagcaccagcatggcggggctccggcgcccgcagtccggcgcctaccgccgcacggccgctgccgtgaaccttctgctgggcgtcttccaggtcctgctgtcctgctgccgtccgggaggggctcagggacaaggtcagcccgtcgtcggggctggctgtccccgccgccccgccccccctttcttttagggaactgttgaaatctgtgagggttcgcggaggaaggggactcgggcggctggggaagacgggctgctgcagccctgcgaccgcagcgtcccctcggcgactctaggccgggccaggagcgggcagcgtggggctcagggaccgctagccgcgcacgccccggagcctttgtgcgcgggcccctgcgccccgggcgcatcccccgctttgtgtggcgcgcgggtgcctcgccgcgcccggcttcctgcagctttgtttcccccagcccggtggcttgggggtcgcgccgtgcttggtgcggcggcctcatgccctggtcttgaccaagcccgcacgccctcatcttctggaccccggggtccggctgggcattgtatttgcatcctcggctcacccctcgggtggcctgccctgcgaggggagaaggagacttgtttgggggcaggcggttggcacgaggggacgggcgaggaaacaggaagcgtttctttgccgtgcattacaaacgcggtgtgtttttttggtgtccgtgcagcgtttgagcccttgccgaacgtggtggagctgtggcaggcagaagaaggggaactcctgctgcccactcaggtgaggaggaccggtgacagggcgggtgtgggcgtgtgagggaggagaggcctggaggttgccggccttccccccaatggcacaggagcgctcgggtcactttgcaaggcaaataaacggtcgtgccgagcctgaacacctggcaacggtggctcttcagcctggctcccgcgccatgtgacagggtgtgagtcagggccgccccaagttcagaaggtgggtgtccaggccacctcagcagggttgtgtgtctcacagccttgcgcctggctagtggcgacttccttggctcgttagtgggccagggtgggcggaggactcgcttctgggtctccacggctgtctctaagcaggcgggtgtggtgtggatggcaagtggctggagggttgaacacaatgggaatattgatttcataaatgttagtgagtggtactttgccattagcctaagtagctttgggatgaagaagtgactttaaaggagtataatcttggaatgtctccaaatgtctttaattcctgttagaacacacccacttaagaacctgaatttcaggttttttcacccccctacgatgatataatgattacatgtggaaaaataattgctaacgttttattgggaatctgtagcatagagggcttcaggctgcaacggatgtggtactgcaaagcttttgtcttgaattgcatgtttcagttatgcaagaaattctcactgacttgcaaaaggtacccacttacacataattttgaaaacataatcttgatgactgttttcaccagcagtgtagtagagaccccaaatgcatttggggggtgtgtgtttgcagtgataagagaacattaggcttgcctgtttaaattgtttattgcttcccatgctggtagcagcattaaaatcaggatgttgaattctaacttctctgcagtctcaaggtttactgttctccctctcactgaagcggcaacagtgctggctttgagatatttggaatattcattttgaccagggccaatgaataacagcttacaggcagaggtgatttttcagagacacttccccagatctttcaggaaggccagcaggctccaggagacccaccctttgagaataagccctgctagcaagtagtcctttctcctaaatgtatattcccaaatgaatttttaacccttgattctaaataatacatctgttttgaaaagagaggaaataaaaaccaaaaccgggggaaaaaaaaacccacaaaaaacaacaaaagtctcaaagccaaaatcagttgtaactttaactgagaccctacacttagcacttggtgtgtttactttaaatagtcctatttgtgaatatcagttgcttaacagtagcacgagcaacctttgacccagagaactcttcattgtgggggcttccctgtgcactgtagtatgctgagtatcattcctggtcttggcaccttggatactgtgacgctttgactatagtcatgatatactctctctctccattctgggtgtttgctattgttttaaaataaggtcttgcagtgctgactcagagtcctccactcaagccatcctcctgtctcatccttgagttagctagagctacatgtcttcccttggacctggctccaaccaccagtttttaccaagtgagagcgtctcccaagtgtcccaggaagcagaattcctgggggcaagatttactgaggtacctttgctttggggctcaactgaagcctctatgtcttaacagggcagcgatggaggcaggaaaataaatgatgggcagtctttgtttctgcttgtgtggaagatagattgtgctcaggaagggaaatgacaaggcctgtggtaacattaattacatcatttataggcttaaaagttatcttataaaatgtccagtttctggctggattttacttacgtgcaaaaatcataaaaatggttaagattcatgcctttaatcccagcacttgggaggcagaggcaggcggatttctgagttcgaggccagcctggtctacagagtgagttccaggacagccagggctacacagagaaaccctgtctcaaaaacaacaacaacaacaacaaaacccaaaaaaccaaaaccaaaactggttaggattgagactgtgtcactccagaatacttcccacggtgacgctgagagctagggtgttttaatcaacatggagtgaaagtggaagtggtgccggtctgcgtctatcatctctatatgtgtgccctttagatactgtgccactgtggtacactgcctgggcagggaggaggggggtgtgtctcttagatacagagtgttctaaagaaggtcatttggaaggagttctcttccaagaacttagaattattttcaaaagttttcttgtgtatgtcataagagtctggagaatatttataggtgtcatgtaaatcttataccttccattcaggaagaccagaaaagggctttggagcctaaaagttgtcagtgtgaggtgcagttggaatgtcaaggtgtagtgttcaatgcacaatagatttgcccaaattgattacttatagttacttatttggaagtgttctttttttaaaaaacttttttttaatggaactgtaagtgattaacaacttgttattcatcattcataaaacaaaacaaaacaaaacaaaaccaaaccatggccagtcgtggtggtgcacgcctttaatccctgcactcgggaggcagaggcaggcggatttcagagttcaaggccagcctgatctacaaagtgagttccaggacagccagggctatagagagaaaccctgtctcgaaaaacaaaacaaaaacaaaaaacaaaacaaaaaaacaaccccaaaaaccaaaaaccatgaagttgttcagtggtggtgcatgcctttaatcctagtatttgggaggcagagccaggtagattgctgtgagttggaggccagcctggtctacagagcgagttccaagacagctggggctatgcaaagaaaccctgtcttgaaaaaccaaaaaggaagaaagaaaaaaaacaaaaaccaaaaaaccaaaaaaaccggaactgacttgttacgagctgccggaccatcttgtctctaagtgtctaggtttgtgtcctgatgagtcccacttagcctgttcagtcaccctttttttgttgttagaggttgaacccaggaccttgcatgtgctaagcacatgctctagtcactgggctgtatctgggcccagcgtacctcttttttgttaccagttttctcactggcagagtagggtatttattaaacttaacttcagaggagctccagggtgcttgtcatcttggtggtttctttgccaactcataagcttggtcatggaaaacataaacactttcccttgctgaaggggctgcaccagggcagataactcagtatgatgggctctgtggttaagctgatattgatgttattcgtgtgtgtgtgtgtgtgtgtgtgtgtgtgtgttagtgtccaaaggatgggcctcagccttgtgcaagctaggcaactgatagcaatgaattatgnnnnnnnnnnnnnnnnnnnnnnnnnnnnnnnnnnnnnnnnnnnnnnnnnnnnnnnnnnnnnnnnnnnnnnnnnnnnnnnnnnnnnnnnnnnnnnnnnnnnnnnnnnnnnnnnnnnnnnnnnnnnnnnnnnnnnnnnnnnnnnnnnnnactgatagcaatgaattatgtcccccagcccagtttatgtatttttgttatgtagtcacctgttaggaaattatttggtatagtaacacaaaaaattatttatctgccagaatgagaggaaagaaaaacccatttgactttattgttagagttacacacacacacacacacacacacacacacacacacacacgcccaccattattcaggaccctgaatccaaagtggtggtggtgcggaaaccacacagactttttctttagctgtccagtggtagctgcgtttgtataagataacatgctttgtgcgccttactgattcacatatatagggtgatattcccttgacctgctctggcctttggggtctccggcagtctgaccttgtctctttctcttgtcactccgttgggactctccttctaggctggtgctgggtctgcgagcccggtgtgttgtttgtggtgtgaaccatggatgccaactctggcatgcaggcacttcgtggctgggtccctgctgagtcttagattgccatgctgtggctgtcatctcctttctgaatttcctgtagcgttttgataaccatgtgtgccttgttgtccctactgaggtttgagggctctgctgtggccacaatatgtagttggcattcaacagtcacccatgatgcctttggaggagaggaggttgtcatatctggccccacttttttatccatgaagttactcaagtcctaaagatggcagatggaatgcctaagcgttcactgtcctgttattgtgagaaccacatttggggcagtcccagtctgcttggactcactcatgactgcccaagagtggagatgaaggtgctgggcccagcatggggccttggtgggatgggtgggccatcccggcttggggctctgccgcctgtaaaagtcattgagcaaacaccaaacattgggatagcacagtggaacgtccctgacttagggatgaagaagaaaactttgtctttaaaaataccatgccttgttgatttcctctactcttaagtctgagagtatggataatagaaattgacagaaagttaaccagaacggtacagtgaacatgcttatttgtttatttgttttttaatcccaggtgcagcattatgtaatacctgcaactctggtcagtgaatcattaactagtatttggaaagctttctgtcatagaggtttatttttggcttaatctctttttgtcaatattgaaaaataatgactaacttgggttgagaactgtccacatcgtttaagtgccatgtggtcttcactcatatctatatcctatagagtgtgaagtgttttgcctggctttatacctgaaagacagcgaggtctgctgcaagtaaataagtcacctgctgcaataagaaagtagctgtgctggatttgaacctgggatgtgtttagctccagggcccgcacttttggccgagatattatgtttcagtatcctctgacaagtactttggtggtgataagagtctatgttagagggaagtaacttcatgttctattttgatccagagaaagttgcttagaagttttcagaaagcctgagagctattagcatctcagagacagctgggttgcactaagcctgctggccaggctctgtttcaggtgcagatggtgttacagtaaatctaaacacctgcctgagtggaccctgcagtttgagtgaaaaggtccctgtctgctgctttgaaaagatccgtgagtgagcctgcccttaaaagcagcatgggattgcaatagccagtacaagggccctggggcatgggacgggtaggaggaatagagaagatttggtcttgttctttgagcagatgaagctggtgatgcctggggcagccttcaagtgcttaaactaagactggagaagagaggccagtgtctcccagagggtcacttacagcctaaggccagaaggggccctaccctgagcattacttggtagacaatgtagttcagtttctactgtgacattttaaatggcaaccagagcctgctggtctgaagggagggtacgggtgtgtcagggccagtgccgttctgggcggacccttcctgaaagggtttggagtatagctcctgaacactgcggagctcttggagcgggttctgttttgtgagacagggtctcactgttagcccagtctggtctggaaaccttccacccttttgcctcagcctttgggtcaccctcaagtactgagcagggagggacactgaaaaggggcatgcactggggggtaaggagtgccgtgcaggaagattggtgttgtattgatgcttgcagagtggagtagcatagcacagcagagagccctgtacgttgtggcagtgcaggcccagggtattgctggggggccagtgggcagagtggaggagagtggacagagctggatttcctgttggagggcttacctaggggtcaagcattgtgatggtgccctcagcaaaagtggggctggctcaaaagagatcagaagcatctctgcaggcactcctgacactgagttcactggggagtggagcttgacacagtggaggtcctggcatttggaagtgagaccagttgtaagcaatgtgccatgcctgcagagtcgctgctgtgactggttgccaggcttggtgtagtgtagagcagagcttgcctttgaggcttgaggtttgccttggtgaaaggtgggcattggtggaatgtctgcagtgtgcttgagagatggggcggaagaagcagtcttagccttgcaggttcagtgtggattaacgtgctgaagtgcttgttttaaaaggtttagttgcttttatgtatttgtgtgtgaggttgcctgatgcacagagaagccaggtgttataggtggttatgagctgcctgatgtaggtgctgggaactaaaccccagttcctctggaagagcagttgtggctcttaattactgagccatccctctagactctaacatgctgaagttatagtgcagaggaccctgggaagagacaggaggagaggccagagggtcagctgtccctggagtagaggggccagaaatgaccggctggtgagtcaggaacctggaaactttgaggaagggccacgccacttgggccgtacctggtttgggcaccgtgggtgcctagctggacttggctttgttacatctctaccctgctgctgtttcagttgcctttcctcctgacatacgtggaagagcttttaaggtggtggttacttaatttacaaaattagcagcctttttattgctgtcaagtataatatattcattaatagaattctgagctaaacaatgtctttttaaaaattaattgctatttatttatttatttatttatttatttatttatttttggagacagggtctcactatgcagtcttgctgacctcaaattcaccatgtgtaccattctgtacgagcttaagcccctcgtactatgactaaagggggggggtacaccactatgtccagctaaacaatatattttctgcacttgggggcaatagcgtccaactatatcttatatgattccattaaaaatgttaaacgaggctcttgctatgatatcgaggttgttttgaaatcatgcttgggtggtgtgtttaaagcggaagcttatttacttaacatgactgtctgagagaccacttctcagtttatggctttagattgccattataccatccttttcaagcaaaggattttatttttatttgtgtctgtgtgtttatatgtgagtatgagtatgtagatgtatgtgtggtgcccacagaggccaggagtgggcatttaatccccagagggtagagttacaggtgcttgtgagttgcctggtgtgggtactgggaagtaaacctgggccctctggaagaacagtaagcatttttaagcactggctcatctaggcagcccctggtacagcagcatcgtgaagctctggtgcctgttgtgccagtcacttgtaggcattcgctgtagctcatctcgccacttttggtgactgtgtttctttgaaacggctactaatggatgttctcttactacagggtgattctgaagaggatatggaggagccttctcaagaacagaggtaaggaaagcagggcattgggggccggacatctgaagtctacatgtgtgtctctgtgtgtgcttaataccatctctaatgttcctttctctttgaccgctgtgtagtctacactctttaattgttaatctgatttggctttaaaatgatgcagaaagctgttggcagtactctctggtttactgcacagccttgcttttcccatggtggacttaggccttccctcttgttcagaaacatctgttgaggtcacactctgtgcacggtgctgaacataacacaccaagcttggcctgtattgccttgtgaggagggtggcagtctgtaataagtatgctgaattactagcctggtggtggtggtgcatacctttaatcccagcactagagagacagaggcaggaggatctcttgagtttgaggtcagtctggtccttggagctagttccaggactgccagggctacacagagaaaccctgtctcaatgtctaaaaaaagaaagctgaattaagttcttttccctgtcagtttattttgtttttaatttttatttatttatttagtttggtgtattgctggagatcaaaccatgggccttgtgcatgttacacactacctttttcttcttaatgagaaatagtatttttctttttcctacatttggaaacaggatcttctgtagcctgggcagtttagaacttgctctgtagctggccttgaacttcagaagtctctgcactcttggtgctgaggtgctgaggtgctggggtcagacatgcacaccatcacacacagttcagggcagtctctttctgtcagttttcttttttcaggtcacatttattctcttactggtgcatgagagagacagcatgtgcccatcaccatggtgtgtacggagagattagaggtcagcttgagagggtgggctctctcccaccaacgtgaggggcctggggactgaactctggttgtcgtgaataaaagtgatggttttacctgctgagccatttcacaagcccctttgtcagctttctatcaacttaaaggtattagatgacacaggtgtggctatgtcagtatgtgcatgcatacggtgtgtgtaggctgtagatttgcttataaagagtaaagcagagtgttagtaaaccagttccaccttgagtgcttatattttactccagcttttgttgtttctttttctcctctttccatgaatggcgtaatttattcgcattgacctattctagattacagagaggtcaaatccgttttctgtgtcatttatttcattaaaaaaaaaattatgtttgctgcctcctagcacttgggagccagaggcaagccagtctctgtgagttcaaggccagccagggctacctagaaagaggactctgtcttaaaacaaagcaaaaacaaaccagaaagaatggttgctacacaccttgcctggtggtgactttttcgagctataattcacgtaccatcctgtttactcatgttttagcctgttcccagttgtacaagcatcagagatttagaacttctctgtcccctcaaaacaccttccccttcagtgtctgccttgcgcctccgtagccaaggtttgctgttgcatccgcctgactgtacctcgtgctgctggtggccgtcagtctaggattttgctgttattttgtctctgctttgcttttagcatactttctgatttccttccttccttccttccttccttacttccttccttccttccttccttttttccttcctttttccttacttccttccttccttccttccttccttcnnnnnnnnnnnnnnnnnnnngaattgttcctggtgtgtgaagattataatacgacataggggggaatgctcctcgtagagggccttctttgtgtccatttctagaactgcagattctggagttgtaagaatgacctcagtgcagtgctatgtgatgggtaaattagtcaccgactcatgtatgaaccgctcgctcattgatgagctactgcaaagttgttattgttcagttgtgttttaaaacttcttcactccagtttcatatgttgtgactctaaaaataaatgtttgaattggacctggtagcatttgcctataacctgagcacttggaagatagaaacaggaggaccaggagttcaagggcatccttggctatattctcagtgtgaggccctccagaactacataggaccacatcttataaaaccaaagtcaaaccccaaatgcaccaagacttgctttagaatagatgaagatttatacaaaaggcacagagatacagagagaggacttgcataattgtcacgcaggatgccctgttggcactgctaaggttttctagtactctggtacatttatcgccttgaagccaacactggtctcttactctgaactttgtttggatgtcgttagtgtttcctttgcagggctgaggcatctgcagcctgcctgagttctcagtgggaattcagcgagtgtgctgcttaccacttacatcagtgtatggatgtttatgctgtgtgctaatcagcacactccaaggttcctcacctgctaagggccccctgcttttgagtctgaccttgggctcatgggctttgggttccgggatccctcgtgaagttttagttgccatgccttcttgggcatagttggttctcagtttgtcagagctgccgcttcagttctgatgaccttttgagggggttaggtagtttgtataatgtccttgaatttcagtttgtctgctgatttttctcatggctgagttccctaggatgtcaggaggaaggccacgaagacaagatgtcttgccaccctgtcacaacttgggaggggatgtggcagtgccactttctgctttgattccgggttggtcttgctgtctgtcagggttccctgctgtgagttctcctcaccacctcttctcattccacattccatgaggcaaatttactgcatagaattctggtacaccattgtaagtcatttggaattctttctgtgtagatttgcctcttcttgtttatgtatcttgtacttcatgtgagtattcatgctctggggtacagcccagcactagggttcccttctgctttcatgccattattgttaatcttattatgaagtcattagaatctctttatgcctttcaatagccttttaaaaaaaataatttaatgagctgcaccacaataccaacttttaatgatagatggacttgaagccaattaagctgtctttatcagttcaacaaaagcatgtgtttctgccttgatgttctagagcagctactactataacaacttgagactagagaaataatcttgactgtgaaacagtctgctttatgggaaagcatggttggtactgccctggagcactagagatgcaccgccaaggctgcttgaggtgaggcctgaccaggacatggctgttcagggtcgtgaggcctccagagcagcttgcctcttacctcactctccagtcgaggaagctgtcagtgtaattggccttggtgacaattttgtttgtgttatcttgacttcatcttctgtggaagctctgtaattgtatttggttgggagccaggaatgcactatttgaaaactctctaccttctctcctccccagccctcctcctcccctgggtgttctcagatagcagcagcaatctactttgccaagaaagaaagattgctttgggagattcgtgatgagagcgagtgaaccagagcgggtctagcccttgcttgagtgaaggcgcgctgggaagctggcctggctccctggtacacatctctttgatgagcttttttggagcacagtagtatttgataggatctgaaaagttttaagaattgctgaagaatgaataaagttgttattttacctttaaaaagaattatagagggttggcaagatggctcagtggttaagagcgccgactgctctttcgaaggtctggagttcaaatcccagcaaccacatggtggcttacaaccatccgtaatgagatctgacaccctcttctggtgtgtctgaaaacagctacagcgtactcatacacataaataaataaataaataaataaataaatattaaagaaaagaattatagaaatcacaaacactgcctggctagggacagtgtatgtggaagggtctttgttggtgataatttgtaccatgctgagcatagaaccccagcctgggctctactactgagttctagaccgagtcccttttgatttttaggatgtatttttatcggcctaggaacagcagcgaacatgttgctgaagcatcttaaagccagtcagttaacggcagctcctgggagctggaaaaccacaagacactggtgacctttcagcagctgagggtccagttgttggcagaagccactggatcttgagggaagtttccattgagtctacaggggatccctcggctccaggcctgctgggaagggagctgcttttcactactctctgcttgccttcagaaagcggaaaacaaagttcatcttttgatagggtcttacttggcgcctggggcccattgagggcattcctgtcatcctgctttgacagcttaagtgacctttcctgtccttttgcagttcttctctcttgctccctgcaccttgtcactaaggtgcaccccagccacttaacctttattttgctgtgatatatacgtatatatacgtgtgtgtgtgcatgtatatgtatatatggaaaacagattgcaccttctgcttagaggtctcagtgtgcaccgatacctttctgttatcttagctgctttaaagctaagatgccctgaactgagctcctgggcccttttttgggctcttccttcagcttcaagctctgggtgaaaagagcatgcacactggtctaatactattgttagcatgctctatacagcaaggtacagggggagggagagaggggggacgggcgggtccctttgccctttcataccctctcaggatcagcagccttggatgtggggcgcagcttcagagccttctgcccctcttcagccaggtcttcatgttcgcatcccagtgatgtgtcgagtccttcctcttgagatcagcctgttttggggccacattactgactctcaagcatggcacaggcacagaaggtcacttgtggttcagggtctttccccacattctcattctctccagccacatggcggtgtgtcctctctgtctcgtcctcccatcctccctttactctggctacgtgcctgaacggtgctgcgtatagcactctgacattagtgttaacacagggtgctggctccttgtggaaactgccttttgtggtacccaagggccaacctaatactccttctgttgattgctcagttccagactcagtaacttgaaaagctgctagattctatactacaagagcatgcttttgaacatcagtcttttaactcaagtactgtgtttaacgtgttctccatatccaagactaagtcagtcattgctggcaaagctacagctttagtacccgtgttagtggttgtggcttcacagtgagctactgcagttgtcaatggttcagggagctgtccatcaggtctctgtcagtgtaaaggtcctcggtgccttacacgaggctggggcacagagaatgctgcaaagtgaattctgacatggtcttcatggctttaacatgagggttttctttgtaatcagtcttatagttcatgttttcttaatatacaatataggcttaacacgcttcgtggtatatattagaactgttctctaaccacaaaacctttaaaaatatttttaaaattcatgttgtgaaatttttagcgaagttttactcatttatatagttattatctttaattgaaattaaaaatcatatcaactggaattaacctttcacttgctgtttctagctatttaaatacatctttctacagactgttgcagtggctagttctgtgtttatttgtgagtttatactgagtagttgaaccttcagtagtgccatatctcataattttttaatccttcaagaattgtcaagtgttattctgtaataaaaatagacaagccccttcattagtgtcagtggcccctgaaggagcagcagaagagtttggcattgtatgaaggtggtgagtggtcagtcgggtcccgtgggagccatgctgccctgcctccaggtgggctacctttaaagcagtgatttagctcagaactaaaaggctccgcttgcgcctctgaggctggctggttatttattgctacaggatgtagctagcgttcagttgcagaatctcttcatggggcccagttagtagaagagtcttctgcaacgagagccaggcagaggcgcagcccaggcagacaaacccttgggacggaagcctacataggaaagctctgagaagagaactgaggcaagagctaaggggcagccgtgagggaggcagacaagggttatgggtaagccgtggaaacccagatctcaatgtctctggaaacaccagagctctacagagggctgaactgatggacgctttggaggtgggaggttgctgttaggcggtgggtactgtgatttgaactgctccacatggtgtaccagcgggccccactgacatcacagctgcagctctgattaattctgcaaaggtgttcgatgcttcttgttgcttaagatagtagcacagcctgggattttcatacttaaaatgatttcccaaggcagtattctctgtctgggaacaccaacattaagataatggggtctcctgggagctcgttactcttttaaatgagttgatatcaaattattagtttgctgttaagggttttgcacatgcgaaatctgagagcaatagtgtctggccactccacccccaacacacgccataggaaaaaaatgtcacaaataattgctttggtctagacggtatttcacagatgctggagttaagaactctgactgttcctccagaggacctgggtttgattcccagcccccatatggtggcttatgagcatcttcaagtccagttccagtggaccccaggccggggtaccaggcacacactcgtgtacagacatgcaaacaaaacacccgtactcataggactaagaagaaattgttgggaattaccagctatttaaagattattcctgttctccagaaggcagccttatgtgctttggtgttctcttgtctaaggtaaaccttcttcagatagagaaacaggtccagagagctttcctacttttcacctctctcaactctgttttgttcagagagagtgactttgagtgacgtgcctctgccagaccattctcctacaggcagcaggtctgccctgtgagatgctctgagatacccagcactgcatttgcagggtgttcgtgaagtgtggccatcatgtgtggttctaggccgaccacatgcagtatgcatagaagataactcatgtcattcctcccacactatctactcagttgtgaatgctacctgcattgccatctaagcagctgtccagggatagctaagacagatgtgtgcagtaggaatgttgatgaagtcttctgggctgatgattaatcttcaagaaagaaaacaaaacaaaaggctaaaaactaaaactaagtccagttaatccattaaaatcggatttaagtaattgccgtggtactgtactgtgtggtttacagattattctcaaatggattatccgtagataggcaggtgaatatgtggtaatattcttctaattttgtagatgagaaaagttgttcctaatcctaaaataaggtaagtgtggtgtctgtgggagcagagagcagacacgatgcacaaatgtcacacaagagtcctctctgtgtacacttcaattctttagatagttcttagaaaaacccctggaaaatacgagcctggctcttcagattatctcagagttggatcttttaatattcggttggttctgaactttaattttatacttttgctcaattttaatcctccatgaatgttctgctgtgtccttgaaataatctggaaaatttaaacatggcttagtagtacacgaggactttgcaaaccgccgtggtgtgagagagaagatgagttgtctgttggcttgctttttagccttgtgattattttcgacagtaaggaacagaaaaccctgactcagccagctctaacaatgaagaaagcattttgtcacctaaccagcagccaggggcagggtggctccggtgatgttcactcagcgggtttctttctacctgcttgttttgctgtgctcagtgggctcccatctgcaggcctcgtacagaagggcgggttaaaacagcccctgtctggtgcctctttctcagtagcatccccaggcagcccttgcatctccaggtcacgcttactggcctagagagtggggaagcggaatgattaacctcaaagcagggtttagtcacaagggggttgtggtcactaccacaatctgggctctgcccaagtgagagcaggggctggacagtgagaagccagtagcatcacagccttacaagggagggaccggggccaagtgtggagcgaaccacccaaggcagtgcttcttgagggtagaccttcctgcagactcagctttacctgggaacttgtcagccagctgagttctcagaccccacccagctctactgagtcagaagctccaggggagaggcccagctgtctgtgctgaggagccctctgggtgagtctgatgcaggctccagcttgaagagtgttggtccagggtgagacatctaagagatcgcatttcaaaattacttttgttgatgattaaataatgagaagcagaggtgatctcgtagggtcaaacagtaggtagaaattgggagatagaggttgttactcgggcttgcctgtcatcactggctcagggtttagcagaccaagcatgccttcatattctcttcatatggcatccagttgtgccagtgtgagcctggtgttcagcatgccttggcatactggtgaacaagtgggttaggctctggcatgctagcttccagctgagaactgagaacctttctcaagcagtctgtttgttataaaggaaggctatctggcagaaaacattggcctgataacagaaaaaggctcagttattgagtgggggtggctcctcaaaatcgagggcaatgtgtatgccccaggctgtctgctatgacatgtggcatagttcgggctgcgtgtacgaaagaagcaatgcggtagggagaatgttggggtgtattaggtaaatgttggaggtgttctaagaactctaagaaactggggtgggtcaaatcaatacaggaaccattcacactaaagaggacttctgtattcccccatctgtgtctcccgcctcccccagccccacccagtgactcagagtgtcaggaacttggatggtactggggcaggctggggcccagaggaggcagctgggagccatagagaagcaataacatttagacaaaggcttatcatgtgtagttatatgggagaggggactccccaactaagccatatagactgggaattccctgaggttcctctgtgctactgcagggatatttgccagatgagggggccgaatagagtagggtaggaagaaagggaactgagttcaagtgtgccgtgttaattttctaggactgatgtcaggaaaccacaaactggtgcttagaacagtagaaatgtatgctgtccaggtctggcgatcagaggcttggtgcgggtgctgacagggtgctgctgctccttctgagacatgcaggggtccttcttggcatcagctggctggcagctgttggtgttctctggcttgcagctacattgctatgctctctgcctgtatcccttcatgtctgttgttttggcaggatgaccacacagtttaactcgtagccagggataacttataagactttgtgagtatctgcttgccttgccttctgttcccctccctctctccctcaccccaagccctcccatactccggagctcacaggaaataattgtttggtcctggcttgtgctcagtcacaggcaggttgtacagttccacttaagctgggcaggcactcctgagcattttctaggcaaaaagtgaattctttctgaattcttcctttgggtatctgttgaagcttatgcaaagaaaatgacaacagattgtgagcgctgaacaactctgtgtgtgtgtgtgtgtgtgtgtgtgtgtgtgtgtgtggtgttaactgtgagaaattaagagggcattatcagcccacacctcggcatacacaacccacagccttttctgtggtctcatctttcagaattctaattaaagaagcatagtttgagttcaggggttagctgacttgctctttacctacctagaggccaggtagatcctgtgggcctttgcttgtttggcagagggtccttttgttgtttcctggaaaaggttgaatcctagaggtgagtctccactttcatgaattttaatgacaattaccaagggtgttactgtgctgtctccgggaggaatagctgctattgagagttttaagttcttcgtatggaagtctgttttcaggtggacaaatgccacatccaaattgcctgttagttggactttcatgtaacttaattagcagctttgtgtttggggagaagctgatctctgatcctgaaattggttccgggtggggtagcataattcctgggtaattaagtgccttcacagcacctactctagtcattagaggtctgcaagattggaggcagaactgtgagagatggagaaagtgctttttctcttgtccttaatcttttaatccatttaacctgggttgtaaaacaaggcttattttaattagaaagtatatttaggggcttggaagaggtttcattaattcaccacatttgggttctagttggtggggagcctagccctaattgcttactttgcacagttgaaggcatcctaggtattgaggcttagggcccaagttcttaccaggttaaccaagttcttagagtctcattgcaaaccaaaattctaggttaagaaatgagcctaaagcccaggcagaagcatggcaaagtgagttgtatttagttcggggatgtgacctgggtcttgcctttgcagatttaagagctatgatgccagcttgtggattagggctcctggcggatgggttgggtgtcagtagattggactccagagtttaaggcctgcctcacttaaatactatttacatttcctttttatttcctctggaaaagactcagcatccaggactgccaatagaagcgaaggggaaaagtgtgggaggcaggctagggaactcactggtagagaggagaacaggaggttgggacttggnnnnnnnnnnnnnnnnnnnnnnnnnnnnnnnnnnnnnnnnnnnnnnnnnnnnnnnnnnnnnnnnnnnnnnnnnnnnnnnnnnnnnnnnnnnnnnnnngatgctgaccacgtaggtggggatccccatgttagtccagtgaaattcccactctctcatgatgttgttttcttggtgatttgtctctctgtgggccttctaattattcatgtggtcagtaagaataacttgtattcatgtaagcatgctcatgggcagcttggagcgtgctgtcatcttagccatttgattctggtttgtgtagattgtgcatttatttttatcaccgttgtgtcatgaaagccctctgcacacttgacatagtctctccagtgatttccagagctacccttgtagagtgtggttttacttgaaatatcattgttttggtgccgaggattggactttgtgtgtactaatgcactggtgtgctacagagccacagctccagccctggccgttactacgcttttcgtaacttttctttgagttgtagtagatagacttttagaacaagaaagttgcttaggctttgttacttttctagcctgctttggtgatttttataaagagataaaataataataataataatagtaatataagcactgagcattgcatcttaggcgctgtgcagaacagcacataagtactggcaggcctttttcttgtagttcttttggcgccggttaccatgggatagctgttgcagcacatcagcagatatgccgtcctttgaaaacaggagctcatcctgctggattaggaaacgttagcatacttcctactgggaggagagggtcccagctcagacatccgtcccctttgtggggggtttctggtcaagtgtcctcctagagtcactagcttctaatccatacttaagcaaaggcctcctgggccaaactgggctgactctgctctttccccataatttgaaatgctatttattttttattttgtattttttgagaaaaagaaaaaaacagcgctcagactggtattgaactcactgtgtaattaagggtgatagagaacttttgatcttcctgtatctctctgaggtgctggggttataggcatggactaaccatgcccagtatgtgtgcaatttttaccataacaagaagcacatattccttttgtaactcaccaaacattcttaaattaatgtattaaaaaaattgcccctgcatctcgggtcttgtgtttctcctcacttgatgctcatagtctcaggaagcagatagctcagtgggtagaaataaatgcttgccatgaatattatttttgttgctgtaatgaaatactatgaacaacagccactcacagaaaggagtttgttttgccttaggcttccagagggagcgtccctaatggtaggaacttcagtgcttccctcagaggcagaggcttagggcggagactaccgtgcagagaggagaccatcagactgtcgctcaccaaggcgtcgttagtgtccgcaggtgcctgggacaggaagtggggtggtgctataaaccatcaagcccacccccagtgacttccctgtccagcagcactgtgcctctctagacagcaccaccacccgctggagatggaaggttccgatacgtgagcctgtggggaatgttccacatgcaggctcttcaggtctgaccacatgacccctgaaactgctgcagaaagttgtcctgacctctgcatgtacactgtgccatgccaccctgaccagcgtgctaatgatgatagatgaaatgacataagaaaatgctcagctggaaaatgcggataatgaggtgaagattctggctagaagactaacatcagaccccgtttctggttgtttgtctaaatattaccttacttcatttgttcaaccttccaggagatgagactgcctgagccccatttcgtgctgcttgctgagagcctcagatatgaaataatcgttctcctctgagaattcttctcacagatgcaaaaggcttagggctgaggactcaaggacagtaaggaagccatcaaactgtctttcacatgtgcagtcatgagtgtcagagcaatggtgtgaacattgcttcttcctcttcctgcctcctcctccagcctaagatgagggaacagaggtctgggttctgtcacctaagatgagagagcagaggtctaggtgctgtcacctaagatgagggacagaggtttaggcactgtcacctaagatgagagagcagaggtctaggtgctgtcacctaagatgagggacagatgtctaggcactgtcacctaagatgagagagcagaggtctaggtgctgtcacctaagatgagggacagaggtctaggtactgtcacctaagatgagagagctgaggtctaggtgctgtcacctaagatgagagagctgaggtctaggtgctgtcacctaagatgagggacagaggtctaggcactgtcacctaagatgagggacagaggtctaggtgctgtcacctaagatgagggacagaggtctaggtactgtcacctaagatgagagagctgaggtctaggtgctgtcacctaagatgagagagctgaggtctaggtgctgtcacctaagatgagggacagaggtctaggcactgtcacctaagatgagagagcagaggtctaggcgctgtcacctaagatgagggacagaggtctaggtactgtcacctaagatgagagagctgaggtctaggtgctgtcacctaagatgagagagctgaggtctaggtactgtcacctaagatgagggacagaggtctaagtactgtcacctaagacgagggaatagaggtctaggcactgtcatagatttgcatgtatcacagcattgctaataacataaactgggaaaatgcagtgttaaggtgcagacactattataaaagaacagggggagggtttttttttgttgtgtttttgttttttatttaaagtacaacttagctctaggaagcaaattaaaatgtctgtgatgatgctggtggcttatatttagtttggaggtgctgcactatgattaaatgcattaaaatgcccctccccccctgttcatcttcaatttaaacatagaaatttgggtcttgagatgattccgtaggtaaaggcgtttgctctcaagcctcaccagctgaattgcttcccaggtcccacagggtaaaaggagagaaccaacccctgccagttgtcctctggctttcatgcacactgccttctgtcttgtctgccaccccagcccctgtgcatgcgtgcgtgtatctctctctctctctctctctctctctctctctctcatgcgtgcannnnnnnnnnnnnnnnnnnnctctctctctcacacacacacacacacacacacgcacacacacagaggcagtaaatgtaacagtttaaaagtagtttattaaaaatttgaatttcagccggacagtggtggtgcatgcctttaatcccagcacttgggaggcagaggcaggcggatctctgagttcgaggccagcctggtctacaaagtgagttccaggacagccagggctacacagagaaacctgtcttgaacccgccctccccaaaatattgaatttcaaataatgaatatactttctgtttttgactgctgttatttgtaattagacgtgcagagagtactttgaatcctcaggttaaagatatctccaggtggtgctttaaatacctcaaatctgtcaaacaaggcttcaagaaaacagccattagaaggcagcatggggaagggagtctctcagtagaagggtgttggctagcatctctgaacccctggctttggtctcccacactgcagaaagaaaacaacaaaaagcaagtccaatggaaaggatacagtggaaatgatacactagtttcacagttgctagaaaggccctgaacatattgctcaaatcagtaagttataaaccttctctgcactcaaagagggaatatggttttgagagaacccaggactttggctactataaagtaaggtgcagctgtgagtggagtttctgtctagttcttttgacctacaccgtttctggctttgtcgtctttggctctggtgatgaggtggaagtgggaagtggctggtgagttgggaagtagcaaatcactggctgggctaaagtgacagctgacaggcaaggagaaatagggagcagaaatgagaactgagccagggccagggttcctttcccaggagctctgtggctgtgggctggcctgtgtgcaggtgggtatacagtgactaactggggcaggacattgttttcctacctgaggcagggttgcagtgcagtgactaaggtttacatgtactctaggctacccggccttgactctgacatcggcttatcagctggtgacaatctgctaaggctttctgtgcctttgtttccctttctctaaaacaagagtactatactgtttctgtggagtctataaaactgttcctgtaggagttgtgattggcagtaaatatcaatgtgtgtactctagagagagcccacttgtgagaacttcctgaagtagagtaagcttatccgccatctccttaatatacagccaaagattagcaagtgtccaatagtgcacctgtatggacagtagcatactcacatactcaaacagtaagcatgctcattatattgaattccgttcaggaaaaaaatatctatgcagttaggcaggatgacttcattctgaaatgttcagtattcgcctttagtaatgagttattttcattattccactttttatttttgttcactgtgctctacagtgatatatatttaaatttcttcttgtgtttctacatgtttgtagatacatacatgctatggcatgcttgtgaaggtctgaggacaacttataggtgtttgtccctcttcccaccatgtgcatcagcaggctcggtgggaagagcctgtacccactgagcagttgcaatcctctgccccccaagatgccttgacttagggaaatgcatgatgacaggaactggctttaacctctgtaaagtcccctttgtcctgatctgtgacccagtgaaagtccctgtgctgggctgtcctttcccagctgtggtcttggtgaaggctaccttgcctcaagaatgggaagttttcttctagtaaaagagtgattgtggggctttggggaagagaaatgccagaaagttacttagtgctgggcatttgagactatccaggaggagtccagcagctgacagtggctagcatggctggggacatatgcttgaagtccaggatgcagtgaaccaccaccagactgttttgtcaggtgtctcttcttcagtctgaagaggtctgaggggtctgggaggaacagtgactgacagcagaagcatggagctatttgggggcgggggtttaacaaagatgtggctgtgtccccactctgggagtgcatatcagccctggacagcaaagaaattggaagataattcttagagtgccagcaaaactgcagcgtgccaagctagccccacttcagagtgcaacggaatcagaaggtttattaactagattagggtagatttagtgggtaagaattctttagaaagggctcatattatacttgctcacaagtgttacctgagaaacttgtcctaaactagcatggaaaaacaagtccaaacatttttaaccgttgagtactttatttaagctaaattgtatctagaagctaagcatgtaacaggtaaatgagggctgctctgttactgaggcaggatacttgtcttgagtaattaccttctgtctgtattgctcagtgattggttagcgcatcacccctcctcagccacacagatggagcctgtacgtgagcctcctctgtacaggtcaccaagaaatcctgttgaacctggtccctgtggtttgttagtcagtagtggtggcgcacacctttaatcccagcactcaccccagcactcaggggcaggcggacttcccagttcaaggccaacctggtaagttccaggacaaccagggctatacagagaaaccctgtctcgaaaaacaaaacaaaacaacaacaacaaaagaactctttgaaaggattaccttggagtagggctctggggaggcttcgcttgcctatgacagagcagtgagagccgcattgggtaggcagggtgtgtggatgtgagtctgctcttgaaactgtctgtctaccatggagatcctctttctgctgtgttctaggttaggcctcctatggcctcaggtcacaaacagcaataccatctgtgtttgaggcacctctcctaacctgagagaaatctctcagaaacctgtgactctagaccagtttgaaatgctttgtccatagaaccatttgtggagagagggtaactgatcaagttaggctgtatgcttgctgttcatctttacaaaggtacttttgcagtcgacattttaggcaaggcattttcctcactggagtttgaatctggtagattgtgtgtgttggtgtggctttatcgtgttctgggaggagaagctgtccggaacccacagccaggttagagcagggtggatgcttcagcccctgctccctgtgtctgtgctcttccctgctcgacattattttgtccgcttctgtaaccgtagttcaggatggagaaagagtaaatgttattcacttttaaaatcaatgaacatttaaataataaggcagagaggcttgtacattgaacttccaaataagtttatgtccctaggttcagctcttctgggtgtccttaaaccattaaagcagagctattgtatgagcagtttgaccttctggatcggtgaggttctcagcacagcgcccttcctgtgcctgtccgctgtctgtctgtggaggtgtgtgggcagagacagagtggaatgaactgctgctcttgggcagtctgggtttccaaggttctagaacacaggataccccgtcctgtacacagaggatgcagggaaggaagtgctgagcacacgtgcccccggcttgtattctctagtgtgcacagtgatggtgagctccggtgttcctcggggccggggtgttctcaggctgagcgaagctggattgactttccctctgtcttcagtcttttccaccttcgtaggcttggaaaccaggccttagggacagaaaccagaagctcatgcatccttcgtaaaagaaggtctacctcatccagacttttcgggagcatatcaacttaaaggacctcaaatggagacaagcctcactcacgatcctgcacagtggaagaggtgcgcatttgcagtctgtgagcctgggccccagcagaggcagcaggtgctccacagcagagagctagtgttaaatctggttctgttgggtttctcctgagtggagtctgacgtgcagaaactggacagcctctcattttccaaaaccttggtctggctgatcctgacccaccactcgcttttctctcttcttatactagaattctgtggtgggctagctccgaacccactgttctaggacttaaaatctgtgccgtccgagtgtcttgtgagcactgttgcaggcagtgagctccttgcacgcagtgttgcttacactgctgttggcatctgaaactcacagcctgggggattttgatactccccagcatctgtgcttgtagctactgacctgcagaagcaccatatgcggctatagcaaggctttggcacatcctctgcaatgcgttgatcttgtccgtactctgccagtgaagacataagtcagcctcagcaggaccgctttctatgatgggaaagtcagcgccactatgctggtttgaatgagaaatgtcccccatagactctgggacttaaatactactctccagttggtggcactgtttggggaggctgaagaggtgtggccttgctggaggaaatatgtctgaccctggaggcaggctttgagactcaaccgtttccagtttgctgtgttcttcatgcttgcagttccagatctaagccctcagcttctacctccttgccttggctccggcctcttgggttctgaccctgagcagccttaagcccagatcgacgtgccttggccatggtgttgtagtgaaaccttactggccttccctgattgagcctgtcatgtcaaggatgccctgagtcaggcctcacacttgttttgggctttgtccccttgctgcagtctcccacaaagggcagcttgtgctctgccagagggctgccatgctgtgctgatttaacggtactaacagtgacccaagctcttgtattggttagttttattgtatttttaacttttccacagagaaactttcctccctttttcctcttttcccctaatgtttgtttagtaaaaatagttttgttttgttttatttcagttgaaattttgccagaagtgttagagcggcagaactgtggtctaaatggtgccacgtgtagagaaagcattttcttttttttcttcagttttttggctgggtgttgtttattacaatgaaacctgagacttcattggttcctccagctgccttttccttgtatttctttaaattaaaatttaaattacatttatttatatattttgctcgaatgtgtaaggatgtgtgtgtaactatgcctgggagcctctgtggaggtcagaggacagcttgcaggggtcaagtctcttcttcaccatgtgggttactaggactagacttgggtcagtccctcaggcctggcgccaagcacctttatcagatgggccatcttccctgcttcatgttgggttttatggccaaagtaaaaataccaagcggatatactaaccataggctttcttttatttttctttccattttccccccttttaacagagtaagttctctttcataatatattattaggtgattgactgcattaaaaaaaataagtatttgcaccaagtatggtggcgtacaagttaatcccagaactttacagcagagacagagacaggcaaatctctgtgagatctaggctagcctggtttacatagtgagttccaagacagtcaaagctacagaggagaccctgtctcaaaaaaaaaaattgtgttttggtctttttcaagttttatgttcttagcttagaattatcttagcttgttgagaccaaagggaaatacactgtgcacgcatgcacgcgtgcgcgtgcacacacacacacacacacacacacacacacacacacacacacacaatccacccagtttttgtttgttttctctcagggaaaaattgctatagaatgaccagcgacttagtttcctttccccaaatcccagttaatgacaggatggacactgaaagagaggacaccctcagtgaggaaacacatgggaaagaactgctgatggagacttctcagataactctgggcaatagaaatggacgcagagggttagaggcccagccgtgggggagagcagcttcctgtcattcataaggaccaggctttctcctgttgtgccccaccctaagccccccaaaatatctgggtggatccagatgcagatgaaggaagcagagagaaggctgcagcacttgcgtgtcagtcagctcagggtactctggatatctgccatcatatggtgaccaggcaaggatgaagaggagttctcaaagtgggtctttgtttgttaccaataaagatgcatcccaggacatcaaagataggattgactatcttcagagctgagagactcacagtgtccacctcacgggggtttgctacttttaaagtgaaaactgtacataaatcccacattgtatcttctgacccacagcaagggctagcagtgtgtgtgtgtgtgtgtgtatgtacatgcatgtgtaagcatgtatgtgtgcctatatgtgcatgcatgtgtatgtatgtgagtgtgtacatgctcatatgtgtgtttgcatacatgtgtgtgcgcctatatgtgcatgcatgtgtatgtatgtgagtgtgtgcacgcacatatgtgtgtgtgcatgcatgtgtgtatgtgcctgtgtatttgctactggtattacaagtgctgcctttgctgtcactgttgctgctatggtgttgaggaagtgtgtcactgaggtttagggtcagcttcatgagacagaaagcacagtggcacacacactggagacgtttaccagtggactgcttactctgacagcagcagacaggcagcactcctgtgcttagcaagtctgcagctgattctgtcttgcagtctgaactagaatttagcccacgacttatgctcatgtgtcggtgagaggaaaagggctggagtaggatttaccccatacctttctccagagagtagccccaatgagtatgggtagggagagagagtcagaggcagggggtatccatatgaatgtgtgcacacatgcgtgctttccctaacagtcaacaggttgtgtctcacctccactgcaggctagaagaggggcttcctgtttgctatctgtctagttacaagtctcttcctaacactgggcatagtggctcatacctgtaatcctagtgctcaagaggctgtggcaggaggattgctgcaagtttgaggccagcctgggcagcactcagaaggctgaggcaggcaaaccttgagtttgaaggtcagcctgggtacatagtaagttccaggatagcctggactactgaggagtgaccccctctctgtctcaaaaaacaaaagcaagcaggcatctctttgtgatgtgaaaggaaaagcaacagggtgggcaggcacccctttactgtagtgagcctgtttatctactggcgttctctttgtcatagggagccttttctcacacacacgcctgagctacacttccagaatgctaactcattaggtctaacaccaaggaccactgacttagtacttatattttcgttgacaaaggaatttttatgtgttaaatttagcattaaatcaccaaagtttttaatgcagcttaatgtacatttaaaagggttttgttgaaaaaaattgagcttagtattactttcaaagagacttgtagaaaagggaaaaactagaagtgactaagtgtgccttggaaggttggtgttagtcacagcatctgctatgggggtaattggatggctctggcaggtccaccaacttctggctttgttgtttgaagcctatctacctcagagtcctgagaatctgactgtcacctctggaaagcccacatctttggtttttataccattccctttgtttaaggggataacagatgatcccggactccatttctagacgtgggcttcctaggaagcaatgcttcattttgctgggtggttatttttccccccttgattcctgtttttcttgatcatatttatttttgttgacccaaatacttgagatctattgttagatgcaaactggagacatggaggctaatcttaatatatagtatgcaggaaaacggacaaacagcatttcggcttctcacacgtagctggcagagcctttgctcttttaggaaattctgtaagaacctagcactgagcagacgcacacctgacagcccctcattgctggaacggcttgctcaattcacatttactcgtcttcagaatggaaggaaagtttctcatgtcagagatttggtttttctttcctctctctgggtcacaaccactttaaaactgcctacagaccaggacaagatcagcagtgtttgtgtgaagcaggctgaaggtaagctgcatctagtaaacaaggggagatggctcagtacattaagcccttgccagggaagtcagaggatgagttcagatctccagagccccacccgaaagctgcgtgggtggggtgtggcggctgcccagggtcccagcagacagggaatacctttgcaaggagccagctagactagctggtcttagtgagtgtgagttaagactgtgccttaggaattaacgtgcttagtgacagagaaagacaccggaggacaccttggggcctgcgcatcgtccacacacatgtgcccacacacatgagtatacatactcacacggagcttatcacacacataaaatgaaaataatcaaaatgaataggttgtctataagttactagtagttgcagtgactagtattacagcaccatagctttggaaaaccattgaatggaaatacagttggagggaagtgtcagcggttgggaagaagcaggagatatagggtaaattaatgctttcattctgttttgtgcctggacctagttaagaagacgcaggatgagccctgcaacctactagagactgattcagggcacgtggtttccctcctcgcctgcttcacttcaagcagaacaggccaatgtctttcttggtagccttattgcaagaacatactaccactctggttgtgagtttgctttgaaaattactaaagatcagggaagataggattctgtttcatcaaaatcatagctgagacaatttaaaactcactattttgatttctccagcatagagtgaaacctttgcttttaatcataataagacactaaatgacttttttctcagcaaaagaaatatcagcctatttgaatggtagttattttgctctttggttaggcagagtttaatttaaatttttctaataaatgattttccctccatttatctttagagccagcaaattattgtacttaccttaagtaggctttgagacttgtttcaccaagagcctttttcacctctcatgaagtgtagactacacgaggggcagaatcctggccttttttacagaagctcatttgcagtagacaacaacatgctgttgtcaagggtgggtgcctgcacatgaaatccaactcgcttttccagagtaagcagccttcaagagcctatctctatgtagagtcctattctgagatagtgggccttaggacttagatatgccttttacacagactgaaggggaaagaaaattgtggttctgtttgcattcttattttctgtataggtacattctggatcattgggacattaattgtgtaagacagactaaaattttattctccgtctaaactgtcttgtgaagaaaaattagcagaattcagtaaacaggaggtatcatgatgtctgcatggaaagtagtactcatttactgcagagcaggccttgaacagagctggggacctgttggaaaaatggaaagcacccgggcttattgggcaaagactgctgaggcagagcagagggccaagcatggctaggctggcctacagtttcatagcttgacttctttcctgtgaaattaaaacctttccatgtagtcaaaaaaagttcagaaagtgtgctttaagtagaagacagagaagaacagtttgcatcttggcccacctgaaggagagaaagggaagagtggtgtggccataatgccaagcaaatgtcctgagagttttggaagaacccaccagcatcttgggaagattatcacctctaagatacagttctataaaatataacatttcctagatgaaaaaaaattccttctcaaagactcctgtaaaataattgagttctttttaagggcaggagaattggatcatcacttttctcaaaatgccatacagaacagcgaattggtgcaccaaggatttctgttcagccagtgtctttctgttatcaggaccaagaaacagtctgtgcaaatgtagatattcagtgtctttgaggcctcgtggagaagtgtgtgagagggtgggtgtggtgccttccatcgctagagcacatccgagagctctgacaagagcttgtagtcctggaggagttagggtgacagggtagcatagtgtgcgctttactagaagggaatggataaactgatttaactcattgacgacaggttttaactcatccgttacttggtgcttctcagagcctccgcttgagtgtgcttgctgtacctgggatgttttctgcatcacaaatcttgactttctgaaagaaaatacaaaacaaggataagtgataaaagcatagggcagtcaagccaggacaccgagactcttggtgagaagatgcaggctctgacttctgtcctgccggttattctgggatgctggcgtgtagtgagaagccctgtgtatgcatccccattcaatgctttgtaatgatacaccacatcacccactgctaagattcccagaacacattattaatgctgtttcctcaaggtttgcttggattgtgatgtgaatatgttttgctgctcttttttaaagtggtttttaaaaggtggtgtgtttttatctgtaacatacgatgcaatctctgatgctttttgttaaaatatcctgggcttgggtttagtttaatggtagagtacttccttgtggctttaacccccagttcagaggtagaggagagaagagaaaggagagaagagagaaagagaggagaagaggaagaggaagaagaagaggagagtagggaggggaggggaagagggagaggagaggagaggaggagagggagaaaaagagaagtaaaaacagttaatttagccggacagtagtggcgcacgcctttaatcccagcacttgggaggcagaggcaggtggatttctgagttcgaggccagcctggtctacagagtgagttccaggacagccggcactatacagagaaaccttgtcttgaaaaaacaaaaaagaaaagggggaaaaaacaaaacagttaccttaggtaaacttataaatatcaccctttcacaatagaaagtaatttttatgcttgggtattaatcagttagtggttccaaacctggcccactcctcagaatttcctaggaagcttttgaagaattccagatagagccagccccaccctgtagtaatttaatatatgggctgtcgcagttggaaacacactgttttgcagtaacttttgtagtagaaagccagctgctttctgtgcccttattttgatcttgctaactggaatatgatctgttaggaaggggaatgcagtgtggattttgtagaaggctcagttttcattttaaagctcatcttacaaaatgagctggcatgaaaacattttcagttgcttactcattcattcatgtggtgctggtaatggagcccagggcttccatgctaagcactcgagctgctgctgtacaagacacatgtgagacaacctactgtatgtcagagttggattatttaaaaggggcttttttcttctctgtcatttctacttgcctttgaactcaaggtttgtcacccattctggtgacttagagctgtggccttcaagctagaggatgatctttgaggtctcttcatgggcacccaggcatccatcatttaagggaagccatggcagacacctagaccttgtggattcttagctcacacttgaccttgctgagatttatgtgtatggcctagaggacagctgattgctccccatctcctcctcaagatgaccttctttaaagggagtgtgcctctagtttgctactgatggccagggcacaagcagagggatctttgcaatagtctgtagctgccaagaaactgagtggctcttagtgtctggagaaaggggaacttttgcaaatatgttttttgggttttttgtttatttgttttcaaaaacactgaaaatgacttagttgaatgaccatctgatttttaaacaccagtggatggaagcatttcacttgaggaaaatatccactccccttttcatctgccgagactcacatctgtaagagctaagcagcacagtagaggtctgattccagcatcccgccagccattcctcgggttccaccgaggaggaccagactagaaagccccatctgtttaccacagtgcgcattcccagcaacatctcgaccgattttgatggtaatgtgttaaaatttcatacatttgcagatctttattgcagagaagataggtagggtagacttttagcatagacgtcaaggaggaccgtgaggaaagtagttgggaagatgaagtgaaggagggcaaggtcccgttcccaactccaactgagatctttatttctctgaatagatgctgtgtggaaaatggatgtggcagtcccaccagagtgggccaacagtttgacttaaaattcagaacttacagtacagcaggaagtatatgctttgcaacaataaagaaaaggacaggcgaggtttagaatgataacttaggaatatatgaaggagcgtgtgggtccctcttccccattgtttttggtgttacatagacaagattgtgaggaaccttggtaaaggctgtcttgagggcaggagaggaagaagatggtgagcctgtgcttgtgtgttttccttagttaaaaggtgatcagactgacattttaaagctctaacagttctgttttgtttttctaaacaaaaaagggatccttgcctaactttgaatggatctgaaatgtgtgctctttctaagatcatttctactgacccattcctctttgggccaggccattcttgaaatttggaaaatttctgtctttggcccttatcttttaaaaaaggcattcttttaggccaggtgtggtggtgcacacctttagtcccagtgctgggaaggcgaaggcaggaggatctctgagttcagggacagtctggtctacagagttcctttagggtgtgcaggctttatcagacgcgttgatttgtcttaactcacctggccattcttcgccctttgctgattttcttttttatttactggtttggggcgaggatcacagaggctaggaagattggtggaaaaaggaaatctctagattctggggcagggttagtaacagtcctgtggtctactctggctggattgattgctagcaggctgggtgttttgcaagtctagttttaatgttagcctaagggagagaactgctgtttgcattttcagggcagctttgcatactgcctagagaaagctgtgagacctgacctttgataaggttgtttgtgttggcccaggacctctactgagtagggttgtagcttccattttggtggttttgaaaaaaacaagttttatcaaatgagtaggctcaagttgaactagggtatatatagggtataggggttagttgactgttccagtccggaggcgggctaggcattctcattcaggaagcaggcgtagttttctcattccctcccgagtccactggtttctgtttcagggatgtgtagtgttgcacactttgaacataacctgaagatatttacgataagtctaactcttgacagtattggtctccgtgcttcagttcctctgcccccatctggactatggccagactgcagaagaaaaaactgacagtggtgatgtgatgcttcaagagaagatggtccagacatcacagaattctgtgtggccttaggacttttcctagctaacagcttgggcaagagttcaagggaaactctcagtctccatgcattctttgtacccgtgaaggctggcagtacatgggatctgaaacagtttactagatttgaaatgactatttaactcataacttgtttttaaggtaagtgctcggattagtctgtctctctatagctaggttttgtcctagctgcattgtagggcttgaactcaggtccttgcacatgctaagcaagcactgtacactgagctgcagcctactcctcatcaccgagccacatgccaccctgtttttctttcacctggctgttatggactttaagtcgatgtctttagcagctgttttggatctaccattttccctgggcactgcaggatgtggcctttgacttcatttaactttcggttgaattcttgcttagcctcttggcctagatgcccttggctgagtgtctgcaagctttgatctcctgcatattgagatttccagtctcttctcacaggagcccagtgctccctgacacttgtgaggcttctgtgaattacctgcttgctcctctgggacctcagtcgcctttcctttggcatgggtctttgctgaagggattgcttttccagtgatgagaaaccaataagagagtgtggtggaatgagcaggagggcctgtttggatttccacagggagtctttttttcttttattataaagattacaatcatgacttttgttgtttgtttggttggttggtttggtctgaccttattatgtctctcttattatttggatgaccccaaattcttaggctattcttttgcctctgactcccaagttgctgggattgtagacatgtgccaccttgtctggctccatagttttaataggtaattattgaatcctcggtttttcctactctttaaaacttgacaaattttctctttaccattctactaaagccaggatctgcaggcttgtccttgttttataatgacgtactgaacctagtgtttacccaagcatgtttagctgttttagaaaacactgtaaaatgtaaataaaataaagctatcataacgtacacagataaccactgaagttttaaaaaatgtttgctgacttgtgtgtgtgtgtgtctgtctgtctgtctgtctgtctgtctgtctggtgtgtctgggtgtgtttaggggcatagcacccgtgtggaggtcagaggacaacttgcaggactcagttttctccattcaccttgtcgggtctgagggctaaattcaggttgtcgacttggcggcaggaaccttttcccactgagccaccttgctatctcatgactgaattccttacaaatacccgctttatttatgtgtttaagtttgagctgcatccacagccttggggttttcttttgtcatttaaatatttattatttgatgtgcatgcatgtgggcctgagtacacgtttatgctccatgtgcaagtatcctcagagaccagaagaaggtattacatccctggaactggagttacaggcagttttgacccatctgacatgggtgctcagaaccaaacccaagttctttctatgagcaccaggtgctcttaatctctgagccatccctccatccctaataatttttaaaaatattcacagttgcacagtcatcacaatgatataattttagaaacatttcatcattgggatgggaacagtgtttcccatgtatgatgaggccttaagcctggccggggtatatgcccataatcccagatcaaagcaggagaattagaattttgtcattgactatattaggagttcaagactagcctgggcaagagactttgttgagaaaaacaaaattacctcatttatttactttttaaccggaataaaatttattttttaaccagaaatgcaggaggcatcgagagtatccatagcattctatatgttagatagcgtcattccaattgattcacaaattaaatgaaagacataaatataggataaaaaaagctctggttattctaataattttattcggtccaattgaggtttagcaactgaagcaatgcttactgggatgttcttgtgatgggtaactgatagaaacacacaggatttacctactttaatatttcatataagtgggttcatggaatttatgtcctcttgagactacttcctgcaatgtttgatctttgtgtcagaatatctaatttcttttccttcttgtttcttctttgagcaagactactcaacaaaccatgacccacaaccggccaacagcaaccggtctataccccacttttcagggccctggcatttatataccctctgaaaagaccccaaaattccaaatgtcacacaatcacagaaactatctgtagctggcacaatcacacctctgttagagcacagggcaaagcacagtcagctgctgcagatggtccagagcagctgtgtaccccacacctgggattaaatcgaaaccctattcttataatcgttctgtgttgttcaaagaagccagaactccaaaattgtcaccacaccatattttgttcattgttggttgatacatgtatcacttacctcccatttggggctattgtaaatagtgttgctatgaacattggtgtgcatttttatgtggaggtatgtttttccttctatccaggatatagacaagagtggaatgcctagtctctgtggtaactgtgtgtgacattctgagtaaccaccaaactgtttttcagagacgtggtaccattttacttctccactagcaaatgcacttgtttttcagcctcttcagtatgatcagcctttctggaggcagggtctcaggtatgcagggccaaaccaactttggactcctctcagctctgcctcccaaggtgttctctactgcctggttctgacttcgggttgtagtcattactgatgggtataaaatcatgtcctactgtgggtttggctttttttttcttttacccctcctatgcttgcctctccctttcatttttgaaggactctcctgtgacccaggctgaccttagactcttttttttgaaggactctgtgtggcccaggctggctttagactttacatgaagctgtgcctggccatgagtttcagattcccaagtgttggggctcacaggctagtgccaccatgcccagctttgagtcacatttctgtgctgactaatcattttgagtttcttttcgtttgtttcttggccatatgttcatgttatttggagacatctgtggtcacatccttggacaacattttaattgggttaagttgttgttgttgacgtgtatatcataaagttttaatgtttcctgtaagaattgctttgtattaatgtaatatattttctttctctctgtgttgtttttcagtgttagggattaaacccaggaattaagacatgttaaatatatgatctactatagagccatgctcccatgccactattggattatgtaatagacacatagaattttgtaagctactttttaaagtaatatgctgttgccatcttctcatgtctataattaaatcaccttttacaactactttgtagttctttatatgaatacagtataatttaagatctaattcttgggctggtgagatggctcagtgggttagagcacccgactgctcttccgaaggtccagagttcaaatcccagcaaccacatggtggctcacaaccatccgtaacgagatctgactccctcttctggagtgtctgaagacagctacaatgtacttacatataataagtaaataaatcttaaaaaaaaaaagaatatagtgttttttaaaaaaagatctaattctttatatgtgacagttattggttttttccttaaattttctgtgttgatgtgagagctttattcatgccccataggtgctatatccctgaaacacttctgactgtttagagtttgatttgaaagggaaagagaagctcaccacacagcatccgttacttggaatggctgattcctttctctaggatgctgtactgctgttgcagtcactagagcaccatgtagcatgaggacaaaatgcccctacaaagctgtttccatgtacacgcatcttcccatgccttggttgtcagtttccccactggtggtcccagcattggataggagtacttttgcttatttctaaaaattaagcccaagaggtcccagtaggcattatatgcctcttaatttgcatttgtgtattaaaataaagctggttgaagttgtgtttatttcctctgttgaccttgttgttcctgtgttgggggattacttctgatgccaagagcgtgtttcctgtgctgagagattgttcatcccctgtgcttgtgcttggcaggggcatttttacctcctcccacactcggacataccaccttcttttgccttctctttacataggttccttctaggccttgagagagttcctaggaacatttttacatggttatactttttattaccttttcagaagtcagcatatacaatgtatatatccatgtaacctatatgtaatttacttttttcccattaaatgctctattcccctcccccacttgtatacgtttacccagcctgtgtctgcccctgcctgtggcacagtgctgaatacaatattgatttggatggacgcctcctctgtgcttggcgtcgttgcagttttagcatttaggctggggccccttgttccatctgtttggttccatctgtggcttggttcctctaagactcatgaaaagtacagtagcactagaagaaatattctgatgattttaaagttatgagcagctgtgtgtacagtgtgtgttggtacagtcctcccctgttctcaaactattgaccagaagtagaaacgcctattttggttagttcctgggatgacctagcagagttactgaatttcctaaagtgtctttcttaagtagcctgtgattagctgcttttaaaatctttacattggtaagtcttaggtattgtgttttctgtggcttgaagattggtccgtcttgagtggtgtgccctccatgtgatttgtttactagttttctgagtttattatgggaacacattttataacccagtgggcacaaatccagtgaacttttgttgagcaagacacattctcacttggtttttgtgagagtggagacctggagaagggaggtgtgaacatgcagggctttcatctattctgcaggcagattgaggtcaaggttagcaggtgctggcgttcacgccttccccagtaccacagatgccagccctgtgactgtggcactgtgcatgtttttaaaaggtctccttttctgagcacctttgaatggcactgtgggaggctggtaggacagtgtgtgggtataatagagttctgtgggacccataggcaatagggagcatgaagggtagatacaaagaaaatacaaccagaagagggctgaacctagtgttggctctgaaaataagcagacactattagccaagaatctttctgactgctgttttgcttctgttctgtgccatcctggagagcaaatgtatatggggtggagagctttgtgatactgctggatacggactctggcatgtggactgggaaacagtggctacagtagtgaggattagaaggtgtaggacagtttcaaaaggaccaggataggctcttgtactttttggcttgtgtttcctttaagaagcccatggatcctttccgggaccccttcgcaggatcaatggggtgtatcatgaccagaggtcagccttctctcagagtctgaggaaccgtgaggacagtgagggaccttactctctgtcatgcttgtttagatcatgaaaaatgagcactatttctacatttaaaaatgcccctttttctttggttttgattattttgattcaagttttactctgtagctcagattggcccgaaattataatgaagcctatgctggtctcaaacttggagtgatctttctgcttccgcctctggagtactgaggttacaggcacgcacacgatgcacagccagttctcttgcccacaaatagcctgtagcctttgcctgcattatcctcctccctgtccttctgtgagggccgagtgtacatgcgcattacttgtccagttggtgggtgacaagtactgcctgccttgtgagaatggaaggtcacggtgaatgagaaagtaatggtagaggtttaaaggcaactgattctctaagctcctgacaactggatagcaattgtcctgatgtcatgtgcaaactgttccctgggctgcttgctggaggtcagccttcaatagaagctgccaaagattacttagtggcttagcacacttatttttgatgttaaggatgtgaaaatggttagctctccccatattatccttgtgcagatacctaccataaggtttccttaggctttgagtaatgttaatagaagacaggcactaggtaagtgctataaatccccttggaggactttgtatgtccttgcctagttagcctacacagtcagaatggagagcagctagctgcacagctttacacattagcgtgtgaggtagccagcaaatagaatctgaaagcagggccaggcgtttggtgcctgtggatttgatcccgtaatttcagagacagggatgagcgaccaccgggccctgtaggcaggagggtaaatactgcatccacatccacactgagctgcaggtcaggctgggagaaaggcagccggtgagttctgatgacaaaggctcggtgtcctttcaagccctggggactcttgcaggtccctacacacactaagtgtgtgctgtggacaggccagaaacttggtggatgctttagaggaataaggaagtttgctggtctctgacctcagggaatttacacatttctacacttgaaaacagaactaccagagagaagccctgaccttcatgctgggcggatgctactggctgcagtcaggtcaggggaagcacttggcagaaatgttcgtgagagcctgcagccaggacctggtgtgagctcagagagcaactcggcttcctcagttggcctggcttttggagacaggtgtctttgcagcctttgagtaaatcctacctctttcaagccaattttactatctgaagtttgctttaagattgacttaaatttgcattaaaataaactcaagttgagtgttcagttattatgcatcttaaaaataagtaagcagcaaattgggaaggcccccgggggacttacggggaagtttgaatagcaccctcatgggagactagtccgctgtgagctctttaggtccctctttccatcctgacaggggttcatctaggagcagttctattaagggacaggcttttaggtgtgtccgggactcttgcctgaagtggattaacaatgaaatctgaggagtacttttgccttgagtgagttcattaaaaagaactggggaccctgtcataggtccttgtagcttctggatccagctgttaaaacagttcttcaagttcacaaagcaggtgttgagcatgtctgtttcaggggaatgaacaggaggcttgcagcccaccctgggaccctggtctctgtgtctgaaactgagggaagaagagcagcacctcccacaggctggcagtgcatcgattccagccactttctgggtctgtgatgttgggcttccatgatgaagatggaggagtgggataactccacccctcaggttaaagtgtgctaaggactcactgaacattctaggtgttggattaacaggcagggcacttccaggtaatgcttattttatatatggaaatcagttcctttctctgtgtctttaaaaagcagttcttttgttttcgtttactttgtctatgtgtatgtgtcacagcatggtgtggaggtcagaggacaactttgaggagtcacttgtctccttccaccacgtggggtccaggggtcaggcttgacatcaggcttggcccattgcctctacaagctcctcgctttgttgtactcatgcctcaggcatgctaggcgtgcaagcgtttcccccctcccccaagccccactccaagcccctagcgagtctgctgtgtaattaccagagccattgtgcagtgctggagacagactgttgagtacacttaccttctagtttagataaaatacttcctttaagactgttgtttattttccgagtagtggtaaaatgcatagagtatcaagttcaccatttagaccactttaagtatacagttcagtctacatgacttgaccatttcttagacatcaccttaaccaggagaccatcattaccattcatctctagaactgtttttattttgcaaaactaaaaatcggtgcccattaagtaatgatgactgcagagtgtgtgacatacgtctctaatcctggcacctcagagcctaagacctgttctgggccagcctgagctacttaaggagactatctcaaaacacttgcccgctgcacctcttgttatttggaatctgctccttcaggatttcactttcgaatagttaattgaaagtaaagtcccacttgcagcgagaggtctggtttcttcaggcacaaggaaggccattgaacaaaagcttttcaggagcagaggtgactggtgagtgtggggcagaggtggaagagcccaggagcgctgtgaagtgaagtgggagtcctcagctgccctgcaggaagtggggccttcctatctttgaagcctgcctttcgggttttgagttcctgtttaatactcttttaattccaactttctaagttcgtgagtggggtaaattgatgagctagctacctttcattatatgtaagtatttctttttatgtatgcatttcttccaaggggggcccattgggagagttgggggttcaatgcccaggaaccacccctggtgaaagtggagtaaatgcgccaccaggaggccaaggccagccctctgtgcctctcacagcctgctgaggtgggggtgagggtgaggtatggcgcttcctgctgcttctacctagacatgctctgcccagtgcttgctcactcttcttgtttgcctctggtcagagggagctctgcaagagctagggcctctggcatctattcttttgtatcctggtgtcctggcagctacatcgttcacaaatgttcctaaggttgagtgactgagtggcaatctgcccaggaggtgactgtttccattgctcattctgtatcgcttcttcacggcctcggaacactgggtgtgcacagggcctgtcgccagccttctagtggcagtagggaaaaagtgctgctgcttcccaccggcatgtgggtccctccagccagnnnnnnnnnnnnnnnnnnnnttttgtatcctggtgtcctggcagctgcatcgttcacaaatgttcctaaggttgagtgactgagtggcaatctgcccaggaggtgactgtttccattgctcattctgtatcgcttcttcacggcctcggaacactgggtgtgcacagggcctgtcgccagccttctagtggcagtagggaaaaagtgctgctgcttcccaccggcatgtgggtccctccagccagctctgttctgtcatgtagctgggcatgaagggaaaaatcggtttgggggctctattcctttgtggcacttccttggtgtacggcttttcaatactagacgcctttagattgtaggactgcctacagttttaactttgtgcctttaacatgttatattgaaaatgcgaccttatatgttatattgaatgttatattgaagtgtgtctgtgagtatgattatcacatgctctgtcagccctcacccagccctgcggctgctggtcggtcgcctggcttatgctttgtgtgtgctgcaagtactggtccgattgaggagcttcttagcgccgggctccttgcagcgtgcagtctctatttcctgtaacctgtaggacctattctcaggtactgaaagccagaaacggggagcagttgtcttagggatgatgtgggatgggggacaagtataccaaactttacatattgaaagacagtccttcctccaggtatatgtctgtcctgagccttacaggcttcatatgacccgcccagccacaaaactgcaaacttacttaaagaaggataagattctagcttgtaattttattatatttttgtaacttgattgtgtggcttttgagcatgggctctggattttggaaggtcctgtttcagaggctggacatggctggtagaggaaaccacctctatgatgtaggtctgaaggtcagacctgaggtaagaattggggaagtgtcaggaagaactgcagcattagcgcatgcgcacactgccagctggaggtcgttggctgctattttaaaagggtgtactcctgagaaacacccagaaaggaggctgtttgcctctgaccagcttccagtgttagaactgacttctcataagattgctaatttatggtgataggtttatagaggaaatctgtgggcaggtatgagaggaaagtaaaggacttgggcatgtagcccagtggcaatgacctagcaaacccttccttgtctgaggtgatcttgtgaaagaagttcagcttttcgctggtgccttggattggattgctgggtggaaggctggggcttgcttttccactctgctgaaaacctgaattcctgactttgggccagagtttctctgggtttgcatcttctgacccggtgaagaagagatttagttccatgatctcttaaggttgcttttgccataaacccccagggttatgagttgagactgattcttatcgctgtgctattgggaggattttcagttatgtcatagcctttgtgcaacatagtcatcgctgttattttttggttgctgttggctagcatgcctctcccactataacatggctgcggtgagaagagatgctatgctatggtcctagggatgtactgcggaagaaaagtgagggttgcctatgtgagtaaggactggatggtgcgctggctagttctatgtcaacttgacacaagctatagttatctgagagggacctcaattaaaaaaagacatcaagaagattaggctgtaatcagagatatctgtagagcattttttaaactagtgatcagtgggggaggccccagcccattgtgggtgggaataccccagggctggtggacctgagttctataagaaatcaggctgagcaagccataaagaacaagccagtaagcagcacctctgcgtggcctttgcatcagctctagtctgcaggtccctgtcctatttgagttcctgtccagactttcatcagtgaacagtgatgtggaaatgtaagccagataaagtctttcctccccaggttgcttctggtcgtggcgtttcatcacagggatagacttttaactaagacagatggctcatgtcctaaggtccacattgccatagcaaacttaatgatgctaaatttgctaatgctgcactgtgcgagtgtttgacagacatcccctgctttgtaggtggggacttgacaaaatgactgttctcttaaatgtgagagtcttacaagcaggttctgtagatatgatttcaaaagtttgaaggtcattaagtttttaaaattttagttaataaatttttatttggttttgttatgctttgttttgagatatgctttccctgtgtctccctggcagctgtgtcctagttgctgtgatgcagcaccaaggccaaaagcagcatgggaggaaaggttaagcttatcctttcacatcacagcccttctcagaggaagtcagggcaggacctgaagcagaggccacagagggctgctgcttactggcttgctctttgtgacttgcttagcctgaattcttattcagctcaggaccacctgccaggggtggctacactcccagtgggctgggccttcccacaggggtcattagtcaagaaaatgcccacattttctcacttgagagtccctctcccaaaccaccttagtgtgtgccaagttgacagaaaaccagcaggtgaaggtgtttgttgtgcaagtctgatgatctgagttcaggctccataagcaggtaaaggctgactccatgaagacgtcctgtgaccactgcacaccatggtacatatgcacacatgcagagacacactgatacagtgatggtgatggtgatgatgacgacgacgacgaggaagaggaggaagggcttctccattgtttcttaaatttgaaacagtttttcccattgcgttattaagccagcacttgttcttccatcaatccaacatctctataaacaaaccccttttcattcagttttcaatgctttcttacacagctgctgcccaagtctcaccagctctcacttggtgattggcttcccactcagctcttctcagaggcagtagttctcaaacactgaagttcatacagatgagctcaggcctgtggcttctgagataggaatgaagtcctctgaggttgcctaattgcatgtctgaccttgctcccaggtggtgggaactgcattctgagggagggcacagagggcatgtggaccaaccctggttccactgctctctggataaggtgctctctgtgcctcactgtctggcatcttcacccagagtctttgccctagcttcaggtgggcgctcagcctgattctgagaactccttcctacagccactgagttggactgaggttacacggtgaggaatcttgtaccagctaaagctcactactcctgctgagactgctaggcttgtagggagctagcatgctgtgacaggcactgattttaaagttgatagttgatattagaggctaagaaaacatggagtgagtgggccatggatttggtggcagaagttatggtaattacagtttatcatcaggctctaggctcttaagagaaagccactgtttattgcattgtgcgtttttatctttgtgtcctctttgtgaggacagggccctagacatcggcgcactcagcacactgtagtgctcagttagagttggatgagtgaggttatctgcctcttatggaaaggtcaaaggtcccttttgtaatgtcaggccaaactcttccaagttacacctctgacatgaagaactgaggactcactgctagttgtttcttctcatcctttaaaaccgggctggaccagctagatgagtgatgtggcccacccttacaagcctcctccctttagtgcctacctctcgtcatggcttttctgaatagtttcatggcttctgtccagcgcatcagagtctgggagcctctttctgtgtttctggaaactaagctgagtacctcagggaaagtactggacacatggacctaagcagtgtctgatccgcctgtaatctcaggctcttggctccaaggtggaggtgtactctgcaatattgggttgtgacctctgctcacaagctgatcttacaggccttcgaagaccaccttgcctctgcttctcttcagcttcctccttttgaagccgtgttttcttagccttgaggggcttctttggttttggtcttgttagtttgagagtggctgtttctctaacactctcaacctaagatttttgctgtgatgaaagacacagtgcatcgagtgcttgaccgacatccacagtgcagagcggcttggcatcagaccgtctaggttgcagcttgcctctgcaggctggagacttagtagtaagatgggaacgtgctgaggtggaagccggatcggatgggatcagagcaggggtgcgtgtgagcttccagcagttggcactgatggactctgtgggttgcaaacataagcttgatgtttgatgcgtcatttttcagttactagaaaaactgtgtgacatgttttaaagtagaatgagcagtccggaatgcccataagccatttcacggtggaagcgtagggcagtcaacactgaggaacagttagcgaggggtgagaagagctgttaagttggagaggcggtaaaggaggaaggtgtttacctctgacagaggagctagccgcctcgactccttagctgctctccttcttgtgtggtcttgccaggcagcttccttgctgatcccctcaccgtgtgttcctctgaaaagctccatatgtggctcactttcagagcccccaagacaaatggacacagccctccagtgtgggctggctgcttagactcaggccaggagagggccactggcagtggtgtccatccagctgtatatgtggtgggtcacagcgggcttcagagttttgcactgttctgggagccagctgtcctgtagagtctggctaggaaggacagacatccagtcagctgtcagaaggtccagaaaacactcaccagttgtttctctggaatcatttttatgtttaattttgtcttggttcttgggagaaatgacacttaactcagagtgtgtgaacttggactttaatttagaaaatggaaattttcttttccaaatagagccacctgtctttgcagtagtaaaagagatgactggttatgtagaattttctgtttaaggaaattttgaaatgtggtaggtgggatgggattcttgtacaaaagaaatgaaagtaaactttccatgtaaaccagtagattctgtgggtgtacccctttcactttcagtaacttgaagagaaatgtaacgcactgtgagtgtttccacttactgagagtgaatgtgcacagtgaggaaacctgtgtgcaccgctggtttagaaacacagcctgtggttgtggaagggagtgggttgaaagacctgaaaagccgaagaggagagaactgaatccgcagtgcgaattcctaagtcaaacacaaataaaaccagatctgagccctaggtagttccttccagggaaaataagctaaggagcttaagggcagctacatgcatgtctgcacttgtgtctctagcctgaatttcgtcattagctcctaacacctcccatcccgccatgcctcttccatataacctgtgcccacactttgcactcgctcttgtcttaagtaatacctgattgcatttgtatttcaaatctaactagttcccagttaatatttgtgtcaaaatttagaagtcttgctgtctcactcattttccttagatctttgctaactctgtgaggcttaggaactctgttttagtcttgtatccatttactgccaaaaaatgttggttgaatgttgatacattctaataataggaatttttacctatttcccatgtaggagaatgttggttctatctgtttagctgtttttgataggggaatgacaggaattggaaggagacagcttactggaaaagtttctaaagagccagacactctgcattctgagctaaatcagagaccgaggagatgccaggtacagagcttgaatctgagtagtctctccatagcaaagagaaatagaagacaacccagaggaagtaacggaagtgagagagtgctttaaaagcacatacataagggatctgcattatagttgaggcttactggcaggctgggtccttgtgagcactttaaaagaaatttattagagtaggttctgatttatacaggattcaaggtcaacctctgagcctagtgcagaatgagctccagtcgactttgggcggctgacccaggaccagcagtggaagtagcatgtctttgaatgaaagtgaggacgtgactactcctaggcatggttgaagagaagatttttactgtagaaggatagagcagccagaggcatacagaagtgtccagactgaatgtggccagcagaacagaccaggcctgggggggaggggagagaggaagaagacagagggacaggaggggcctgggagagggagaagaaccaagaaaaggaggaccaagatagtgtgtggccacgttggaatcagaagctgggggaagggaagcaaagggtgggtggagaaggttagggtaggggcaggggtgagaagtgctgaaaggagccagcactctgtctgcctcaggtacttgtgatgctggcggagcctggcaacagcctccgctttgatgtgttaactgcacaccacagccatctgtccagaggttctttggggcctaacagtgttgggatgacagcccccttagtactggagttcccctaaccttcccaaaatttcagaggcaccagcccctctcctgagccagttccttgtgactctgacactatcttggaagctcagcatagaatctgtttttgtgaacacttgagtgaccttgtacatactgaattctctggattaaatcccttatgttccaaatagctagcttgtttcatgcaacctgagactgaaaaatattaaggtgagaatgagcttcactggaaggaagcatcgtacaggagcagcgagtggatggatggtcagtggactggagaagccggatgctttgacgagtagatccatgatagctcccacgccagctttcctgatgggcttagtggaattgcttagtgagaaactgttcctgggaattctagaccttatccccggaggttctgatctggggggaccggcgttagttacctttctgggtgacagaattcctgaacatgttggctaagggtggaaagattagtttgggctcatggctttagtaatctcattcacgggcggctgggaagcagagagtttgaagggtgtagacatagctgctcccttgaacagttacctcccagtgaccacttcctaacagtcaccagctttaaactcaccaagggattaattctggaaggatgtagtgccttcagcaaacattggcgtcctcaaagcccgtgagctagcaccaatctcttaccatgatccagtcacctacctcccaaagcccattagccagtatcaagcttttaacacacgagcctttatcagggtagacttcataccccaaacaggcttccctggctgttcttagggatggccagatgggatgcagtggactaattaagctgggccttatggggattcttttcttaggagggagggagtgtttagaagctgcatgtttttagagactccactgtagacaatttacgctccttgggttaagtagttcattctgtcgccgctgaaagcaggtttccatatttccagtctagagtgcacaggatttgtattttgttattcccagaggaagaacatatgttgctgaatgcggaatgaaaatggaattgtttgtagtgaaagtttaaaaatctgactgaaggggctggtgagatggctcagtgggtaagagcacccgactgctcttccaaaggtccagagttcaaatcccagcaaccacatggtggctcacaaccatctgtaacgagatctgacgccctcttctggagtgcctgaagacagctacagtgtactgacatataataaataaataaatctaaaaaaaaaaaaaaatctgactgaaggctagggagatgagtctgggtaagggcacttgtcctgcaagcctggtgacccgagtttagtccctggagcccatgtagattggaaggagagaagcaactccacaaagccacctttgagcgccacacatactttgtgccatatgtgtgtgccacccctgtaacgtacagtaataaataagtaaatatttcttgaatttaaaaaatctgatgtttgttgcatattttatctattgtacaattgtagtgttttattgtgtaatgcgttaatgtcagtgcgttttcttatctgtttagacaaaggagaagtacggtggaagttctgtaggacaggaactgcttcgtgggagaattagggacgatttggaagccagtgaagccagagtcaccgagctgtgtgggttgactgaactctggaggctggatagctgcaggtcccaggccctggtgcaagcgagttctgggtcggtcctttgctgtcctcacttgtcctttctgcctctgtcttcatgttctctgctggccttgtaaaggtccatgctcacaggttataagggacttcacctgtgttgtgttttagttgttcctcgtgattgaaacagacaagcccttcctgatggagtaccttgtagcagcaggggttggatggcaagtgggtctctactgaagggcagggctgttctctgcagctgccaggcgcttgagattaagcagggtggttttgctctgggataataggcaggaaataactgcagctcatagagttctgcataatcatgagagacgtgaagggtgttaatcaaacgcatctgcatatgacattttcattatgtacaagaagagctgagtgtgcttatgcacacacatgcaaggtctgtagggctgggctgggtgcacatgtgagaagctgcatctgccagaagggctgttctttcccacaccagagagaatgagtgggctgggggcaggtatacatacttttagctctcttttcttcttttatcttaatactttattgagataattcacgtgccatgtacagtacaatctggtggtttgaatttcattttaaagcatattttagggttgtgtagggactattatagtctatttagattttcacccttcctaaaagaagtggtagagtgtgtacatccgtgcatgcatgcctgtgtatgatggggtcccagggaggccagaagagggtatcagagctcctggagctggagttttagactgttatgaactgccctgtgtgggtgctgggaatcaggtaggctctggtcccctggaagagccataagcatccttaaccactgacccatcttgcccttgtttatagttttaagtaccctttctctcttctttttaatggaaacacagatctcttgggggcttttggaaagatgcgtttctcaggaagcaattgttttttgaagtcaatgatggtttaactttaccgacatggacttagccttatgacctacaacatagctactgggctaaggagggatcctctcaggttcacatgagttcactcacgtgcctttggcattagagttctgttgtgctggtgccttgcagtaggggcttgaagcttgaggactctgttgctcagatcctttgccaccacgttggccagttcgttacttctgagggagcttggtgtgggaacacatcagcaaaatgagcctgtgagctgtgtgctgggcctccactcagctctccaggagtttatgtatccagcttataaatgctttcggctcttcatcattctggaattgtaagttatgaatgaagaattcgcacaatgaaaccagaagaacttttaggcattgtgcagtaacatgtgctgctgtcctggtgggtgggtggtttgctccccaaaggatcttttgattatgaaaagtcatattcatgtaccccatgaatgaaagagtgacttttactctacaaaattcagtagaccacagagagagttgagggagagagttaacagtggtgcacagtgtgtgaccgaccattccctagttgggtgagatgcatggtcacctctccatttggtccagggatgcttacaggagaatgtgcaagccgctcactgcacagcctacagggtgttcaatgaatgacccaccccaacaagaagtatacattagtctcataagaggccactggagtgccctgtgggggaccgtccttctcaatcagcttactttaatctacataatctacacttgctgtgcgtgttccttgtctgcttttcttacttgccttggacatgagacaaaggaacctggaatggcctgcctggctcagggcggctttggggatcagtagctcctcatgttaatgagccaaatcatttggatttgagccgggcccatacttgggtgctactttctgaaagcttttctaaaacaaggattagccccactgccttcctccagtcctgatttatctgtcactcaaatttcagatgtctggctcagtatatctcagagttgcagcatttgtaaccatctaatgcatcacaattttgtctgtccttgtcatgatgagagagagagagagcaagagagagcacatgtgtgtgttgagtgtgaaaccttggccatgcacccactaggcaagtacttttccactaagctacattttaatctcaaccttgatattttgaaaaagctgaataagaaatatcagttacccgcattgttttttttaaaacatctgtgcacattttttttccattttttattaggtatttagctcatttacatttccaatgctataccaaaagtcccccatatccacccacccccaccccctttttggccctggtgttcccctgtactggggcatataaagtttgcaagtccaatgggcctctctttccagtgatggccgactaggccatcttttgatatatatgcagctagagtcaagagctccggggtactggttagttcataatgttgttccacctatagggttgcagatccctttagctccttggctactttctctagctcctccattgggagccctaatctgtgcacatttttgtaagttagatttactaaaggtaaggttaagggtgaaattaggaaatagtattcatgatgttttgtttttgacatgttaggatgagaccatttcatactggataatgaaaaaaaaatattttgaggcttgaactgtgatttcatgagcctgtggcaccagttgggacagttttcttttatttagctaacattgcttactgagagactgctctgaatgctaaggttcagcaaaatagacccacaccctacgtgggtgcatcttcgcggcagtggccacgtgcagacttactgaacctcacggatgacaaagacagagagacaggagtgtggattgtgaaccacaccagaggggataagtgggtataagcagggaatcttttcaaagatttaaaggaaggaagaaatttgccaggagattacctgagagaaagatgcttgggagagggacagctgcagcaaaagccatggggctggaccttagagcttggagcagactgtggaccagaagatgaggaggttgagttgggtatggatggaccctgggggactgtggcatggacttttttatgtaaggcctctgaaagccggagtgaagatgcagggtagagcactgactatctctgaagtgggttttaaaggactgtatcttcagagtcgaccacgttccatagggaaagcagcagccaggaagtacaagggcccaagcttgctgatggggtctgcactgaatggtggaacgggcctggtgagtttgagagcagatataggttctagtggattggatgtggagtttgagacagagaaagggtcagggtgactgctgtgtaggaccatctggtttggtgcttgaagtagcatggtcttagttgtccatctatgggatgagtacgctggaatgctaacctggggagagagcctgggtgttgggagtgatgtcgaaagtccgaagactgattagtctgagggagctctgaggtgagaaggtggagaggactgggcctgggatacaagagccagagtagagtgtactggggtgagggcaagaggtaggtcctgtgtaataaaataacagaactgcatgctttgaaagagctgtagtgttagatggagaggatctgaaaggtgggaattgctacttgaatccatacaaaggaatagtataggctgtgtttaggaagttaatactcttcggttgccctcaattttcaaaaacctgccattctgaatatttttaaagttctggatacagcagctcttcacaggaagcactttacggtttagggaatctgaggagagggaatattcttaatgccctgctccttccagcattgcagagagtatctggctctggcaggtgccttctcagtttccctccatcttttttttttttttttttttgtaatcaggttgtacacaatggaaaaaaaatttttttggcttctttataatagctcctccccctccccactgttggttgctattgtaatctaccttgatggagtgctctgcttgggaactgatggctgttgactgagcatttggggggtggggggatcgaatcacatcctgctggcttcggaatcctccagctgcctgctcgcctttgtgaatctgcacagaatgcttgctgccctttgtctagggatggggagtgctgcggggagaggggaagtggttagaggatggggtgggctgaaaaggagcccctggagaaggctgggggctgacctgtgatgagctggaagcagctctagaaggggcctgagcaaataggccttggctcctaggccccggggcctggagggccattctttcttttacaacctcttcagcaattacacttcagccctcaagggggtttgaaagaaaaattacaatttaaaaggaagactgggtgcgtgatttgcatatgagtggcatctgtataattaaggacaattaaattccctggctgaattgaaagggaggccccagcttcttttactgggtccctgtggagtgcagcctgtggctgtcagttccctggaattcatttggcagaatattgccatcttccctgactctgcttgtaataaatggaattctggaacagactctttgtagctctccctgatttgtcatctcttactctccattctgtcttcccttcctccagggaggggcatacactccacctgaccactggcagagctctttacaggcatcttattcaattcttctttgagttgatgggtcttactttaccaatagaggatactgaaggtcttgtcacaagacccatagtcagtctctgggcacatttctaattagctccgtgttccctgcctggaacccactgatattgatggccctgggactttagtgctttctcttctcactctgctgtgtcccatggtcaccttcctcccagtattgccaaggaagcaagacagtttctaggttgttcctcctggttttaaaactttgtagggtccctgtgtggattagctcaagtagaacagacgagcaactgcttcccgttgctgcctcaggtgaaggaggtactgtgtgctggtaagcacaggttatgccagtctttgagaagtagattcatttgggctcttactgatnnnnnnnnnnnnnnnnnnnnnnnnnnnnnnnnnnnnnnnnnnnnnnnnnnnnnnnnnnnnnnnnnnnnnnnnnnnnnnnntcaaaccctcaacaaggccacacttcctaatcggtctcaaacagctcaggataaccaaaccttcaaatagatgagtctgtggggccagtcacattcaaaccaccacaggcttccttttaggattttgtttctggaatgccagatggtgacatcactcaagtgttctttttgccacctcttctgtctctggtataacatgtcaatcaggagtagcactctatctttgactccctaaagtgtctcagaggttcttcagcttctgtgcagatggtaatgaggcagaacactgattctcaaccagccatatgcagcatttgtcattgacatcagcacttggctacagctcttgaggaccacagttatagtcagtgggcttttcctagtgaaaggcagtatacaccatctttttctttttagacatttggtttatcgacaggtttgggtaatgtttgtgcgactgttaccggaaaactcagaggctagaccccatgaaaatctggactggctacatctctctggtggcaggcagttgctgtggcatttgcataggactagtgcctctgagtagtagctgctggcagtttctgtcactagacaagggccagaagtggcctcaattgcaactaaatgttttagtcacatctcccttgagagatgcagagctatgcagctactgctccaggtctccagggtccccactgcacacagacaactggctgctatgtcattgccacagttggaagaggtcacagcattccttggagcttctagggttccagcctgtttactagaattaagatcactggctacacccacattcagaggagccttggatatgtgcccagctaagaccccattatgaggcagaagggcctgggtggtggtaggggcccagagaacaatctatcacaaatcctggcttagaaatataaacggtcacaggaacattgctttgacaaaatgcatttctgaattaacctcctgtcccctctgtcttgtattaaggaatacgtctcttctgggcatattccagactctagtctgttttcttttgagctttatatgagagaaaattgcctttaaaccattctggcagtaggattattgcatagaagtgaccttggtggtaactcacgttttgtagccaagtgtgtgataggtattcagagggcagctccaaagagctcttcagagacttctgctacgttcctatttgtttataatttatttatttgttggttctgaggttcaatcacagggcttatgtactcgagccacatgcaaagctatattccttcattactttttaaaacattactttcagaaggtagtgcatatctgttttcttccacaggaaggagttgcactttttgaatggcaccatattgtgcaaatatttatagaataagaataggcccaagcagagttggacattgagccaccggtttggattgtgtgaggttctcataattgctggaaagccgggaggctgctccattcactgtggccagacagaccatgaggtccaaccttcaaaaagcagttaaaatccactggttcctctggcaatgttacttacattgtgtatatttgtctaaacattattttgataatttactcatgttgggtaagagtctaatgctggtaggtagaagtgaatgccaagagcttgctattcctgaattattataaaaatgagtccaactatcagattgatacaagagcttcaagataaccttttaaagaggcaggctcacagttggcctttgatcactgtgacaaatacccacaataattagcctataggagagaaggtttattacttaaatttgtgcaattttaaacttactgttttgaaaggcttcattccatggtgggctggccctcctagtttggggcctgtggaaagtttggggggtctttggaggactctctgactaagagtttctattcctgcacaaacattatgaccaagaagcaagttggggagggaagagtttattcagcttgcacttccaaattgatgttcatcaccaaaggtcaggactggaactcaagcaggtcaggttacataagctaatgcagaggccatggagggatgtttgctactggcttgcttgctcagcttgctttcttatagaacccaagactaccagcccagagatggtcccacccacaataggctctccctgcttgatcaccagctgagaaaatgccccacagctggatctcatggaggcactttcccaactgaaactcctttctctgtgataactccagccagtgtcaagttgacacaaaaaccagccagtacaaggatttagccaaaccatagcacttcccttcaagaaactgtaaatacttgaatatctaaggacactttgggagctgggtatgggcactctcattctatggatgcattgcttgtctctactcatggaagaaaaaccctgttctttgtctccccagttttgtttgctgtgtgcatttctgcattgtctcctttgctgtagtactaaattatgttttgtgctaccttcctgtcccagaactggaagaaaagacaacatggattttgtattctgcacattaggaaatcatattcaaaatattttaacacagtagtatgatttacctctagagtctagggaagatgtcagtctttaaaccacaaaggagttgtacctgaattaaagagaggagagagttggagcaggacccaggaaaacatgcccttaattgctgccctgtcatttgacaggcatacaatccacgtggctgctggagttctgtacagcatgcagaatgtgctgtgacgaagtgtgaatatggtggcgtattttgaagtttgttgaattggaaatacagtgctttttgaaaatgcagtcctgatggtgggaatggagcacaagagacttatttggtgtgaaagcatgaaatccctagagacctctcagaaccacttgcttgtggaattaaggaaggcaacaggagtagagttcccagatggcttccccgaggacacataggctagtcactcagcagggtgagaatcacacacaccatgtccactgccatcttggattccacctggaggttctggcagctgtgcctccaagagtacagacggaatgtccagccaggagcttcacagaagagtctaggccacagatacacacaggcttgggaagtgaatcagctaaataacaacaacaaaaatagttctggcgcatctaagcaaaagggaatgtattgaaaagagttgggaactgacagaatctctaggaagaattaagaataggcctgggagcacaagctgaaggggatttggcagctagaatgactgcctgaagaacttgctagggacattgctgtcttggccattgacacagctgcactacttctgctgtggttgccctccctctctccctcccttcctccctccctccttcctccctccctccctccctccctccttnnnnnnnnnnnnnnnnnnnnnnnnnnnnnnnnnnnnnnnnnnnnnnnnnnnnnnnncctccctccctccctccctccctccctccctcctttcttgttgcttcagtgcctgatgccctgcctcaggtgagtcggtctggtcatatcttggtcatgttgacagtattctagctgcaaggggagctagtaaaactggtacaaggccagttcagagttcagaagctggagagtgaaaaatctacaaatgttgtcaggaaggtactgaatagccaccaaataacaactgtttttgccgcgaatcaacaaaatcttaagagatggtaggtagagctactgggtggacaggaatccttttccagagtaagagaactgagaggaggaagtgtagtaaaaaatattaaaaatcccatcccaggacctcttcccctccatagaccatttatgtccccaaatgaacacacacacacagccttcatacttttaaatagccttagcatagtagctgagcagctgcctaccctccaggctgttagaatctactttcactaactccactatttagtatgtcctgtctgagctgcatttagcccagttgggctctctgggccatgttcacttcgctcttagcccatggtggttctcctccctcctgcatgttcttcttccaaggcagctcctctcctccctccttgtagttctttctctctaagcctgcagaacctcaaccccatatagacatagacataaacctatgtctcttctgcccagctattggcatctttaatcacaattacccccacccccggggcctaggggctacaggcacagtgcagactcccggtcttccccacacttagcattacagtacacagtgaaagacacggcttccacaaggaagagcctccttcagtcttgtacagaggcaccgagaggggagcttgaggggatatggactgtgcagctgttgcggaaggagagcatacagcaccagtttcctagaaacccaggaagggctgctccagagatggcagccagcagagagattaaggtagctcagccctcgactccacagcttgtggatcgttgatgcccttagcagaagagtgggagggctaagtgatcacaaggagggggcaggccgtggagccaggggttccctgtgtgaattcacatcccattctctacctggaggaggagggctttggcaagtgtttgaagccctccagtcatttcctcatgtgtgaagttggaatgtgtgctagtcaacttctggttactgtagaatacctgaggtaacgaacactttaaatttctgttggctagtgattgtagtgtgtcctgccagtgtccaggtgggataattacttgtgtgtctctggtgggggtgctggatgttgggtgtggggaacatacatagagcgaactgtgctcttcgccgttttgacccacacatgactgccttcaaggacatggcctcagtgactaaaaccttcctactaagctttgcttaaagatttcaccacctctcagaagcatcactctgtggatgaagacttcaacagatgggcatttgcaagcttggtgactaactgtagcagataacaagtttccacacagctttcttacagttacataggataaagttctgggctagcatctcacctcagaaggaccgagctcatagtagctgtcattgttcattaacatgtagactatgagagggaagagggtttggagaaacagggaaggtcagagggcttaagggaccagggcataggtctcttcatgtgtacgtgtaggagaaaagagagagagggggcgatgttgaaaattccaggatccatccaatccagaaagagtagttggttagacactgaaagaggaattctctttgggagttacaggtgtgagcatattcattagcaagtttggagacactttagggaaggacacttgtcatggccttaggaaggcctggccatcaatacattggagcagcctccaaacccaagcttttttattttccttttttaaaatcactgagtgtgtatccacagacccaattttcattctcagagccctttattcttagacgttctgtctcagtgtatttatgctttgaccataaaacctggagcgttctacagtaaaagaaactaagaaaccatgttctgccaagagacctttatctccactgtgagcttttactgttatttcaagccctgtagtcagtgctgtgtcgtttctggatagcaggatctagccgtgagcattatgagcattatttcctcgtgggatggtgtgctccccctgggtgcggagcctttgtgaaatgaggatggagcatttctcttgcccatcccccacttcattggccgaagtcattgtcttgactttttttttttaatttgtgctatctaggtgttggcaaagtttactaaaaagcagcagcttggtagagctttgatggaaacagactattgaggaatatggaggacagtcaggtgccatcctgccttgctcagctgacaagccacataaacagccagacagctggttatagctaactcatttccatgtcagagtttccaggctgttgtttttgaagggtgtgtgtgacgtctgcacctgggctgactttttctaggagtaaggaatccaggtatccacacagttctgagaatatcagctgcatccagcacattctacagaataggggactgagccctgctccctgagctcctgctacagctgtatctgactcaggctggctcatttctaatcaaaggtcttttcttttggactagccacctttccaaacttttttttaaatttaattttgttttatttggctttattttatatgtatagagaaaaatatgactgtttaggaaaaagagaaagacacgaatttggatcattgtagacatataggactttaaaaaaagtatagggtgccttgattttgggacatttagacagcaatagaccttttaaaaagtgtgggatgtcttgatttgggtcatttagtcagagatgggcctttaaaaagtatgaggtggcttgttttgggtcattaagactgagatagaccttagaaagtgggatgacttcatttcagttattgaaacataggtgggtctttaagtactgtgggatgccttgatttgtgtcatttaaacagagatagacctttaaaaagtgtgcagtggctggatttgggtcatttagctagaccttaaaatactgtgggatgctttgcagctgtgtccgactgctgaaaaaaggttctgtttcctgcagaaggtgggcatctttaaaataggacttagaggaagcaggaggctgtagagcagaaagaaagcatgccgttagcttacacgtagttctgggttcattctcagccctcgtcatccagtgagaactaagagtgcgagagataggggtacatagataagagctcatgtcctctcaggcatcaccacctgtgttttccatcactctccctgtcacagaagcgcagaacagctactgtgttgttcccttgtagtaaaaactgtatcttacagatacagagtaagaatttaaaacacatagcataaatacataattaactttttgttttattttattttatttttttcaagacagggtttctctgtgtagccctggctgtcctggaactcactctgtagaccaggctggcctggccgggaactcagaaatccggctgcctctgcctcccaagtgctgggatcaaaggcgtgcgccaccaacgcctagccataattaacttttctgagctgcttttgtttactttgtgtcatttgggactctcctggagtaaaagacaccagctgagggttggcattccctgataatgggttattaagggtgaaagttgcaaaggtaaggctggcctgtgaaactgtgggggcgagaaggtggcatattgtttctttaccacagcctctcagggttagttctttaaaggtgttggtttggaaaagtctttagtgtttgaaccacaagcactgagcatctgaggataattgtgatgtccacatgtaactaaattatggccgcttgctacttacccactgctggaaagccagccaccttgtccccttaacatttgcacctcagtaatgaacacgaagtccctgtgactctgagaagtgtgagactgtcttcatccatcagtaatgagttctgcaatagacaccagcccgagtcctctggtctagttcagttctgacactgtgtctggtcacatccttcagactaagaccacagtcccaagcctccttcctacttgaggtgccctgccacaagtctgattgtttcacccacacttctgacgcacaggctgcaggcagggttcccacaaccctcgaggtttttgatagattggatagaacagctcacagaagccagggaaacattcgctcagttttactgtaaagggtgtgacagaggcaataggggaggcaagcaagaaggggtctatatggaggctactccccaccaccgtgggccttggatgttttcagctgtggggtctctatggagacttgcgtgcataggcataggctgagaggctggttaggaacccagcaaggcctgcttgtttaactctcccggagcctaagtgcagcacagctttctccatgctgcctgcaggaccctaaataagggcaggccagaggatgtcttaaaacagaaagattgggaaggattggtttccgagaagtgagaagttaagttgtggtttggagggcttgtcttggggagggagccgtgctgctaatcctcagccccctttctgagcgcatgcgtgggaagactctccagctccatgggctccctcggcttcgacctctcaggcctgttactttaacttacttaacgttaagcttccacatgccttgatatgctgctgtccaaagtttttaggcaggtgacataaaatctgttaacaaggaaaaagaatcatctgtgatttcaggggggtggaaatcactgatgggattttgtttttctttttaaagttagagaaatttggggtgtttctgctatattactttaaattgacccccaggtgcctgatttttgttgagcacatggggtttgtgactgtggaatttgaaaatctgttacgtgggagatagtccagtctgtgtttcatttgttctattcatagactgtcactatgactgcattgggatctctcagtccagaggccaccatgggcactgagccccagtggcctctgcatttgtctccttccttttttattagatgaatgccatcctctttgtaacatgatcctatggttattatataaatcatgggcaggcatgaagcaaaggccatgtcctctcactttagctccacaacaactgtaagctacatactgctgtccctgcattttcttttttagacgataaggcagacactaacaaatgaagctactgaccggctcagaccaggaaagcaatggccgtgggtgtggaaccaggcttgtgagacctgcagctcaggctgtcacacaacaggctaggcctagttggttcccagatagtgttctcccttccagcggccccaggtctgagttagagatttgcctctttgtgctttgtgaccttgtaagttgaggaaatcctccaggcttcgtctgcccacttggaaaccatgtgcaaaacccaatgttcaacttctggctctggcactggacgggaaggagctgctcttagcttctgttgcgtgttattaatacagcacatttctgtggcctctctaaggttgcttggggttctcctggaatgctaagccctgaccagtttctgtagtgtgtgtgcccatggtgcacctctgaggttgtcacttctgttctgaggcagctagtggtcttatttacaagcgagctgtagtgctgggctctagagtctgaagggatctagtctctattgggtggaaaagttgacaagagaccaaagtgccactttgatttttaacccagctggtattggagataggacagagactcaggtagctctgagcagatgctttttggaggaagggagtttgaaaagattgtagctggagttgtaaggaatggggtggttctcccacccctcccatagactgtgctttcaggaaacagcaaacctctgagaaagatcttctaaaggtcaccttactttctagctggcagacttaaagtccaggtgacaaaagtgggaccagcttcctgagagctttgaggggagggaaaatggtaagcttttgttatggagaactattctgagtctctaaataaagtatgctcacttagggagtttcttccagtaaacatctctgtgctatgtaaactttcaaatagtcatacctctgtctgtctgtctgtctgtctgtctatctaattaatccatctaaatgtttatatctcttgttatagctttattatatttttcacttacatgtgcttgatttgtttttctactgaattgatctatgactcttgactttttaaaaatgtttatttggttttatgtgtattagtgttttatggttgtatgcatttatgtgtagcatgtgcatacctggttccctaagaagtcagaagagcagtcacatttccctggcactggagctacagatggtcgtgagtcctgtgtaggtgctgggaactgaacctgcctgggtcttctgcggggacagcaaacaccactgtcttctgagctgtctctccagccctgtgacttgtaagggaagtgagatcacagcgagcactcaggtgctgagaatgtgacttgccatgtgagagtttatgtggttcttataccacgaatgatgatggttcctgtctgcaaacccagcactcaggagctgagacaagagaggcctatgagtttgagaccagcctaaggtacatagtgcctagcctggcctacagagtgagcctttatctcagaaacaaacaaaactaaatgaactaaatgaatccagacctggttgaaaattatgcctacctccagcagcctgtgacacacaggcctttccctggtgtcttagtcaggggttcaattcctgcacaaacatgaccaagaagcaagttggggatgaaagagttaattagcttacacttccacattgatgttcatcaccaaaggaggtcaggattggaactcaagcaggtcaggaagcaggagctgatgcagaagccatggagggatgttacttaactggcttgcctcacctggcttgctcagcctgcttttttatagaacccaagtctatcaacccagggatggcaccacccacaagaggccctcccccccttgatcactaattgagaaaatgccttacagatggatctcatggaggcatttcctcacttgaaactcctttctttgtgataactccagcctttgtcaagttgacacacaaaaccagccagtacacatattaaccattggcctaaagaattcaggggccagagtttcctcaaacctgctttacagatgtgtttttctttgttttgggtatgtgaagataggcctgttacctgacttcatgcagaaagaagcctactagtcattaagtagggcttcgtttgtgtcgtcatctgttggcaagatctgtccatttgataaatgttatattaactgtaagctagacggttgtaaatttctagaactctagttcaaatttatctataagtgagtaaaattagatagcatgaatttagagtcattgtactgagcatatgattgcaaaattcaaatttaaacctaagcaattaatgtctctctctcttttttttccttttgtcttttagcttctcagataaactgttcattggaaaaggcttacattttcagccgtcagttctagattttggaatacagtaagtattttttttttaaatttataactaaattcatcttatttgtatttatcttcagcatatctttttaacatatttatttttaattatatgcgtatgtgttgagttgtagttatgtccacatgactgctgatgctgacagaaaccggaagaggacactggctcccctggggctggggttactggcagttgtgaactgttcaatatgagtgctgagaactaagctcccatccctgcaagagcaacataaactaataaccatggagccctctccagcctctggcctcagtggatcttacatgatgatatatatatatatatatatatatatatatacacatacatacacacacacagtgttatatgttaagcatataataatgtgaaagggtctcaatcctgagacttgttaaaggaatagttcatgaaagagagagtacaaaagctattttaaaccctttgagttttttgatgtatgttttgcagttaggcccttgtccattccaggtgtatgctttcctactgtggtatacagtcagcccccatccagttgcgtcatgatatgccttatactacttgataatagctagacttcagtaagaattcagtggtaagtctttgggtgttttttggaacaagtttgattattttataatggaaaaatggaatactgatgatctctgaatccttttaggccagatgcaattgtttgccttccctgctgtactttcaggctggaagttgtactctattgatcgttcctgggtagttgtggacgtttaggcagagaagatgagatacgctgtaaggagagtcacagtgctaagaaacatgaaagaggaaatgcaggctttgggatcacacaggagaggaggggcatgtctgggatgcagttaaaacttaaagcctggtagtaggcattgaaaaggtacatcttcgatttgtcccctcaaagctctgcttaggttcacaatgtgttcaagagctgctgagtgaagttacctggtgatgaatgaccctagggccagtggggtctgcaacccgtgctttgagctttcacctgccattcttgtcacgttctgacattgtcattgtctgcatttctgaagtttggagccacagggaaggaatgagctatcttgctgagcttttcaaaggagttttttctaaagggaggaggagatcaaattgttaaagtagtttgctaactttacaagattctaggtgtctgaactaattactaaactatctaattattaacaaggtcctgcactgtagtcctagcaggcttggaagtcacagagctctctatctcctcagtgctggcactaaaggcttgcactaccatgctcagaatattttgtattgaattacttacaaaaaatagattaagaaatttgttaaaagttgaatttataatcatttatctgataagttaaatgatttataatctcactgacttcaaatctgagagaatagtttacacaaagttttttttttgttttgtttttcttgaggaaattgtgtgtgtgtgtttgtgtgtatatgcatgcacgcaggactattttagagactattttagattggtaggtataatgaaatggatcatggtgaatatagccagaataggaaaaaagttcaggtatataggatcctggctgtcatttactcttccagaaaatcccataatataggagctggaaagagggcttaggggtcaagagtacttgctacttattgagaggataagcagttcccagcactcagatgacaactcatgactgtctgtaatgctagctccagggagtcagacagtctctgccggccaggcaccagccaggcctgcaacccatatacacatacatacaggcaaacactcgtatacagaaaattcaagaaaaatttaaaactgtgatcagtgagtgtgtatatgtataagtgctacacttgtcttaattgtccatatgcattaattactggttctgttatctaaaaaaacattgaatggttatgtaagtggccttggtttgaaagggttactgatttttagacttgaaataccttcagaaggttcagctatgttatgtaatactttgtagttttttagtatgttaaggtgttttatgtcatttgagctgtgttactttgtcattttgttttctttgagacaggatctcactgagtagccctagctggcctgaacctcagagcaggctggcctcaggctgtggcaaacctcttggctctgcctctgtaatgctgggttacacagtgcagtagcaagagccttcttcatctgtgtgtctgatgagttcccaagggtaacttagccattatctgagcatgtgtagccatctttacatgctagtgcttgactatagggcacagaggtttacacactggtcgctgagaagcagtgcagtttggccagggtcacgtctcactcagtcactcaccatggtaagacagtctgtcatttagtttcattgatagcacctttaagaagtgaccagtgcttcccttcttcccacccactggctcctgtatggttactaggacagcacagcagccaccaagctcccagttccctccctgctggttcagctttcgccctccttctgggatcagcctcaggcagactgcaggcagatggctgactctccaccttgtctctttcttctgttccctgagagcttctccaaagggccagctccaaggctggaagtgctaatcattcatacattttcatcattctcttgtcatattaaattcatagattatcttccagttgtcactactgaaggaaattcatacccttttaacacatgtaaaaatagaatattgaaaagtagaataaaaatagccagtggcaaggaggcttttgtgtctgctgggattccggtggctgtaggcagacgccctgctgtggagggagggtgctatcatctctccttagagcatttctccaaggtcttggaaaccagaacacgtgtgactagtatgtaaagtcttagggggcaagtttaagtagctcagttgatttgttggcaccttttagttaaggctatgaaatctgtattcattgataacaagaaaggaggacatgagcccagttctctggctgggtttattaggtaacccttatgtttatagtagaatttgttgttgttggtggtggtggtggttggttggttttggtttggtttggttttggtttctctgtgtagccctggctgtcctgaaactccctctgtagaccaggctggcctcgaactcagggatccacctgaccgctgcttctcaagtgctgggatcaaaggcgtgctctaccatgcctggcaggaaatgatttcattttaattgaattatttaattaattttaagttaattatttaattaaatttgggggctagagtggtgattcaggatttaagagggtttgctgctattctgggggcctgagttcagttctagcacacactgggccatctcacaaccacctaatttcagctccaagagatctgatcccctcatctgaactctgtgtgtgtcctcccccagtacatacatgtgtggcctacactcagtgcatacccatatccatacatgagaaaagtacagtttagacatcaaaaggatcaaggttttaatcacacaaatgtgttttagttataagtggaggttctaaaatatttataatttaaaatactcaccagatatattaaaatctttcattaagataagtgcttagaaaagtccctgtgagagctgggacagcatgtcacacattgagtagcaggttcacagtgctccatatgagataaacaacatgcatattgttcttagacaagtgagcttttccctgtgtgaggcagagtagcccaggctggccctagactcgccactgtatagggagtcctgtccccagtctcacggttctactagaataaatggcacatctttattattagaaaaattggaacagacaaaagaaatacaaacataacacatgaggattttgcttaaattggaatgtaggtttatttggggccacactaaccagaactgtagatttggggatctagaagaatgagtgcagtgaatgagttgcaggctctactgcagcctggtggagcaggtgaggtcagtgagagacatacataggtgctggaaggaaatgaccactgcagaccggctaggctggaggcctctcttgctctccacagccctcttgctaggctgccagccaaagcttcgatgtgacagcctctccgttagatcattagtgggagattggtgagagggtttcaaatgctgtgtaaagccttttgcctctgcaggtttttgttttgcttttgagacaggatttccctctgtacctcaggccgagagagcctgtggttccgcagcagcagcctcctgaatgctctcccactgtactgagcgccatgagaattccctgtccttccctctttctctctcttgaactattacaatgtatttaccaaaaagtgcagtatgaaagtgtgcttgcccagctttgagagtaaattaaaataggcagggatgtggatttccttgctgaccaatggccagcttgttccaaggctcgcaactccagggtatggtttcttcatattgtttctttgcctgtagctgccatctccatacattgatcggtcatgtgacaaagggaaagattcctcctagtactccttggatgcgtcagccccgtttaatttcactgatcatctttcatgcatgtatttcttgagcttagaaggcgggccttgcttgtgtgtttccttggtgggctctgagaagctttgagtggtgaatagagtttcttaactaaatgtctcttgatttgaaagagaaaccctagatacgttagtacatgcagagtatatttggctttataaacaaaaatatgtgaaagcacttaataatgtagatacgctgaattcttacaacacagaaacaaatggggcgctagtataggttgtcattattcttagaaaaataaaacttcttttgtttgcttttaaacctgttatgttttatttccaacaagatctgccagttctgttctgagaactgtctctcttcagaggggagctaagcagcagctatcccactatctccactatctccccatcccactaaggccctagtgaccagccagagtgtgctttcacccagtcctagtgaccagccagagtgtgctttcacccagtcctagtgaccagccagagtgtggtttcacccagtggggctttgagtttattgggttacttactgtggatgacaggttactggaaagacatgacagctgcactgagaagtctttagccagcacgagctctccctggctctgcagacttcctcctctcaggtctccacagcctatatactccagcccctcctctggaagggaatgccagctgtcaacacacccagctgtgatcgcttgcaaccagacacagctgaactattgatgatggagactttggccctgaggatggtaccgtccaccctgttcttcttttaactttataatgaacactgatagctctctggggttaaaacatgtatagactagagatgcagctcagtggtgtgcatggcaccctgagttcagtccatagcataaataatggagtgtaattacgtacattcgtgagggatactgatagtcacaagtaccttgtctttcctcttccccaaccaggttcctgggacatcctgcggcgaagcttctctatgcctacaaccccagcagggagagcgaggttgtggtgaactcagtgtttacagctgctagacatttccatgtgccgcctgtccattgcagggtgagtgctgatgagtctgactttctgctcagagcccccttctggccgtgtttccatttggttgcttgttggttgctttgtgtgtactttcccatccattttttttcatggttttggtagtgctggatacttgatggggaaaaatggcaagtttttcagtcaccttgaacttccttaagcttttaatgattttgattgccatgttgctccatgttaaaacattcacaaactaacgagagcaaggaaatgttaacagagaagccctaagtttggtctatgattggtttggtttatgcagataaacactgtccctggtttttagtaccatgtcaatatatttaataaaaaaaaaatctgcccatctgtacatcatcctctgtacttaaatagaaacagactgttaggtacagacaggtggacacgtgggtgaagcggagtgtagaaagtaaggcacacggctccaatctgcagtgagggaactgggcagttatttgccgtgattggcagctgctgttggagtgacagatgtcagtttggagaggctcggggcttcgtgatgctgataaaggatgcaggatgtgagcgaggagctgtttgcagtagtcaggagggaagaaaggctgtggctactttccaggtggctaacgaggtgctctcctctcaggtgattccagcaatgggaaaagcatccttcagagttattttcttacctaccgaagaagggagcatcgaaagctctttatttattaatacctcctcacacggagtcttctcctatcatgtgagtaccttcattttgccatagagcttgcctattgatttagagtatgactgtttttaaaggactcttggagagatttcctgccctttcatatccttaacctacagcctatagccatgctaagtctatcaacttccgggcttctgcttagtgggccacagaagaccttccctgcagcctgataagccctgggtctttgaagtgtgttagaatgaagccaaaacactgtttcatacagttttttagaacctagcaggctcctccctctcagacaggtgagaggggtactccatgggctgccccaagatttttgcctgcctcctcttgcagacgtgtttatggtcaggagacattgctgagtgtgtggctgtctattctgggaaagctccccgttcacatggctactgaaatcaagatactgggaagggcacagggaataccgttttgctggtgttcccagaacagggatcttaacctgtggtgcccggacatcctaaagatgtggtcccaggtaatttaagcatcaggatcacttgtttgtgcttagttctcattagattccattaaacacattggtcccacatcagaagagaagagttttgcattatgaggaccagttagggacttttgtagatggagacagatgtgttggtcagcaggtgtgtgtggataaggcatgctgacactgacagatgtgtgcttctcttgctttccacaggtatctggagtgggcactcgcagagtctctacagaagggtctgcggagcagctgccgaacgcatactttctgcttccacaggtccaaagtattcagctttcacagacacaggtcattataacagagctactttgaactaactggtagaatatgcacaacctgatctgcatggttttattagggttttactctattttgaaaagtcttgagatatggaaatagatgtatttaaagcgtcagtgaaagctatgcattcttctttccctttcctgtgtgtgtgtgtgtgtgtgtgtatgtttgtgtgcacgtgcgtgggtgttggtgtgggtgtgcatatgtgtgtatatacctgattccaggacttctttcatgctaggcaagtgctcttccgctgagtggtagccagccctccatacttcctaacagcccagtgctgcttattccacagtgccccgactccactgctgtcctaggaaatggatttgtttctttattttagctattgggctatgggctcatgattctgttttcctttttgtgcatccatttccttgcgtgtaacgtgatgatgaggctaagatagaccctgagctgtttcataggcttgttaagtttgactgactgctcaggaagacagacagaactactagagccaccagcaggacaagcttccaaaggtgttaccatccccttcctctccctccttcttgtcctgcctggttatgacttgcttttgttttggtattgtgaggtgagcttaccatgtatccctcacaggcctagaacttgttatgtagaccaacctggcttcaaactcagagatgtgcctgcctctgcctcctgagttctgagattaaaggcatgtaccaccacaccttgcaggaggaacactctttttctgtttcagtaatttcatacaattagaaattattttcaggcacatttcattagcagcttataggactggtcgctactttggtatttacctctcttttcccaattgagccatggtcatctgcttaaaacctcttagtgcatttctttctttttttttgagatttgtttattttatttatatgaatacattgtagctgtctttagacacaccagaagagggtatcagatcacattgagctaccatgtggctgctgggaattaaactcaggacctttggaagagcagtcagtgcttttaagcactgagccatctctccagccctagggcattctctcagatgttaacatatacgtagtccttggtacagtccttactctgtgtggccttgcattgggggttggggggagggtgagcccaggcccttgtgtatgaaaggcaggtgcggtgctcctgaggtgcagccccaggcttcagtcacattgcacaccacattcctctcctcctctgattgctcctggatgccatttaccttccaccaccgtcctttgcatctgcgagtttccccagcctctcctcctctcttctctagtctggccttatttttacctctttccgttcagagattttctaagactggtggaaggatgtctgtccctcccagcgtagctcatggtctctgttggaatgtagtggaacaatttttcttccctttagagcactcacgtcacaagtgggtaagtaagagggcttgctatgcaagcatgaggacctgatttcaaaacctccaaacccacatgagagccaggctgttgtctgggtgcttctaaccatgttgtcctgggaatagggacaggagtgtcacttggagttgctggccaccacctagcttccaggttctgtgagagatcccagtctcaattgaaagacaaggtgatgcaggacttctggcatcatcctctggcaaccaggctgtgtacatgggtgtgtacgtccatacctagacacgttctcctatagaacatgcgcacacacacacacaaaaccacataatgtaatcactgtctgagctttgccccatgctccgtgaaagcggtgagttctaattcagattttcaagaggctcccttcccctgagcaggtgggtgtagctgagatctctgagttgtcagtaggctctgtggctgtcctcgatgggctggtttctgctccctgccctgggatggccttgctgatagtgacttggcttttcttgatcctgctctagcagatacaggttgaacatctctaatatgaaatacagaacattaaaaaaactccacactgtttgagtgtggacatgatatccccagtgggaaatttcacacacaatctcatatacttacttacaactagaacacagacacaccaaaaatattctgtatataagctgtattatataatgtgtacgtgaaacataaataaattttatgtttagacctggattccttccctgatatatctcattacgtataagcaaatgtcccagaactcagaaagagcccacacctaaaatcttcctggtcttgtacattcgcaaaaggagagtttgacctgtgcttccctttctaccattttttctctttgcattttagcttattctgatacatattactgatgtctaagagacactgttaaaatctacccattgaaagacaacaatttcgtgtgcttcaggcaccggtagctgtttgtgaggggtgcagaaactgctgctccgttcgttataaaggaggaggtttttgttttgttttgtgaataagagagaaagagaacatcttgggatctctggaaaattccagagcagagagaaaacagattggacatgttccaggctagaacaatgaagatggtagaggtgacagagaggcagagaagagtgagccagagagagatgggagggtgagccagtgagagactcaagagtgagccagagagagacatggtagttgggagggatataaagagatccaggatctgaggtttgaagggccagaaaggctgatgcagagactctgaaaagtatgacaggtacttataagaaagcctggaagccagtgtggtcttagatgttctgatagccatcataggtatatgttaaaggacagctaaatgcctgttctttcagagtcaagagaaatggctcctttgggggaccggaacccaacccagttcacaaattcctgaagaatactggctttttgtctgccagaaatcctcctacagtccagtttaagctcatttatggatgtcatggactgcctgagacctgacagtagccactgcccttgtcttgtgtctgcacacttgacataaagaaaatgtcttttgtgattgtcatctgcctcttaaaactttccaagtttcagcgacatctttcctttctttaaattgctgaatagtatctgtgtatgggcaacatcacactatgtgtaactccatcagttcatttgagttgtttggttctgactgttttgaatattgttgctgtaggcatttgtttgcttacatcatgaagggaagtcagggcaggaacacaaggcaggaaactagagacaggaactgaagtagagatcatggaggaatgcctactgcttactggcttgctcttcatggcttgtacagcttgccttcttatacaacccaggaccagccaaagggcaacatcaagtgatagtggcctgagccttcccgcatcagtccttaatcaagcaaatttccccatagacttgcccatatgcagttctgattagggcaccttctcaatgagggtccctcttcccatgtaaacctaggtacatcaaattgacaaaaaacataaccagcatagatgcacacctaggagtacaattttgctaagtaatatattttaggagctgtcaaaacttttaaaaagtgcttacatcgttttatagtgccaccagcagtggtcatcagctttgccagcacttcttatctgcatctggtttcttttaaaaacaaacatcctaatgggcatgaagtcatttgatttgcatctccataaaggttaaatcaaagagcatcctttggtgtgatcattggaacttgggtatcatttctgaagtagtgtctatttatatagctggagagatgacttagtggttaagagcactgactgctcttccagaggtccttgagttcaattcccagcaaccacatgatggctaacagtcatctgtaatgggatctgatgctctctgttggtatgtctaaagacagctacagtatactcacactcataaaatgaataaataataaaaaaataagctttaaagaatgagttgttttatgtggtgtgaggtaggatgggactgtatgcatatagaccaggttggctttgaaatgccctatgtagccaaagatgacctagaccctctcatcctaccactacctcctgaacactggaatcacacatgtgcacatgtatatggtgctaggagcaagcctaaggcatgttgggcctggcttggccagctgccctacatccctccgccttttgctcattggaaaatgtgttggctttttagttgtaagccatagaagctctctgtcctagagagcaggacttttatccaaggtcatgatttttacatagtttctcccactctgtagactgtcttctttagatagtatcctttgaagtacaaaagatacagattttgataaaaatcccgtttatccccttttcacctttggttagttagttttagtatctcatttaaagattctcgaagatgatgacacttttatgttttagggttttgcagtttatctttgttcctgcccagtttgacttcagtcttgtgagtggtgtgaggaagacttcgtgctcattcttttgtatgatgtgctcaggtgcccattccatctgctgaaaggcagtgctcccacactatgtgatcctccttaaaggcagtgctcccacaccatgtgatcctccttaaaggcagtgctcccacaccatgtgatcctccttaaaggcagtgctcccacaccatgtgatcctccttaaaggcagtgctcccacaccatgtgatcctccttaaaggcagtgctcccacaccatgtgatcctccttaaaggcagtgctcccacaccatgtgatcctccttaaaggcagtgctcccacaccatgtgatcctccttaaaggcagtgctcccacaccgagtggtcctcatgccctttgtcgtcatttctcctctctgggctgtaggtttctcctttgcttttctctgtacagggatttgtggcttcattcaagtcagaccctcttggatgtagctctctccaaagtcagtcagtctgtccatcagtcagtagatagttcttgagtggtccagttagtacgtgggctgtgaatacactctgcagtaccccgactcttttgctgagtaggatttgaagtttgttgacagaactggtccttgtcagaaagcagcactgatgttaagttcagacatctgaaggcgtttttcagaagtcacgtatttcacggtctcttatctttgtcatggctaggaaaaaaaaatctcaaaatgtttacaagggcttattatatgctagaagtatataattttagaagtaaaatcctacaaaatttaagccaaagaagtaattatggaattcctaagagcatatccctagtgtaatatttctacactcaggctgttttcttgtgcgtccctgtgctccttgtgtttgtagccctcttgttgccagctctcctatcagagggaaagtctttcttctcagttctgtcctgggagctttacttctgctgacagtgctcacttggggtggagggtcgtgtgcaggatatcataattcctccaaagggttctagctctccggtgctcaaggcagagttgtgcattttttgtgggatcttgctagaaagtgtgctccatgcatagctaggagtaagatgtctagacagagacaagcgtatcatcagctttaaaatgatgtctgtttccactgtaagggagggagcttcattttgtttaaggagaaaggtggagttaagaaaagaaataaaattattttacgtgtaaattagactaagatgataagagtgatttaaaaatgttttcagtgaaacgagattcatagaatgtgtgtgtgcgcacacgctgcgagtgcatgcgcacccatgcatcttggggagtgtgtttctatgttaacgtgatcttgtgtacagggaagtgcaagctccttagctttattataatgcaaggccatccctagctagggtccagtggtctctccttccttggagctcctgagtctctcttccgagctaaccatccttcccagaaacaccacaccatccctctctacccactactcctcatgaggtctatcctagtctaagtgcgctagttccatattccaggcccagttcaaacacaagctcttctcagcattcccctgatcctcgttagccctgtgctgctctctgtggcatggcaccaggcccacaccctgttgtgatatgcccccctgctcttccggggactcacctagatcgatgccatcaggtccataccctgttgtgatatgtccccctgctcttccagggactcacctagatcgatggcatcgggtccctattgtgtaatgttcccccctgctcttcagggcccagttgccaccacttctagaatgtccatgccaactctctgtgtagtacactgaaggccctggagttttaaatagctaggtgagccaatgggaatttgagctgatctacaaatagcacctaagcagtcactccctccgagtgaggagctccacctttcagcgccgcctggctggccgaccttccagcagactgacccgaagcaggtgccattgttcttagtttagaaattgtggaacggactcagagttcaaatgactaggttggaggtcaagattagagctaggactgcaaatgacacctgagttgctttagtttttttcccccaaatgtagtaaatgtcataatgagtttcctctgtaatattcatgatgcaggaaagaaaatgccaataagtttttttggcaacatttttattatggcaacaaaaatagacagtttaaagctccacagtggaaaaaggacttgaccaattgaactgtcagcttagccgcatattagcgctccttccagactaagatttggaggcccacgtggaaatgtttgacaagcacgtaagcccaaggttgacagtgtgctcttatggtgtagctctggtggcagagcatgtaaatactatgttagcttgcaagaaagcagggactgattgatgcaaaggccatggagaggtgtcacttactggcttacttcctccaggaccacccacccagaggtgccactgcccccagtgagctgagccctcctatatcagttattaaccaggcacatgcctagcagacttgcctagaggcccgtctgatatgaggcatttcctcctttgaagtttccctttcccagatgacccctgccagcttgtgtcaagtcaacaaattaaaatatggttacattatcaccccctttcttctaaccctttcatgatctcttttccaaatttatgactgcctttgtcttactatggttatatacatataaatatacacataactgtatacatacaacctgctgagtctctttactgttgctcgtgtgtatatgttttcagagctgacctcctgctattgggtaaccagttagtgcctcatccctggggaagaccagctctcccttcttcagtggtactaactgcccatggctttttgtctaagggttgcaccccatgaaacatgtttttcaaaaacattttcttcaacaccttcgtagatctagactttgtagattctctcacacatagagaatgttttattgatttgtttggttgaggcaatgttcgaaacatgtgttgtctcattatccatcagttgtgtgaaaggctaaaggaacttgaagtttttgagcctctgtaaaatataaattgttacgaataaaattatgggaaagctagagaaattacaattaaagggaatctgtggcacacagttgtactgtgtgtacacacttgcacacgatgacacactaatttctaaaaagtatgttttcaagatattctgtgattgcaaaaattatgatttgtaacaaaacaagagaaacaaaccagaggagtgaaaagtaaagggtggggctgagggagggtggctttgatcatatgtgtgtgcgtgtgtgcatgcgtgtgtgcttgtgtgtgtgtgtgcgcgtgcatgcgcgcatgtgtgtgcatgcgtgtgtgcgtgagtgtgtatgtgagtatgtgtgtgagtgtgtaaaagcatcatactgaacgccactgacaaatgcaattaatacatcatagtaaaaaaaaaagtattacagcctggcagtggtggcacatgcctttaatcccagcccttgggaggcataggcaggaagatttctgagttcgaggccagcctggtctacagagtgagttccaggacagccagggtctatacagagaaacactgtcttgaaaaaccaaaagaaaaaaaaaagtattacaaagcaaagccatccttggtagaggtcaccatgattggtacttgttgtcttctgtagttttctaacttgcatgtggatgagggatgactctctgacagtgaccgtgttgctgtcctgtgtggtgagagagttctcgggtgtgtgatgtcataagacagccctgaccaggagtcagcctttgagaactggcacagcctttgctgtaggtgcacgatgtcaagcctcacacctgccaggaacaggggctggagcccggcgggagggtgtacaagtagttgctgttgtatggttaacttcctgggtgctgatcctgccagttcagtatgacagtgacatgggggagaggtaaaatcagtgcggggaggagacttgagagagactttccctcacagttagacaatggagaaagggagagggcacattttacttaataaaaaaaggtactgcaaaaacttatctaggatatggaagggaacatagaaaagtttaagggctccatagtagccctgatcttctgactgttgcacacagtaggggagggtcaggggtccccatagtggctgtgttctacggattgtcctgcatgattaggtgggtggatgagcagtttagataagggatgtttccccctactagattgtaacctgaatcaagctttatgtcctagctgagaaacgatgtggtctggcagtattatatgaagtaataattgaattcattaatagagaaataatcttaaggaattataagctgtttatgaaattatggccctcagttttttaaaacttctttcaaatagttattgtgttagaatactgtagaaggtcttctgttagaagtcttaaagctgccttgttgacactgttttctgaccagttctgaaccctgctgtatgtggagaatcaggccttagaaagctaagcatatttgggccaggcatgttggaggatgcctttatcccagcacccagaaagcagaactctgagttctggccagaccctacctcagaaatggtgggggtgggagggtggacagcatttcagctctacagagcccaaggttaagagtttgaggccaacctgtgctgcacagtgaacctcttgtctcaaacaatcaaacaaaaacaaaagaagaaagttgaacaaagaattaaaaattagagaaataaaaggacatcttagactatttgtatgacggaggcatgttctcctttatctcggattagttactatctctctgttaggttaggacacccgcgggagtggaggacatttatagctgaaggagactccctcacccaggcacagagaagggggaagctacagggtctccctttcaggactggatcctaatctgcactcgcaactaggagcccctgtgcctcataggaaggcagctgggctgagaagacaggcgagctgggaagggattcttggaacactcctggattcatagtcctgggccagttgtcaaacctggagctggagggagagagcagccctgtgcttctaccttcctgggcctgcccccaagcagcccctccccatgtcttttgtatttaaaaactgcactaggtgtgctgaagttgatgctgccaaacttaaacacttgtttccttctctgttctcatcccaagtcctcagctatggttcccctgtaatggcgtcacactgcagcattaagacactgctctctagggtggcttggcttaccccgtgatgtgtggtgctagtgggtaaagagaagaaccccccaaacctgatcgactgcacggtgatcatggttccggtggccttgacactcaactaacctgcctgtgcctcattctgtgaagtggtaatagcccttcctggtggaataggaaaagctcaagcggtgtaaagaacttagaaccagttcctaatacactgctaaaatccattcctcacgactttaagaacaggcttttaagataaaccttctattaagaaactgaaggaaaactttaaaatcagattcagtcttctggcaaggcatggaagttgaaggctatagacccatatcagttgatcttggcccatgagttcatagacaaagaatttgaagtccttccttattttgtcttggccagagagcttctccaggcctgtgtgcagctggggaacctttggcgtttacgtccagggctccctctcactgtattgtgtgtggctttcccagggtctctgtgctgacaaatgtttccatcctaaggttctcttgttattacaagattcctcaggaatatcagagcatcaaccttacatgcactgaaactggaagacatgttccccctgctctctagacacccattctaagcataattgttcccagtgtcctgcattgtctacgacagtaggaggatggacacagcacattgggttcttgggttgtttcaagcccaagacctttgcgcatactgcttgctgggcaggtatgcctgttggtcgtgaggctcatagggtgctgcggagttgagagtagccgcctatcaaggaacaggcatccgtgggcatagcaggattgctttcgtgctctaccactttgtgggtctgtttatttcttgtgtcttgttcatgatgctcaactgaattatgtccagactctgcagagtccctaggctgagatgtggggtgcgctagccttccgtcacttctcactgttgaccctggaggcttcagacctatttcttgaggtttcccttctgtgctgcctgcttgcagcagaagagctaccctcagcagattcctgaggggtgcaagagcccagattagggagccatcagccttgtgctctgtttcttcttggagcaaactctttacattgcaggggaagtgctttgcttccagtgtttttggctttgaccactcccactatgagctaggctctcagctctttttcacttaaaatagccagtaagtatgtttgctgcataagctggaggaactgaggtcaaatccccagcatcacaaatggttgtaaccctctgctgtaccaagatggagacaggcagatggcttgctgacagccggcatagctctagatacagtgtgtgactgtctcagaggaataaggtggggtgacaggacaggcacctgctgtctacctctggttctcacacatgtgccccaggccagcacacatgcatgcccacccccaacttttaaacaaactgaaaggaagaggagagaatgacttcgagtggtgtttccagcctgtgaacacttggttcccagcatgctgagccctgtcaaggcaaaagcagtgtattctggtgagccagcgtggaaggacaaaacagagttgttaaccttgtgttggccagggagcaaagactggagaaacagctagcggagccagaaaccccttcaagtgggaaggccaaattgtttgcataatggggccacttgcatttgggtagatccacctcattacctagaggttacctcactctagattgcttgcatttgtccttcaaggtttctggcaagtatgctgggtgaggggggggcatgtggttatcatccccccacctttgggctttgaactgattgttacattagatgaaaagaatttaaagtattttaggaacaacatatttcccttagaaactgaaggagtgaggaagaggagtccctcctcacagctgcagtgtgggagagccactttccacaaacatccaaattattgtggaactaaactaaggaagtgtgttaattgtgagtgaatacatagaagtaaactgcccctctcccctcctctgtgcccagtagtttgcacatgtgtctcactctagccagagtgaattcagtaactctctcctaaggatggaggtagggtcttaacagtaacgaggggatggctggggtttggttttgaaatgatacggattaaccctctttcttgagaacaaaacaaaaaactaagtccaagcagctcttcatttgttcatatgttttgtgagtgtatctggaaatataagtaagttttttgtttgtttgtttttgtttttttcctcttcctccatgggagggcagaaggtagtgatgaggattgaaacagaattactgtttaataccagggagacgcagccatgctgcccttcctgataactgagctgagctgtcatcaaacattgaacgacggctgtagcatctgagagtgcgcaaaggtcagggcccaggttagctctcatgttgtccaaggccatggctgtgcagacttagttgttacagcctcatgtgtttgggctgccagctggactatcccatggcctgtccagagcttgtgttcctactgatagggcatgctgacataaaagatttagcatctgaggctgtgaaaagcagctaagaagaataggttgtaaagttggggcttttcattggaaacctagtttcaagtactttgttcatgtggtctgggtgattctgcggactctcctggggattctgtggactgactctcatctggtgcctggctgttgttgatacaagtcatcaaaatgacttagggcttcaccactttatttcctatttcatcacacagtctcagaacttcacacgttgttcttaaatgtcttagccagtggaaggagatgacttctcagatcccagctcccagttccgtattctccttttaccacaaaccaccaggctctatacaaaagtagcttaaagcatttctgctttcttgagtgctgtatcttgaaatggcttttaaaatcttacgtctgtgctgccaaagttctatgtacctaggaagaataagctctgctaattctggtttacaaaaataacttctcccactagctggctggccctaggacctttgataagtcactggccctccacgctacatttcctccatgtctaaaagcgataatattaccattctttaagtaaagacttaatatatgttatactctaggttattaaagtaaaatggcacgtttcaaacatatagaattggttggttagttggttggttggttttctcaattgctcaggcactctggggtaggaggggacagtcttcctgttttgcttgctcttttgggttctttcagtggaatttgcagtattttcattgttgttccagatagtttgtattttggtaaaagtttctctgttaaagttaagattgtgagaaagagctgtcaacttttcaattttcttttgacaaatccacacagttcacaggcagtgtagacatactccagctcccccttgtggggttctgaaatataatctatcagaaggaaattacagtttgagtctccctaaatcataacttataaaattaatagtactctaaagattgaaaaatcttgagccccaacaggacaccacaaacgtgatagttcaatatacacaaatgtttttcattggcagaattactttaaaaatgtatgaccaaccaaagaaaacacatggtgggactcatggctctagctgcatatgtagcagaggatggcctagtcggtcatcaatgggaggagaggcccttggtcctgtgaaggctctgtgccccagcataggcaaatgccagggctaggaagcaggagtgggtgggttggtgagcaggaggaggggggatgggatagggggttttcagaggggaaaccaggaaaggggataacatttgaaatgtaaataaagaaaatatctaatacaaaaataatttgtgaaattatgtccaggctatatgtataaagcatttaagacataagtgaattttgtatttagacacaagtcccacccttaaaagagctaatggtatgtgagagagaatattccagagttaaacatttccttttttaagcccctagaatagagaagcacagaatcttgagtggtttctttatgttatgcttttactgagcacacaaatcttgcttaatttggcagattataaaaatcatctatgtgaaaacttaccaagaataacaacatcagcttgtaaatcatatgaggtcactgtgttcttaattatgtttaaattgtcattctgaacgctcaacattatttatccattcagagaaaagttagagggaaggaaactattttaaccaaaaacctagttccaagcagctcttcatctgtgcacatgttttcccagttgtgtggtgtctgtggactgcacaccctctgtcagttcgccagccatatatcaactccctccttaggcagaacatggagttgagtgcttatgatctactgaagaaggtagacctgaccaaattgttaccgtgcaagtgaggaacgttagaaagagttaggtagcaggtgtccctgtgtagtgatgggtggctgctcaggtatggcttctgagggtatttacgctgaggcaaattagatagcaagtaggggatggtggtaggcaggctagcaagtgggttcactctacaggaacagcagtttcaaagataccaactagagcagtgtagccagtgtggacatgggggccttgatcttgcagttctcttgcctccacctccacatggtaggtgccggccatcgtgtctggcttgtgaactcaccctttgtggagggagagtggagtggaaagggtacagggaggaagttagcacaccgcaagtttctctctcaattactgtggctagtgtagttatttatttaggctctgtactcagcgaggctggcactcagcatcaatatggtgcagagctgacaaagtgcagaaagtaaagtgcccagctgtgttccaggaaagcctcattcgcagaaacaggcagaagactggagttaggctggggacacggttcaccatcctagagctgcatggtttggggggatggaggaggccagtgtaactggctataatggaggctcagacggtgaagtgaagtggacttctcaggtgtgaataatgccagggctgctggtggtgctaagatgatgagtggtttaggacctccatgtgcagcaaggtgcccagcttgttgcagagctcccttgggtggaggacgaaagtgtaagaaacgcagcacccagatcaaccatgactgatggtcgggagacagaagcagggaaatagagagaagcaggctgtttcatgtctttggtgcagggatttgttcatagttttactttgagaggttgtttggagtttgtattgggagtatggatacccatgtactcttggctgaagagtgattcttctctctctggtccatatcttgaatgagaaatggtctctgtctatacagtgctactgtgtatcgcatgcgcagcttcaggagggcgcacggagggagaacagactccttaaccattcaccagccagatcacaatggcccttgaagatcagtggggcagatgtagccagcaggctgccctggcaacctcatagcactgctctgctttagacagagtagaatattatttactagcagtaattttgtaagtctttgttggatttcacgtatatgctcaaggcatcttgaatactttgtactatacttaaacatgtaatatactttattatttttttctgcacttcagttggtatgaatgagaaccaaagtaattcattttagtactgagggatgaatcagtgggtccaggtccctaaatatcaaaaatcctctgctttccctttgagtcatagcctgatccctaaaatgcatccttaggtttagggaagtgattctgcttagccgtggctcgcctggcatcaggtactcatacatagttaagcaagctttcccagtgctcagactctggctcctgggctgaatatgtttcttttgtaatgactgtgacagagaccttgtgcaggagaatctgccaaaggccatgtttctgagatttgtgtgctgtgctaacttcactgtctcctcttatgtatgcagccccaccccaacctggacgatggtatccctccttgattgggttgttctcgtcttctccttgaagttctatgaaagatggctgagatctttgaacttgacagagtcctgcattctttccttatacttctgtcttccatccatagccctttcatgtgttaaaaatggcaggcagttgacatttggacatctgtttttgaagtttctgtcagagtccacgtcatggcttctagtggtcattgaattgaaagaaggtatacattgaaaagcaaaacaagcaagcaaacaatccaggaagttgattgggtataatagtgcatacttgtaatcttagcatttaggcctatgaggcaggatgatcttatggacactcggctgtactgtgagacctggtttcaaaaatcaaaccaggctggggctggagtgttgtgaatgggcctggtgctgtttgtattttgatgctaattctgttctcctaggaggggttgcagacaaggagtgagtcatatactcaggtgacttcttgtgaaccaaccccctactgaataaaggagccaatcactgagcgagtaggagggacttctgggttggacagaggaagagagaaacaggagagagttagttctttttggatggggatagcttgaacaaaatgtagctacaagtgtctcctggtttcaatggcagatcagtcaggatttgacacctggatttggatttaaaacaaggcttatgagattaggatttcattgttgcacccagctattaagttacgattgttcctgaattaagtttgtatggtgttttgcttcacacagcagtttttcttggttcaagagagaaaggtatggctggcaaagtgtgggtttgcctgatgtgcaacacaaaggccgtgggggatttgaagcatggggctggcatgttagtgactggccagtgagaacctagcaagcagggtggagagattttggagctctgagtcagagcgtgactgctggggctaagagtagcagggtgtagcataggaacttgctgttccttttaatatttcttgcaacactggagagatggcttgatggctaagaatacttgttgctcttgcagagtacctcattttggtttccagcactcttgcacggaggcccacaatggcctgtaactccagtttcaaagaatctattgccctcttctgaccttctcagacactagtacacacacacacacacacacctttaaaaaaagcaaaaaatagtcaataggttattaatgggtaaccccactttaaaataaaagtgtagttctttgtttttaaccaaatactaaacacacccaagacagtatacatgggatatacatactcttgcttcctgccttactaggaactttcattccttccttgagagtgtacgcctactgacaacagaatatatttccagtacagcatagcatgcagcagtcagtagctgtttggaactcactgtatgaatgactcgctcttaggactggatgatgcttggggcctccacctaagtttccttccttctatcttttaggcagagaccactaataccagcctgctgcgggtgcaactggaatgcagtttacataataaagtgtgtcagcaattgaaggtataacaatatttagcagatctcagttttctttcctgcctcttaaaaatcaaaatgaaaactgcagtgtattctcatcctaaataggctcttgcctcgactgttttcttttctccagcaatatgcagtcttagagctcagatgatttttgttttgttctgttttgttttgtttttgagtttttctcctttccccacgcctcccatttcagagttgctctctgggatctgatgatgcgctacacttggagatgaacatcattgtagcagtggaaaactcctccaagcaacctgaagagaacactcaagccctgctagatcacctctctattgtctatgtagctactgatgagtctgacacctcaggtgaggtggggctttacagtttctgttgtgggactagctcagtcgagtgtgcactgggtcctgcctcatccataaaactgaagctacaaactttcttgcagcatggccaggtttccctgagtcattatttggttctttcagagactcaaggcagcctctgcttggggtcgattgcagcaggcactgcttctcagtctgcagctgccctgcctgcaccacttcagggaggctaagtaaccacagctctctgagtctccttgggaatcatttttcttggcattttgcacagatggaatggacttgactgcctaaaataaatgttcacgaagggtttgaagtccgagtcttgctccagagttactgagttgcagaagctcagttgaccagatcatgctgtttctttcgtattcttagtagccaatagctggttgtttctggatgtttgacaacttggaggagaattctttggaaatgtgtatcctacttactagaaatagcctattttggcagtctagcttttgaagaacacttgcaggagatacatgctgtctgatgtatgagatgcagactatgccatttgctgttataacagctgtgttcacatgtgtatttattactcattccaaaaaagatgaacacagtgatacaggaaagcatagttactcatcaacagtcagcagggtcatgcgtgcagggccctctccttcctcccctgctaccagtctcctgctcgggactgaacctatgacttcccatgtgcatcattgcactctacagttttaattgttgagcaaacatcatttacctccagcatgtagaattggatgtagtatcagtgcatgtagaattggatgtagtatcagtggccagaactcccctgccctttggtttacagtttgttcggtttttttaatgtccaggtgggtacccagactgagaaagacccccgtccctgggaaacacatttagatgatggataaagcagagcctgccttgctccaagatgctagagtttcattcctagcaacacattcatctagagtgtgttgctttaagtaaggaaacacaaggctatccagatgactgtagagcatagcgttgcttaaaactatctagttggttactgtcattcaaagagagcatagtatgtttctgtcagcagtgaaaaccttgttcaggaaattttatatatatatatatatatatatatatacacacacacacacacacacacacacacacacacacacacaccttcctaagactcaaagacccatcccaggtacataaaactctgtctttgatccccagcattgaactcatccctgcatgcgtcccagaagataccaaagagaacgtattttccattcaagttcagtgttgtaaagatgttttcctctttttagaaatgtatactgtgtttaattgtggagagtctatggctttttgtaaacctcattgctctgattcttttggacagatgaatctgcagtaaatatgtatgtactgcattcaggaaacagccttatttggatacaggtaattgctgagttgcgcctaaagtaatttgaaattacaaatgtgcattttgctgcaggtccttagggattctgaggagcagaggcctttgtgtttattttcttttgctgtcatttaaacccactgtcccttgattgagcaccctgtttgtgtgaagactgtcagcgcccctttctgctgttgcgacacggctgctgagcagttgctgggaattttactaagtgttgttttctgatgttctcccagttgagaggaataactcagacttattgcttgttgttgcaggatatacatcatttctcacagaaaaatgtcctgtctctgcagtttgaaccagtactgctctctacttccacgacaaacttcacaaaaatcgcctcgtttacttgcaaaggtactcagttaagagcgggatgctcctgagctccgcagctggagttggcagtttcactcagggtagttccggctgcaggcgaggcacagtttcaagaagatgagtaggttttgttcctgtaaaccaaagccattggtgtaatctaaagtggctgtggatgcctcctgtattttgtcatgtctataggattttaagtttcaagctttacttggtagtgactgtctgcagttcggtatgtgtattctgttgctttcctagggagcagagtcgcagggccgctgttctgttcagtttacttgctagaatgtgatggtgaatgttcatagtgagtttatatccagtcctaattcatgcagtgttctttaaaaagaattcccctggatctaattgcagggaaacatacccaaactcattcatatttaaagaacttcaatttaaagcaacaagagagatgtaacttattgtagagatcgtggtggcgcacgcctttaatcccagcactcgggaggcagaggcaggcggatttctgagttcaaggccagcctggtctacaaagtgagttccaggacagctagggctacacagagaaaccctgtctcgaacccccccccccccaaaaaaaaagataagaattaaaaattcgttagtattctgtttttaataatgaggaaggaaaaaaatgtgtgtatgttttagctgagaactgatgcaggctgttgagaaggaaattgattaatcttgatgaaaattgtaaatgctttagtccttacctctgttttagcagtgtaccctacagacatttgtgttttcacatctgtccctatgccaggcatggtggcatgtgcctgtagttagttactgtggtagcggagacaggaagatcgattaagcccaaggaattggaggccagctatggcacctccttctcaaaaaagtcaaagcctataagcagaaacgggttgacagcagagcagcctaatcgccctcttgagtccctatatggatgcactgtgcagcctctaggagacgtccatacacacactgcagtcagaatgcagacattaggtgtttaatgggctctgaatgtccctgagcacacatagcatgcctgcaagagtgttcaagacagcactggggtttgctgtgtgaagtaactgagaagtgggctgaaggctgactctacttcggtgggtttttgttaatgtttgaattttgtttggaaccacgtgtactttaagtagaagcagttagaatagtgtgagttaagaaatcagcagcagtgatttgataccaagatgtggatcagacgcagcctggaaatggcgtttgtgtaagcacacttgtgttcctctgggctgtttggatctcagtctctctcagtcctccccaaactcttctttactccgcccagtgggctgctctctcctccctactgagctaaggccctccctcgcatctgtatggaagacagcctcaaaggagaagcttcaaagtcaggactccctgaaggaactgagaggctggttaggaagaagggagggaagggtgtagctgctgtaattccagatgaccgttaacaactggccaggaagaaaactgggaacaaaaaggaagctgtttgtctctgtgcttagcttaagctagcttaatggacacagcaaaggcaactaaaatatacaaactgtctcatttctattcaggtttaatgaaaagaaagatactaatttcacatttatttctccgtacccatagcaggtacctcgtgtgacagtggaatcatgggcctgaggaaaaaaaaagctagcccagcaatgcaagcctgcctgtcctctcctgtggtgcaggggtaggtgggacctgccttctcctgaaccccagttttcagtttgctattacagggttttttttttgtttgtttacttgtttgtttttgttgctgttttattgttatgtagcaatgctttaaaagtgtgactgttgttactgcatgacttcctggactggcatctcctcgagttatcaaaatggagaagagaggttaaatgattcactgggggagggggctaggtttgaaccaggtaatcagaagaaattgctcctgtggtatttcctgagttgtattgggatcctagttttgccctggtcatggtcaccgcagccttgcctacattgctctgtgggcaagccaggaggctgagggagatgctgttgatagtaatgactatcaacagggatgttttctgcgctcatgtcctcagttagaggctctacagaggacagagagctgtgcttcgtgcagggctggtcacatgcatgccttttcttcacaggtatttcagaacggatgcctctacagcccagtttcacatagagagtcacgagactgcaacaggagtctggtcaatatggtaccgcagccattttgaccagagcattgtattaaaagatgtgtttgtttccaaggagaccaagcacattttaaaggtatgcacagtgccttttcttcaacctttagcctagtttaagctttgtttaatatcatgctatgaaaccagtatctataacacctaattctggttttaaaattttaaagcaaatatagtttgtttttaacattttatagttgcttttagttcagttgtggctatctgtactttcttctctcagaataagcagtgtttatgattaagatatgtggcttgacaaaagtactttaagatttctgctgtgagatttaaaatactatctattgaaaagtaaactttgtttaaaatcataaatatttgatctgtaacaaatggaacttctaatttctaaaccatagagcaaatttaccattctactatcatgagtttagtcatagcgagtgcgaggaagcaacttctcctgcttcttttctttgcaggttctgagtttccgaggccctttatttctacccccaggctgttggaatatattttctctgaagcttgctgttaaaggcattgtcttaaacctgttcaccaatgtatttctgactacaaacacaggtgccatttttgcaatacctctgcagattttctcggccccaaccaaggtattgtgcccaatgccatgtactgtagtgccatttagcagtcagagttgccttgtgtcccctgtgctaagttcttctttaagactatctaagaaatgtaagatactaccaagccagtcttacgtggtagacttgcttagatgtgaaatcttgatttagagaggttatttttctcaggaagtagtgattatttaataaaatacgtcatcatcagaagattgatcagtttccttcctctgtgctgctgaggagcaagcccaggggcctgcgttgccaggcagaggctcctgtctgtctccaggcagaggctcctgtctgtctccaggcagaggctcctgtctcctgtccccaaagctggaaaatagcatttgcttaccatagaaagtacaggtgaacttgtagtacatgtttattgggacttcagtttaaatcagtttattaggtgttttaaattgatttaagtggttcttagttgttcagtctgaagcctaaaaggttatgagggaattcttcctaattatctgggcaaattgtgttctatttagattattttaagcatgtctcattttttcttaatgtttattttcatttagttactgcttcctttgagccaagctattctgtataacactgagttctgatttttcacaatgagacattcatgcaatcatctttatggttttttttcctcacttattagtgttgatgttttacagttagaaatgcctcacccttagctgagggtgttaaggtaggacttgacacacctattcagtaagagtatgagggtcattcatttagtcatattttgagcagaagggatttcctaaaaaatatctatttccaatttccaatcaagagatgcgtataagaacagtgactaaagaggtggggcaggagcagatggaagtaggacataagcactctccagacctggaggaggccgctgcaagttagcaagtctggcatagcctgtctagaagaggagaggagagttacagacaagcagaatccagacccaccagcaatggtctgcgtctgattcccatggtagcttgatgtcttgtgggtccaccggttgtagtctagtcactgacggttgtacagaagccactgtaagttgttattgtagacactgatgattgtccagagggcatggtagtgactctgggcggctcagcccagacacctcagagctgacaaagggataaagaaattgcttcttagttgtttggcttctggttaaaggggagtcctttgaggtagaggccaatgtccgctttgtatcttagtgtttaggatttgtatgctgagtgttgtgttgtaagttattcatatgttacttttcaatctaggaagggagtctgggttttgaagtgctagcacattgtggcatgcattatttcatgggaaagtcaaaaacaggtaagtggtttgctttagggtctctgtagcactgcagttcggggggactggaaagcactcaaagaagttagcgtttggagatggaatgaattaataattaatcctgttaaagtgattgcgtcatactggatgctgagagaacgtgatcattgacagtcagaatgacctgaaattgttggtcaccctccagactcaggaggggtccttggagaagcaagcatgtcctctttttcttatgtagcttgtgcttttgtgagagattacaaagtaatactgtttggtcgtaacggccttatcaccaggaaaaactgggcatcggggattcttctctgaaagctgatagaagtcagacattgggaactgcatctgcagtctctatgcatcagcaggggcctggtgtggcatgagaacggaggcctggatacttgagttggaagatgttcctgggttttggtttatttttatttttgtattttgacttactgagatttctgatgtaaggagagttatagcataaacttagcctttgggaaaaccccctttttctccccagcatcccagttagacaggctagggcagatgtatggaggtgacgtaatcatagcccagttggtgaagatgtgttgtagaggaccaagcccctggcctgggcccgcttttgagaaccactgtttgtccctccacatctcaggcccacatagtaccctgagagatgcagcgggccaccggtgtttccatggatgcagctgtgcactttagatccatgattttgaaaatgctgctcacatatttttgatttgtctcaggctgcatcatgagccatgtgtcttttacgttattgccttcacatgatttgctttagtttagttttgtttttttacatgtttgtttaatttgatgttctcatgtgtcatgagttagcagggccttgggggggagctacagatgttaccctctccactgtcctcatagtttgtgaagtttggccagcccttggcattacttactaacttaattgtacgttgtaaatctaagttttgaatttgatctaacttttagaaaatcctaattgggaaagaagcctttctctggatcggtccacctgggacatggattctgaacttgcaaataagctgtatgaaagatggaagaaatataaaagtggcgatgcttgcaggtacgttcctgctcagcagggagcagtcaccgctccacagcccagtatgctccagactgttagggactggccaagctggcaagcctctgacgctctggcagcgcgtcacagtgggtcttcctcagctgttcctcggccagttgctcatcagctgttaagacttttcagttttctgtattatttctgggtttatgcatgtgtgcatggtcactgaccttattatttttttttttcctgagctgtttgaaaataagcagtgaatgtcctcccggagccctcagttccgtattggggaagtctttccagccaccgcactgaggctctcaggactccattaggaaaggaccggagagtactcttttgtgtaacgttagcacttcagccagcagttggacaataatctatcatatgcagttcatactaaaagtcccttataatacctgttgcaggaccctcacccccacccccaccctgttttcctttgttttaattcaggatcattcagggctataccttcttgttttatttctgtaccttacagaatagagccacatctgtcttcagtttttatcatgttgacgaacttttgagtctaggctggttgtcttatagaaaaatcccacactgtggggttcctcaagtttacatctattttacggagactactgagtccctgctggtgttgtgttgttatggctatgccacatcaggaagctacacagatgtctttctgtccagtggcatcgttaatttacagcatttgctttaggcaatgcacttggcaattcagtagtctgatatataaacgtgctggtccctaagaccgcatcatggctgtagtgttcatggacaagctgtgtgtcagtggatagtgactgaagtgggaaggctgaggattagttcatgtgggccccctttgttaccacatactgtgcttttaaagccacctttgagcatcaccatagtttccaatttatgtgtgtactttatttctgtcatcatttgtcagtttgcgagtgggatacgtgtgtgagagtgtatgtgtacacacctgttcacatatgcaaaacatgtgtgagagtatatgtgtacacacctgttcacatatgcagaacatgaggaagatgtggtagagtagtgtcttctgtctctctccacctttccccttgagacagtctctcactgaacttagaggtcatcatgttttggtactcagagccccaggtgtgcttttgcaatgcccagcggcttctgcggctgccaagaatccaaacttagtccctcacactcagcatgcactctgccgaacctcctcccctaccccatcattattagttttgatggtgaattccaagttcactgtagctgtccttcagggcagttgtgtgtctctgatgtggtgccaaaatagcagccattctctgaacacttgcttgctttctagtaaaacaggtttttctgtttgagtgtgtgtgcttatgtgtgcttgtgtatgtgtttaatgtcagacattgaacctggggcgtgtagaacatgtgctcagctccggatgacatcaccaggcctctaggatcagttgaatactctgtctttccaaattctaccgttttccaagagttctgttccttatagggggtatttagaatctccttcttcctcttccccctgaatgttgaggtggtttttcataagcacttattatgactattcttttttctttgtcaattacacagaagaaatgttttgggaatggctcagtttgcatttacaaagaaatccaaggagacagagccgtttgtctcctttttgcctcgtgtggtcccggaacccaaccttgtgttgaacttcagtgccaccgccctcaggaacagtgcggtaaggatagtgcagctgggtgcctttgtcagtgacgccaagcctgtggctttcaggtccttatacctggaagtttgttttagaagaaattaattgaaattcacacatgatcaccaatgatcatgacactgaatagggatctcacagggacaagaggaggaactaagttcacatccctcgaacagagaaatgttgattggatgtgagctttgtaagacagtgtctgagaggagcgagcattcaacatttggaagacaccagctgaaataggtttctgtgtcgttgagagatgctgagccgaaggaaatctagagggagccaggttgctctgtgatgccacctgggctgttgagtcatctttagtgtgttggctttccccctcatgggcttgtgtctcctagtctgggtgacaggacaaggcaaaggagaacacgctgaggacagtgcataccaagtcagagttcacactgccctgtgctcactgaggctcccttgctgctatttggcttaacttttaagttcaagaaggaatgcccaactgccccttacaggattcattacatgtttatgtttatttatttaactgtgcacgcatgagtgtccagtggccatcagagggctactctcgggagtgaattctgtcttttcaccatgtgatattaaactgactctatgaggcttgatgacaagcatcttcgccccaagagtcctcagtgtttaatgtgccacacatttctggccattcctcctctcctctgacaaatgtgtggcttggtgaagcactcactggctgttagacattgggctgttcctcctctgactgactgtatgctcttttggcaggaatatttaagaggttgctatgttaaccctcctctcctcacatctaggtgaagtactttgtggtgaggaacccgactccccagcctgtctccctgcagttgctgcctctctccctatacccgaggcctgaagccgcagtgcgcctgctccacaaatggtaggaagctgcccgccctgcacaggcctttgggaatcactgctaagactcagtttctcccatgctttgtgtggtggcacagtggaacccatcggcctaagtacctgggagcctagtcccttgaggcatgtggcttgagggaaatcttggtattgttttgtgtggcaccttctttgtcactgtgcctggtctatcattcaatggaacattctcttcttgaactaaagaaactatcacaatttttcatatatacttgtaagttgagaatcttaaattcagatgatctttggaagcacaggaagtgggtttaaagacaggcacagggaaacctgcctataatctactactttaagaggctgagacgggagggccatgagtttgagactagcttggacaacagagtggtgcacctgtctccagaacaagaagtgcgttgagttccgcgctaacaggatgagagggtgaaacatgacctctgcctgcaacaccgctagagcagagctgtaggtgtatttgggatgttctcctcttggctaggaaactgggtggcaaactcggtcttgggatttctcagctgttgccctgttgacacttcatcacagatgctgccttttagaggaagcagggaccaaaccgctggtttctgctcacttggggccagcaaggcttccccagccgtgttaaccagtgtgtccagatcctgccagttctcacaggcatgaagctgccattggttgagagtcgctcactctcctagtaaagccaaggggatgcaacagcactgttttctatgtagatctctgtggggtttttgtattctgggccgcctacgtcatgcattgagcagtacttacctggccctgacagctgcaagtaggcgtggagagggctgaggtggatcggctgtaggatgaggtcaagagttgggagtaagtgtgtggtgagctcatatgtgttactctgttgctgatctcaatgctggtttgaacgctggagtttttggttttgtttgtaggtttggcacagatatgcagatggttaatctctcaactggtgaattccagctcacgcaagcttgcccttaccaggtaggaggacattttcagacattgaatacactgacttgctagctgcagaaacacttggccttagcactgttttctggtgtctgtgtgttctaggttggctcttattttccttctctgggcatgaagcatatgcaacagggcttgtttgtttgtttgtttgtttgtttttaattacatggtgctatcggattagtttagcctgtgcatcattttaatgtgatggattagattcatacacaagaagaaagaccaactgaatcacaactatgaaaacaaaacaaaatacaactaataatctaagaattaatttctaaatctcttagaatcccttagcattcctttttagtgctttataagga

SEQ ID NO: 144 - DNA, 794 bp, Mus musculus
ggcggccgcggcgccaccaagcaagagaacaagatcgctgcgagcgagcgcggcgagcaccagcatggcggggctccggcgcccgcagtccggcgcctaccgccgcacggccgctgccgtgaaccttctgctgggcgtcttccaggtcctgctgtcctgctgccgtccgggaggggctcagggacaagcgtttgagcccttgccgaacgtggtggagctgtggcaggcagaagaaggggaactcctgctgcccactcagggtgattctgaagaggatatggaggagccttctcaagaacagagcttctcagataaactgttcattggaaaaggcttacattttcagccgtcagttctagattttggaatacagttcctgggacatcctgcggcgaagcttctctatgcctacaaccccagcagggagagcgaggttgtggtgaactcagtgtttacagctgctagacatttccatgtgccgcctgtccattgcagggtatctggagtgggcactcgcagagtctctacagaagggtctgcggagcagctgccgaacgcatactttctgcttccacaggtccaaagtattcagctttcacagacacaggcagagaccactaataccagcctgctgcgggtgcaactggaatgcagtttacataataaagtgtgtcagcaattgaaggatatacatcatttctcacagaaaaatgtcctgtctctgcagtttgaaccagtactgctctctacttccacgacaaacttcacaaaaatcgcctcgtttacttgcaaag

SEQ ID NO: 145 - protein, 265 aa, Mus musculus
  VARIANT (1)...(265): Xaa = Any Amino Acid
AAAAPPSKRTRSLRASAASTSMAGLRRPQSGAYRRTAAAVNLLLGVFQVLLSCCRPGGAQGQAFEPLPNVVELWQAEEGELLLPTQGDSEEDMEEPSQEQSFSDKLFIGKGLHFQPSVLDFGIQFLGHPAAKLLYAYNPSRESEVVVNSVFTAARHFHVPPVHCRVSGVGTRRVSTEGSAEQLPNAYFLLPQVQSIQLSQTQAETTNTSLLRVQLECSLHNKVCQQLKDIHHFSQKNVLSLQFEPVLLSTSTTNFTKIASFTCKX

SEQ ID NO: 146 - DNA, 138837 bp, Homo sapiens
  misc_feature (1)...(138837): n = A,T,C or G
ttactagattttgtactgcccttaatttatcaactggagatgatattgcgggggggtatttttgtttgtttgtttgtttgtttgttttttaagacggagtcttgctctgtcacccaggctggagtgcagtggcgtgatctcggctcactgcaagctccgcctcccgggttcatgccattctcctgcctcagcctcccgagtagctgggactacaggcgcccgccaccacacccggctaattttttgtattttttttagtagagactgggtttcaccatgttggccaggatggtctcgatctcttgacctcgtgatccatccgccttggcctcccaaagtgctgggattacaggcgtggggcaccgcgcccggctttgcggcggggtatgttttatagctatatgtcacaatagtaacttacttttttgtgtgtgtgtgagacggagtttcgctcgttgcccaggctggagtgcagtggcgtgatctcggttgacggcaacttccgcctcccagattcaagcaattctcctgcctcagcctcccaagtagctgggactacaggcatgcaccaccacacccggttaattttgtatttttagtagagacggggtttctccatgttggccaggctggatcccgacctcaggtgatccacccacttcagtctctcaaagtgctgagattgcaggcgttagccactgcgcccggccagtaacttaatgactatagccgggccttcatagatttttctacctatgagcatcctaaaataagtagaattaaaacattaaaaaaaaggaagtttcaaagtgtgttcctgcttctttgtctttagagacagtacggcacaatgaagttggaggtcaattttaactctggattggctacctacccctctcagtctcagtttctaacatgtaaaataaggacagtaacatgattcctattagatttttgtggggtttacataagacatgcatgcaaagtaagtgctcagtgactgttctcccttttccttacacataagaaatactttgtttgtttgcttgtttgtttgttttgagacggggtcccactttgttgcccaagctggagtgcagtggcagcattattgctcactgcagccttgacctcacaggctcaagaggggcgagggtagaagtttggatttcattctaatcgtatagaaaaccactggagggttgtatacgtaatctgaattgtatttttaaaagatcattttggcacttataaaattgagatataaggggcaagagtagaagcaaggagaccactagaaggcaactataggagtctatgtgagaaattagttcttctttttttttttttggagatggagtcttgctctgtcaccctggctggagtgcagtggtacaatcttggctcactgcaatttctgcctcctgggttcaagcgactctcctgcctcagcctcctgagtagctgggattacaggcatgcaccagcacgcctggttaattttcatatttttagtagagatgggggtttcaccatgttggccaggctggtcttgaattcctggcctcaagtgatctgcctgctttggtctcccaaagtgctgggattacaggcgtgagccacggtgcccgaccaagaaatgagttcttagatcagggtagtgatgaagaaaaaggctaggtatgggaaacagtgtgggggagggcaccataggattaattgatagatttaaaggctgtgaaggaaagaggaattaaatatgactccttggccttctttttttctttttttttttttttgagatggagtctcgccctgtcgcccaggctggagtgcaatggcacggtctcagctcactgcaacctctgcctcctgggttcaagcgattcttctgccccagcctcccaagtagctgggattccaggtgcgtgccaccacgcccagctaagtttttgtagctttagtagagatggggtttcaccatgttggccaggctggtctcgaactcttgacctcgtgatccatccaccttggcctcccaaagtgctaggattacaggcttgagccaccgcgcccggcctgactccttggctttttaaagaaaatgattgttagtttttttagagatgcgggtcttgctctttgtccaggctggtctcaaactcttgggcttaagccatcctcctgcctcagccttctgagtagctgagactacagacgtgcaccaccatgccctgctgactctttgacttttggcttgagcaactaggtaggtagtggtgttgttgacttgaagttagaaagactggggatttaacagctttggaaaggcggaatcaagagttttggacctgttagggtttaagatgcttattactgtttagaagagatacacttaaatagacaagtttggttaaaagtataataacaggatgggaaaatatattacaagcacgcaccatagaattcagaggaaaaaaccttattggatatttgtgtgcggaaattcaggtcagggctaaaagtataatttgagactgtatcagtctgttttcattgctcaagtcaatacctgaggctgggtaatttataaagaaaaagaggtttaattgacttaaggtactgcaggctgtacagaaagcatggcaccagaatctgcttccagtgaaggcctcaggaagcttccaatcatggcagaaggcaaaggggaagcaggcatgtcacatggggagagcaggagcaagagagagagggaggaagtgccaggctcttttaaacaaccgtgtgaactaacagagatggggagggcaccaagctattcatgaggaatctacccccatgacccaaacacctcttaccatcttcatcccacctctaacaatggggatcacatttcaacatgagatttggagaggacaaatatccaaaccatatcagggatagtatttaaagacacagggctagctgagtgaatccagagaaagaataaagagtgtcaaggaccaagacctgaggtactcttacttttagagattggccttaggaggaaaaggcaagaaagcagactgaggaggtagggggaaatgatcacagatggtatccagagctataggtggcacatgccaggagtgccgttggcatacacttaaggtgacggtcctggtaatagcagattgtccttggaagaataaactaatttactaactaataagcaaggctgggtgtggtggctcatggctgtaatcccagcactttgggaggccgaggcaggtggatcgcctgaggtcaggaggagaccagcctggccaacgtggtgaaactccgtctctactaaaaatgcaaaaattagccaggcatggtggtgggcgcctgtaatcccagctacttgggaggctgaggtaggagaatcgcttgaacccgggagacggaggttgcagtgagccgagatcacaccattgcactccagcctgggtgacagagcaagactctgtctcaaaaaaaaaaaaaaaaacaaaaaaaaaaaagcactgtttctctgcagatatctaatcggtacttttagtactttgatttattttgctaatttaattgacataaaatgtttgtttttacttgcagttgtaaaataaactaagcactatttgctatttgtctcatatgcacattctgttaacatcattgagactggtttttgttaatgatcattgtttacattcatttttgttttgattgacctttttttttttctgtcacttgggaatatttctggctgaaagtaacagaaaacttgaccatagaaagggttacttttgcttataaaacaagatgactaaaagcagtctacaattccataattccaccaaggatccacatgtttcctgcctttccaatctaccatcctcagcatgtaactttcttcatcaggcttgcctgatggctgacatcaggcatcaggctctgggcctgatggctctgggcatcgcatctgtgttccagcaggaagaaggacacggagcaaaaggcttgtgttagtctattccttttcatcaggaaaacaacagctttccttgaatccaacctagtagaagtctacttatatttcattgaccagaactaggccacatagccatgccaagatgcaagggaggctgggaaggtgactgttttcttctcattcatctatcattcattcaatcatagttaaatatttagcaggaccacacccaaggcatcatatataaaccacattctagctttcttaaacaattttttcttagggctctgttccgttccattggtctatatctctgttttggtaccagtaccatctcagaaataataccacacatctacaaccatatgatctttaacaaacctgacaaaaacaagaaatggggaaaggattccctatttaatggtgctgggaaaactggctagccatatgtagaaagctgaaactgtgtcccttccttacaccttatacaaaaatcaattcaagatggattaaagacttaaatgttagacctaaaaccataaaaacctannnnnnnnnnnnnnnnnnnnnnnnnnnnnnnnnnnnnnnnnnnnnnnnnnnnnnnnnnnnnnnnnnnnnnnnnnnnnnnnnnnnnnnnnnnnnnnnnnnnnnnnnnnnnnnnnnnnnnnnnnnnnnnnnnnnnnnnnnnnnnnnnnnnnnnnnnnnnnnnnnnnnnnnnnnnnnnnnnnnnnnnnnnnnnnnnnnnnnnnnnnnnnnnnnnnnnnnnnnnnnnnnnnnnnnnnnnnnnnnnnnnnnnnnnnnnnnnnnnnnnnnnnnnnnnnnnnnnnnnnnnnnnnnnnnnnnnnnnnnnnnnnnnnnnnnnnnnnnnnnnnnnnnnnnnnnnnnnnnnnnnnnnnnnnnnnnnnnnnnnnnnnnnnnnnnnnnnnnnnnnnnnnnnnnnnnnnnnnnnnnnnnnnnnnnnnnnnnnnnnnnnnnnnnnnnnnnnnnnnnnnnnnnnnnnnnnnnnnnnnnnnnnnnnnnnnnnnnnnnnnnnnnnnnnnnnnnnnnnnnnnnnnnnnnnnnnnnnnnnnnnnnnnnnnnnnnnnnnnnnnnnnnnnnnnnnnnnnnnnnnnnnnnnnnnnnnnnnnnnnnnnnnnnnnnnnnnnnnnnnnnnnnnnnnnnnnnnnnnnnnnnnnnnnnnnnnnnnnnnnnnnnnnnnnnnnnnnnnnnnnnnnnnnnnnnnnnnnnnnnnnnnnnnnnnnnnnnnnnnnnnnnnnnnnnnnnnnnnnnnnnnnnnnnnnnnnnnnnnnnnnnnnnnnnnnnnnnnnnnnnnnnnnnnnnnnnnnnnnnnnnnnnnnnnnnnnnnnnnnnnnnnnnnnnnnnnnnnnnnnnnnnnnnnnnnnnnnnnnnnnnnnnnnnnnnnnnnnnnnnnnnnnnnnnnnnnnnnnnnnnnnnnnnnnnnnnnnnnnnnnnnnnnnnnnnnnnnnnnnnnnnnnnnnnnnnnnnnnnnnnnnnnnnnnnnnnnnnnnnnnnnnnnnnnnnnnnnnnnnnnnnnnnnnnnnnnnnnnnnnnnnnnnnnnnnnnnnnnnnnnnnnnnnnnnnnnnnnnnnnnnnnnnnnnnnnnnnnnnnnnnnnnnnnnnnnnnnnnnnnnnnnnnnnnnnnnnnnnnnnnnnnnnnnnnnnnnnnnnnnnnnnnnnnnnnnnnnnnnnnnnnnnnnnnnnnnnnnnnnnnnnnnnnnnnnnnnnnnnnnnnnnnnnnnnnnnnnnnnnnnnnnnnnnnnnnnnnnnnnnnnnnnnnnnnnnnnnnnnnnnnnnnnnnnnnnnnnnnnnnnnnnnnnnnnnnnnnnnnnnnnnnnnnnnnnnnnnnnnnnnnnnnnnnnnnnnnnnnnnnnnnnnnnnnnnnnnnnnnnnnnnnnnnnnnnnnnnnnnnnnnnnnnnnnnnnnnnnnnnnnnnnnnnnnnnnnnnnnnnnnnnnnnnnnnnnnnnnnnnnnnnnnnnnnnnnnnnnnnnnnnnnnnnnnnnnnnnnnnnnnnnnnnnnnnnnnnnnnnnnnnnnnnnnnnnnnnnnnnnnnnnnnnnnnnnnnnnnnnnnnnnnnnnnnnnnnnnnnnnnnnnnnnnnnnnnnnnnnnnnnnnnnnnnnnnnnnnnnnnnnnnnnnnnnnnnnnnnnnnnnnnnnnnnnnnnnnnnnnnnnnnnnnnnnnnnnnnnnnnnnnnnnnnnnnnnnnnnnnnnnnnnnnnnnnnnnnnnnnnnnnnnnnnnnnnnnnnnnnnnnnnnnnnnnnnnnnnnnnnnnnnnnnnnnnnnnnnnnnnnnnnnnnnnnnnnnnnnnnnnnnnnnnnnnnnnnnnnnnnnnnnnnnnnnnnnnnnnnnnnnnnnnnnnnnnnnnnnnnnnnnnnnnnnnnnnnnnnnnnnnnnnnnnnnnnnnnnnnnnnnnnnnnnnnnnnnnnnnnnnnnnnnnnnnnnnnnnnnnnnnnnnnnnnnnnnnnnnnnnnnnnnnnnnnnnnnnnnnnnnnnnnnnnnnnnnnnnnnnnnnnnnnnnnnnnnnnnnnnnnnnnnnnnnnnnnnnnnnnnnnnnnnnnnnnnnnnnnnnnnnnnnnnnnnnnnnnnnnnnnnnnnnnnnnnnnnnnnnnnnnnnnnnnnnnnnnnnnnnnnnnnnnnnnnnnnnnnnnnnnnnnnnnnnnnnnnnnnnnnnnnnnnnnnnnnnnnnnnnnnnnnnnnnnnnnnnnnnnnnnnnnnnnnnnnnnnnnnnnnnnnnnnnnnnnnnnnnnnnnnnnnnnnnnnnnnnnnnnnnnnnnnnnnnnnnnnnnnnnnnnnnnnnnnnnnnnnnnnnnnnnnnnnnnnnnnnnnnnnnnnnnnnnnnnnnnnnnnnnnnnnnnnnnnnnnnnnnnnnnnnnnnnnnnnnnnnnnnnnnnnnnnnnnnnnnnnnnnnnnnnntcctgggctcaagcaatcctcctaccttggcctcccaaaatattggaattacaggcctgagccaccttgcctggcctataattttcatattgagttaatttgtgtttacattaattttttttcagttaacattatttcatatatacttctccataactctgccactaaaagcagctctggctggacagggtggcttgcacttgtaattccagcactttggcaggctgaggtgggtatattgtttgagcccaagaattcaagaccagcctgggcaacatggtgaaaccatgtctctacaaaaatacaaaaatcagccaggtgtggtggcctgcctctgtggtcccagctgcttgggaggctgaggcaggagtattgtttgagccaaggaggcagaagttgccgtgagccaagattgggccactgcctttcagactgggtgaaagagtgagatcagagtagtaatgaagaaaaaggctaggtatgggaaatagtacagagtagggcaccataggactaattcatagatttaaagggtgtaaaggaaagatgaattaaatatgactccttggctttttagagaaaattattattagtgtttagatctaggtatttcccacacctagcctttttcttcatcactacccttgtctcaaaacaatttataaataaaaatttttaaaggagttctataacttggattttaaaattctctatgggctttggtttcttctgtaaaatgaggcagttgggctattaaatgatttctaaaaaatttccagctctaatattctgtgacaatatctaggattgacaaggggaataatggaaatatagcacaaatgacacaggagtcttctttgaagaacaaggttactccaaaacatggatgctgcttaatgggccataactttcctgttgtccatgagtcagcatgaaaaataactccagaggaggctaagtaggtcagatttatctaagaagacagctgtgtaatcccgtatccctctccaaccccatggcacagcagatacatgcttttggctctgtgaacaacagtcaaatagcattacccattttgtaaagtccacaagaccacaacttgaaaaatcaagctggccttacaaagtctagaaaaagctacagcagtatttacatatggtccatggcaatgttagtctatcttttaagtcatttccattgatgctgtgatactcgttaatgtgggaaagactttattagtaaaagagtaaagtaatttaaatgttagcaaaaaagttttgtatcacaactttgaatctgtttaacaaaaccggttaggctgttaatgtttgcttgctttcctttatacgtattatactcatatgaggacttaaaattacattctgtaaataaataggcccatgagagaactttcatttagaagcaaactttgaaggtgcagttactgcttaagtgggctgtgcaaatattcctgtcactggaggtccctttaactccgtgggggaccttcagaatccaaggggcaaatagaaacttggagaagtgaagagaaaaaaagggcacattgagatggcactggagatccttgctaaataaaggaagatgttggcaaggaatacagaaaaaagtatgaaacagagactactggaggtattcaagttggaaaatgcaaagtgtcccttttttttttcacatcaacaacttacgtttatgctaatctacttaaatgttaagtctggccaagcaattagactatttaaccttgtttggagttaaatgcagacagtgtgagactgtgttcacagtactgtattacgtctttaggaaagaggatctagatttcattttgtccttctcaggattgtgtctgctatgcaagcactgattttctatagtctggcttgtaaggcacaaggagcaattaaacagaggattaaggtaaacaggtgtgtcccatcacttcccctcttcatactatattgttcatattctctgaatttcatacaagctacagtggaagcagtaagttaactttaaaaaatcataagattgcccatacttctaggttatgcaaattgatttctgaataagcccttgtttgcgacatcgctggtaaaggcaggatgttaacttaaagagatgccagattttggacttgttagttataggcatcaaaacctggaactaggaaatgtatttccacgtattacttccattatcctactaatgttagaaacaggcaactaaccacatcctcgaccccaaccatatttcaggagaggctggctgaattttgcaatatgattccaaaagggagtatttgcagggtctttgaagctataaatcccctaggaagagtcttccccacctgtcaggacctggacagtgtccacagagggtgccgggcgcactaccgccacgcggcgatgaggtctgcctctcgggttttgggagagctcttttttttctaaattacagactttgcagccaccggatatcctcgctgcataactggcagtggccatgtggctgcactcgcagtttcctgacaaccactgcattatttccactaatatcctgtgtccaaggcctctcgcttggcgactcctcgttcccacctccaccgccacctcttccctcgagggtaatctctcgaccgtggcccaagcgcctcgacaaagcggcaaccacccaaaagttcatgaaaatgcacttggcaaaagtgggccgctagtccccgcggacagctctaagcgaccccgtcccagccgaggaaagcgcccgggccccgcaaagcgcgcgctgcggggcgggcccgcggccatgtgctccgcgccggggcggggcacccgcgggttcgcattgcccactttcccccgcaccccgccgggttccgtccctccctttctgcggcgcacacgcgcacagagcaagcggcgcgcccgggtctggagctgcagcagcggcggcaacggcgggggggggccgggcccgggccggggcggggcggggcggggcggggccggggcggcacgggggccgggcccggggcgaggcagctggggcgccagcgagctagcggcgagcgcggcgagcaacggagaggagcgcgagcagcagcatggcggggctccgacgcccgcagcccggctgctactgccgcaccgcggcggccgtgaacctcctgctgggcgtcttccaggtcctgctgccctgctgtcgcccgggaggggctcagggacaaggtcagccttgcgccgctgggctcgctctgcctctccaccccgcccccgctctttcttttagggaactgctgaaatctataagagggcgaggggaggaaagggaaaggggcaggaggaggaaggaaagctgttgcgattctccgctgataacattttctgaccacagcgtcccgtcccgcgcctctctgccccgtacagctggagagcggggcagtcgcggggcttggggaccgctagccgctcgcgccctggagcctttgtgcgcgggcccctgcgccccgggcgcagcccccgctttgtgtggcgcgcgcgggtgccccgcagcggcccggcttcctgcagctttgttcccccgagcctggccgcccagggtccacactccagatgctcgggctgcgcagcccggagtgcctcgtggggtgtcttcactcccacttcgtccccccacccccagcacgagcaccccgagcctgcctgcacgctgtcgccttcgcgtccgaggggccgccggctcacaccccacccattgtatttttatccttggctcgcccctgggatggcctctgttcccaggaggaaaaagagacgtgttttggtgaggcggggggcacggagggacggtaggggaaacaggaagcgtttctttagcgtgcattaaaaacgtggtgtattttttggtgttcctgcagcgattgagccgttgccgaacgtggtggagctgtggcaggcagaagaaggggaactcctgctgcccactcaggtgaggacgaccaggtgacagggcggctgtgggnnnnnnnnnnnnnnnnnnnnccccaccccctgtccaagcggcacaggcgttcgggccactttgcaaggcaaataaacgttaggggccgagcctgaacacctggcaacggtggccttcccggctcctcccacgccatgtgacagggcctgaggcaggccggccccaagttcagaaggtgggaacccaggccacctcagcagggaagcggccagcggtctgttcggccgtgggtgtcctgggtgcacactgttccctaagtgagctggtgctgtgtggatggcaagtggctaagaggttgaggacaacaggagtattgatttcataaatgttagagtggtatttgccattagcgttaagtagctttgggatggagatgtgactctcaaggattgtcatcttggattttctccaagtgcccttaattcctgttaaaatacacccacttaagaacttgaatttctggtttttttctctgtatgatgatatgatgattgcgtgtagaaaaataattactgacgttttattgggaatctgtagcatcatagagggtttattgctgcaacagatacagtactgcaaagcttttaacttttacaagaaattcccattgactgtgaagtgtgcacatttaaatataatgttgttgactgcctttcaccagtaacggtagtgatccaaaatgcattttttgggtgggagtggcttgaattataaggaaatatttagcttgtgtgcagtactttttaagatgttcattacttcccacggtggtggcagcacttaattctgtgttgtgtcttgcggctgtttagaaaaacaggatgtctagctataactttaccggagaggctgtccagttttacatttcagttttctccctcctatgtgaaacattcagagtgctggttttgagatatttagaatattcattttgatcagggctaatgaataacagcttcaaggcagagaggtgattttagaggagaattttcctggaccctccttgaaggccagcagcctgaatgagacaggtcttttgagaaagggccccatcaggatgaggagcagatagtttttccttctcctaaaaatttattcccaaatggattttttccccgattttaaataatatacatgtgtttttgaaggtttggaagatacagaaatataaaaagaacaaaatagaaatccgtcgtattcctactgcaagaacgacatttaacgcgatgtatttattttaaaaaaattatgtttttgtatatcagagttgttcaacagtggcactggtgacattttgggctacagagttctttgttgtgggggctgtcctgtgcactgtgagatgttgagcagttagcatcccttgcctctacccactagatgccagtggcactcactgctgcttccccctctcccccaccccctcctgattttgacaactaaaaatgtttccagacattgctagatgtccctggggagcaaaactgccctggttgagaagcactggtgtatatctatgtatatgtatttgcatttttgctcaattatagtttctatctcttactggctagtgttggaagccaacccagactaaaaggaaagtaaattataggtgattgagtctagtagtatatactctcatttgttagagcgttagttgaagatttagtaggtgtgctcagagatggaaatgtcaaggcctaaatgattatttgatttatgggctcaaaagttattttatacaattcttaatttctggtttatttgtataatacaatttgttttgataatagatgtcagaattcagaagctgtctgggatattcagtatagagggatttatagctaagctattttaatcaaagctataatgaaagtgaaactggttttcaaaataattttctaaatacttcatccatatctctacgtataccttttagaaactatcttgccctgcttatacctgggcccaagggtaagggagacacacacacacacacacacacacacacacacgtgtgtatgtgtgtgtatatatatctcataagctacagagagttttgaagaaagttattttaagtgaattattttcaaagtattttgaattttttcagcaaaaattccctcatatgtgtcaaacggagtctgttgaaaagagaatatttataggtgttaatttaaatttgagggttttctgcttaattaaccagtacattgggtttctttcatgcaggaagactgaaagatggcttcagaggctaagatttgtcagtagtagatgaaataggaactttagaggatgtggcattaaataaaatactggccaggctggtggctcacgtctgtaatcccagcactttggaaggctgagaggggtggatcacctgaggtcaggagtttgagaccagtctgaccaacatggacaaactctgtctctactaaaaatgcaaaattagccgggcgtggtggtgcaggcctgtaatcccagctgctcgggaggctgaggcaggagaattgcttgaacctgggaggcggaggttacagtgagctgagatcgcgctgaagcactccagcctgggcaacaagagcaaaactttgtctcaaaaaacaaacaaacaaacaaacaaacaaaaaaaccagtaacatatttgccaacactgtttgtatagttatttattttggagatgtctcctgttgattaagtctttttttttttttaatgacaggtctctaagtgatcaagactaacttactattagtaaaaccatatatgacaactaaattgttgtaaactgtcagaacctctggccaggtctcctgggtttgaatctcagccctatccctttttagctccataaattcacctgtttgtcctgttttctcatctgcaaagtctggggaattatggtgctggtttcagaagactttgagaagattaagtgcctggaacttagtgagcacctactgtagcttacctaatattttagtggtccctgagctgactggtagacttgggcattggagagcatgaacggctttcttgttttgaaaggtctgaatagtacagataactcagcactattgtgtgctctatgattgtaaagttgtactagtcatatctttttgttatatactctcatgtcataaaatcatttggtgtaggaacatacaaactgtatatccatggtgatcatgagaggaaggaggaaaaatatatatgattttattcttacatttacagaaattttcctctgctctgactgtacttgaacacactgaatgcaaagtggtgatggtgtggaaaccaaacaggtgtttcattagcttattttcaagaagtaattgggtgtgtgcaggatacggctttgtgtaccttcttactttgccttcaaagtcagaaactgcgattccatgtgatccacgcataggtgatgtccacctgacctgctctgtcctgcagggccttccgtgtcagtcctgtggtacgcccactccagccccacccttggccaagcatgtccaacacgtatctgttgaattaatgaatgcaacagccccgctggtcattcagggcctgtccttcctgactcctgccctgcagtggcattgtcatcgtttctccctctttgagtttcttgtagtgccttcggttttttttgtttgttttcttttttttttttgagactgagtgttgctcttgtcgcctaggctggagtgcaatgatgtaatttcggctcactgcaacctccgcctcctgggttcaagtgcttctcctgcctgagcctcctgagtagctgggattacaggcatgcgccaccatgcccggctaatttttgtgtttttagtagagactgggtttcactatgttggtcaggctgatcttgaactcctgaccttgtgatctgcctgcctcagcctcccaaagtgctgagattacaggtgtgagtcaccgtgcccggcccatgtcttcgtttttctcctttgtcttgtgcatgtcttgttgccttaactgggttctcctttgaggggctgggctgctaagggttggtgccctgctgtggccacagtgtcctgcatacagtagacattcagtactgcccatgaagtcgtcctagtgcgggagaggcagttgtcagtgtcttgccgagttcccctatttatgaggttggctaagtctgcaggtaacaggtggaatgccttaaatggttatttcctagtattgtttgacaatcacatttttaaaaatcagttctagctgcaagaagggcagtctagaatctgttctttcaatccatccagacttctttgagaagagaaggctcactcctgatgccccttggttagcaggtttgggaaccagggacaggtgctgagtaggagcagccgttacctgatacagaatcatgttggtgctaggcagggctgggcaggctcagtgctccactgccgttacttgttcatttagcaaagatggacctttggggcgggcccagttaggtctccagagatacagtgatgaataagaaagaatctgcctttaaaaatatcaagtttattttcccgcatcttaagtcagagggtgtagataacggaaattggtagaaagtgaaacaggaaatgatacacagagtttttgttatcacaggtactgtgttatgtaatagcatcttgctccagtgaatcattgaccagtatttggtaatctttttgtcatagagatttatttttggtttaatcaacttccatcaacattaaaaaaaaataactaacatgggttgggcacttctggcatcatttaaatgctttatgagtattaactcattaacacactaaacactatgaagtttacagatgatgaaattgaggcacagaacagcgaaattacttggctcaaggtaataagaaagtgacagtcctaggagagtaagtgtttaactatagagcccaagtttttagccattacgtatgttgtgtgagtttcagtacagtttgaccagaaaagcactattatggtggtaaagtttctgtgtctgaggggaaagcatgtcatgttctattttgatttagaaaaagttgcttagtgaagttcccataatagtcatatccacatgtagttaagaaacagctggcttgtactcagctctgcagatgttttattgagcacatactgcaggccaagcagtgctttaggtgtcagggatattacagtagacaaaaaaaaacaaaaaacacctgcccttgtgatgcttgcagtctaaatggaagcagagagatagacagtaaacaagacagagaataaatttatttagtctgttcgaagggcatacatgttgtgtggtggcaatgtggggtggtgatgtgagttgcggttttaagaggtcaaagtgtaccactctgaaagggcaatatttgagccaatctttgaaagtggtgagagagaacagccagtgcaaaggccctgaggcacttcccaagaggcagtgggggaattacatgcttttgtccctgccctttgtggttggcaagatcagactggtaataccctgggaccacagtcaagtgctgaaatataggaactgagagaagaggcaccctgctttggagaggtcagctaaggcttagggacaagggaggccttagagatctgcagcagcaagtgtgtgcctggggcctagcccagagcctcgcctggtagacagttaagttcagcattttccctcggacattttaaattggagcccaggtgcttgccgcaatgtggttgtaggggtagggctgggtgtgtcagggcctgtgtgggacagtgctgtatgctgttgaagagcttggtgtgcatctgaccagttggagggagccatagtaggttcttgagcagggactgaagtgatgacattgagtgctgggtccttactgtgtgataagggtgataaggagtgaatgatatgaggagactggtctttgctgcacagagtgcgatggtgcaccggatggttgcaggcagcagtctgcaggcagagaagaaagctgcgtttgtcttctaatacagccggggctactgatggtgtgggctgctgtgttggaagaaaggacaggtaggaactgggtttcccgtgagtgggtaggtctttctggtaggaggtgaagggaggagagcagtgcaagatgactataagatttgcccaggggtggccgggcacagtggctcacgcctgtaatcccagcactttgggaggccgaggcgggtggatcacaaggtcaggagtttgagaacagcctggccaacacagtgaaaccctgtttctactaaaaatacaaaaattagccaggtgtggtggcatgtgcctatagtcccagctacttgggaggctgaggcaggagaattgcttgaacccaggaggcggaggttgcagtgagccgagaccctgccattgtactccagcctgggtgacagagcgagactctgtctcaaaaacaaacgaacaaacagaaacaacggttaacacatgttctttttcaatagggtgattctgaagagggtctggaggagccttctcaagaacagaggtaaggaaaaaatgggggtggaaacctgcatgctgaatgtccctgcccactttgggtgctctctgaagtctcagtatatgtccatgtttatgtatttagtagtatctgtaatacacctttctctttggcatttgtcgtatctataccttctaatacattaatacgattttgttttaaaataaggttgtttagaaagctgttagaaatagcccctccttcgccactcaccaatttcactttttccatgatgtgcttgtgccctccctcttgtttataaacatctattgagtgccaggcaccgtgctgggtgctgaacatgaaacacaaacaagacctctgtttcgtgtagtgggcaagtaagactttactgtaagtaaaataattatgcttatgacaagagctatcaagaattagtttcctgtagtagagaataatgaggtggatgggctccttttgggaggtgacattccagctgaagcctggaggaaacaggagcagccacacagcagcgggaacagtgctttggtcagagggaatggaggtgcaaaggccctaaggctggaagccctgccggcaatccaggaacttggagaaggccagtgtggtttgtaggatggtgagataaggtatgtagtcctttagaagtcgcagtaaggaatttgagttttgtttttaagtgtggtgtgaattgttaaagaattttaaccaggggactggaatacagtggtatgatcctggttcactgcaacctccgcctcctgggttcaagcaattctcctgcctcagcctctcaagtagctgggattacaggcgtgtgtcaacatgcctggctaatttttgtatttttagtagagacagggtttctccatgctagccaggctggtctcaaactcctgacctcaagtgatccgcccgacttcgcctcccatagtgctgggattacagacatgagccaccgcactcggtcctgtgaattccatttttaagagaataccatggggcagtcttggtcacttgtcaaactgggtcccttagaggtacacgaagacactctaagtggtgtataagtgggaggataacttgcaaggactacgcttccagacccccagggtgtaggtatctcctaaagctgatctgagttgtaagttaccattttccacctctgctttcacaatctcttttctccacgttacaaaagaaagctgtatcttccacccagccccaatcctgctgttggcttcatcttgggcaaagaggcaatttgaaatattggtgtttgttaggaaaaagtgatccactctgattggatgacaaattctttagtaactttggtggttttcagatcgttccttttagtaaaattgaaggaggacccaatgaatttgacaactgatagatcattcaagttacttttaatgatggctcactgtgtgatttttagatgaaacactgaggtagtttagagaatatacggatagtgctgtaataaagctgtttcagtacttacaagctttttcagtacttacatttaaaaaagttaaaaaggaaaggattaagttgataaaaaacctgtctcattctagtagtgggtaatgttcacatcaaccagttggggggaaaatagctctgttcatctcattaaaggatgcattttcaataagattttactttctgtgtttaattacctatcaaaatttgtaaaacttgttggtttgatcaattgtatgcagtcggccctctgtatctgtgacttctgcattcgtggattcaacaaactgtggatcgaaaatacagaaaaaaaaagtatctgtactgaatatgtacagactttttcttgtcattattccttaatacagtataaaaactatttacatagcattcacattgtattaggtattattagtaacctagagatgatttaaagtatacaggaggatgtgcataggttatatgcaaatactatataccattttatatcagggacttgagcatcttcagaatttgatattcttgagacgtcctggaaccaatctctcagggattcgactgtactaatacaaattgtattgataactttttttgtttttggaaacagtgtctcactctgttgcccaggctggagtgcagtggtgtgatctcggcctactgcaacctccccctcctgggttcaagtgattctcctgcctcagcttcctgagtagctgggatggcaggtgcacacaatcacgcccggctaatttttgtatttttagtagagatgaggtttcaccatgttggccaggctggtcttgaactcctaacctcaggttatccgccggcctcagcctctcagagtgctggtattacaggcatgagccaccacgcctggcctgaattgataacttaattcagaaggaaaaaaattaatatttagacctatggtcataggaaaaatgttttaaaaacctgaaatttcaatttatatttatagtcttgtagcagaaggctttgaacataactatgtattcagttaaaattccttgggtagggccaggcgcagtggctgacgcctgtaatcacagcactttgggaagctgaggcaggcggatcacgaggtcaggtgatcaagaccatcctggataacacagtgaaaccccctctctactaaatacacaaaaaattagccaggtgtggtggtgggcgcctgtagtcccagctactcgggaggctgaggcaggagaatggcatgaacccgggaggcggagcttgcagtgagctgagatcgcaccactgcactccagcctgggagacagattccatctcaaaaaaaacaaaaacaaaaacaaaacaaaaccaaaaattccttgggtgacgtggaatagaaatgagttcatggaggaaaaggaacaacataaaatatccagccatgaagtttatttttgtatttaaaaaaatggataatggtagatatcatttcagtggtatttagattccattgaatttattttaaaaagggattgtgagttttattaaaaatgccagtacgtacagtgtggcagagattacatttttacagctggtaaacgcccacaattgtaaatgtgacacaacttaaacatcctttttgggtgtgtgggagcaagaaaaattgaggaatgttgatatcagggtagggggttgaaagtggatggagggaaatggaacattttgagatacattcttgaggcgggacagatcctttacttgttgaatttgttgtggagtgtgagggaaagagaaatcatggagagagagcatctagattttggcttaaatgtctggagagatggtgatgactgtgctgggaaaggatttagtgggagggaatcaggaactgtgttcggctgcctcctgggaatctcagacttgatatgacacgtctacagggagatggcaggtagagttgataccactctggagctcggaggccagggctgcagacccaggtgtgggtgtgtgcagcccatagagagctgtgttgcacgtgcctttgtatttgttttcttttgtagatgcagttctcttcattcttattattcagcactagtttctttttgccagttttttcaaaaatcaaactttaagatattcgtagattttgtccttattggtcttttcacatagcatcagattatcagaatgaaagatgtgggaatgagggagaacagtgtcctttttgacgatgacttatataaaaaaaaaattttacatcatgcctgtgtacttgcaagcatatacatggatgtatgaatatatacatgtgtataatctatgtgcttttttatttataaaaatgaattaaagtttcagaaaatagtactcactcttgttgcctgcaatgtattctattttctattgcattttcttttatcacctactggctttatttattttttggtaatagcttgattgagatgttgttcacgtagcatataattcacccatttaaagtgcacagttggttttcagcatattcagagttgtataactgttactacaataaattttagaagaacattttgtcttcccgaaagaagtgccttaccctttagccatcaacctccaatctcctatccctgcctggattcattttaaaactcagtacatcatagttcacagtctgatcaaccttaatttatatgttttatcttcctgatattaaatattccagtattttgctattttatctctactttttaaaaacttgacttgcaaacctctttgtttcttttggctttttttgggttgaggtctgttcctcatgtgtaaagaaatgatcatgatgtgggtgggatgctgcttttaaaaacctttgtgtccattttttgaaaatgcagattctgaagctgtctccaagaattagctctgtaagtgtaatgttctgtgattggtaaattagtcacctacgtacttactattcatttaccttctaccttcttaattttgtaacttccccaaaacccaccttatttcttgctactttgaaaagaaaacttttgctttagagtagatttaaatttatagaaaaattacaaagatagtacagagacgtcctgtatacccctcacccagtgaaccctaatgttaatgtcttatattactgtggtacatttgtcactgagaaaccaacattagtatcttactgtgagctaaactccacactttattcacatttcactagtttttccctaatgttctttttggaggcaagtcattaagtgaagttgagcttcaccgacacaaattatatgaaattctgtatgggagatttgtcggttctcatttatttatatcttgtgagctcatggatatttatactttgggttataatccaatattaggtttgccctgctgttttaatgtcatttatccttaatcttatttatgaagttattaacatttgtttacacatttttcaaattttattatgattttaattttaataactaccccacgataccagcttaatgaaggtcaggtggacttaaagttaatagaagagcaccatttatcagttccacaaaatgaatgcattgtctcttaagaacccatacagaggagtcactactaactttggacttgagaaataatttgcctgtaagacagtcttagcatgttccccaaatgtaaaggaagcgctgatgtctatcactggacagaaagaatctaaagagtgaggaggtctctgttttactggcaagactgcccaaggtggggctggaacgggaccagtgtgaattctgggcagcaggcttcctagagcagcttgcctgttacctcaaagtctgggaaagctttcagggtaattggcctcattgaagattttgtttatgttattctgccttcatcttctgtggatgctatgtaattgtatttggtcgaaagccaaaaaagcaatatttgagaaatgttcttccctctttcctcttcatccccatttttccctgggtattctcaaatatcaacagtaatatgttcctttgctgagaaagatcgtttttgggaattcagtgatgagagcaaaggggaactgacttcagctcttactagaactgaatgccctgggaagcatgtctggctctctgtatatatctctctctggtaagcctttttttgagttatatttgaatagcagaagtttaagcattgacaatgtatgagtagtatattcaggttttaaaatgcgtacaaaaatcataaatactgtctaggtacaatgtctatgaaagttttttttttggtggttttttgtttttaaaatgtacttttatctgattagtagtaacagcagcaaaatgtgttctcctgaaatagttttaacaccagtgaaaggtggatcttgggagccagaacatgaagagaatctcattgtcctgtcagcaacatactggaagatacaattgcagacaagaacaacttaatctttggggacactcgcttttggcagtgaaacatttcagagcccccacagggagtggaactacttctcacttttctttgttattcagaaatggaagttctgggctgggcacagtggctcatgcctgtaatcccaggactgtgggaggccaaggcgggcggatcacctgacgtcaggagaccagcctggccaaaatagtgaaacaccgtctctactaaaaatacaaaaataggctgggcgcggtggctcacgcgtgtaatcccagcactttgggaggctgaggcgggcagatcaggaggtcaggagatcgagaccatcctggctaacagggtgaaaccccgtctctactaaaaatataaaaaattagctgggcgtggtggcggacgcctgtagtcccagctgcttgggaggctgaggcaggagaatggcatgaacccgggagtcggagcttgcagcgagccgagatcgcgccactgcactccagcctgggcgacagagcgagactccgtctcaaaagaaaacaaaacaaaacaaaaaccaaaaataagccgggcgtggcagcatgagcctgtagtcccagctactccagaggctgaggcaggagaagtgcttgaactcaggaggtggaggttgcagtgagctgagatcgcgcaactgcactccagcctgggtgacggcaagactccatctcaaaaaaaaaaaaaaaaaaaaaaggaaatggaagttccttccctgtttataggatctcacattttttaacctgaagtatctcaccagggttccactggggaccttcctatcttcccaccctgtcatctacctaggtgacccagcctgttctgttggctttaaaaaaattaaaagaaaaatttttttatggctacacagcagtgtatatatttgttgctctgttggctttttatatactctctatatagaaggaagttgaacatggatcataccttctccccagagttctcctttagcttgcaggtgccacaaaattactgtgtcctgaactgagcttctgggcctctcgctgtccccagttcctgtgcctgccgtcacgaggtgtggttgagtcttcatgtggtcttctgtctccattctgtagccaccccatcctgttctcctcacgtccatttgtcctacatcctttcctgtcatccctttgaagaacagccttttatggactgcagtaccttggggacgaagtgcagggtcctgagcatggcatcagtgatgtagaagccctttggggattgaggcctcttcaacctcttcctccagtctcactttctgatcattcacctgggctctctttttttgccaaaacacttttctcttccccagccatctccctccatcctgctttccatagcaccctggcacttatcttagcagaaggccgttactcctctgtttggaaattacctttctcagggtacccaagtttctgagtctcatgcacctgtctccctagcacctaacctcatacctgacacctgggtgaagagctgaaggaatgggtgaagggctgacaactgggtgaagagctgcagaaggaatgcaagctcatgcttttacatttaaagcttttacattgattacttgttatgttttgcacgtcctccacgttcaagcctgcaaaccatatttgccattgaaataacaggactagtatttgtgttagaggctgtattcttttatttttagttttattttttgagacagggtctcagtctgtcacctaggctttagtgcagtggcatcatcttagctcactgcaacctccgcctcctgggcttaagggatcctccaacctcagcctcttgagtagctgggaccacagtcacctgccaccacggctggctgatttttgtattttttttgtagagttggggtttcacgttgttgcgcagtcttgtctcgaactcctgggctcaagtgatccacccgccttagcctcacaaagtgctgggattacaggcgtgagccactgcgcctggcccagagactgtattattattattatttttgagacggagtctcactctgtcagcaggctggagtgcagtgacgcgatctcggctcactgcagcctccatctcccaggttcaagggtttctcctgcctcagcctcctgagtagctgggactacaggcaggcaccagcacgcccagctaatttttgtatttttagtagagatagggtttcaccatgttggataaatggtcttgatctcttgacctcgtcatctgcctgcctcggcctcccaaagtgctgggattacaggtgtacaccaccgtgcctggcagaggctgtatttttatactgagtttctgtagttggttgtttttttcttaaagaggatgggttattcactctatccatgtatagcctcatggtaccttctacagggtcctgtgggctctgggagctttgcagaatgaatgcattcaaccatggtctgtgcagccataacaatgtaaagtaatttttttgactgttgtagagctcataatttaggtgttctccttaatacaatacagatttttaaacagggttcttggtatatattaaaattgtattcaagccacagaaaccttttttttaggtgaaaaaattgtgaaatttttagcaaagcttttgacacctatttatatagttatttagccttcagttgaaataaatcagaaaaatagtacagtaagatcagaatactaattttggttttcattgaaatttttagttcctaaaaacttttattttatttattttttgagatagggttttgctctgttgcccaggctggagttcaattgtgctgtcatagtgaactgcagcctggacttcatgggcttaagcagtccttccgcctcagcctctccagtagctggggctacaggtacacgtcaccatgcccggctaatattttttttattttgtttttgtagagatgaggtcttcctatgttgcccacactgttctctaactcaagcagtcctcttgtctcagccttctaaaatgttggcattacaggcgtgagccatcgtgtccagtccctaaaaacacttttggttcctcctagataacatgtttttacaagcaccagggtgattaggttcgtattcatttttatctttatattgaaaggttatttgaacctttaataattccatattaaagaattacttaattctttaagaattttgaaaaaaaaataattttgaagggttagtctagaataaaaataggcaaaacacttcgttaatgtcaactttcctgaaacaaaaaaagtagaattaaggtctggggaagctggatattatacgtaaatgtagtgatgcagttccagaaattcgttgttccttactttttagactagagattgcctttgggagaagtggtttaactcagcattaaattctgaatcagctttgcttcattccatatgccactcagtggcttgactatttattgctacatgtcataatatttaacagtaaaataacttaatggaatcattcagtaagatgtgcgttctgaagaaagagctagacaaatccaacaacccaagaagagacttaggaggctgggtgtggtggctcatgcctctagcactttgagaggctgaggtgggaggatcggcttgagctcaggagttcgatagcagcgtgggtcacaaagtgagaccctgtctctacaaaaacaaaacaaaaaaaaagtggggcgtggtgatgtgcacctataggcccagctactcggcaggctgaggctcacttgagcccaggaggttgaggttgccgtgagctgtgattttgccactgtactccagcctgggtgacagagaggccctatctctaaaaataaaaaaaggctatgagaagcttgttttaggcaagaatgaaggtattgctgtgtaagaaagagaagagacttgggtgttttgccgttgagaaccaaacttacatttctttaggaaggcttctagctagagagtcaggtataagctgacatttcggcttctcttatgcagtggacattgtgcttcagattgctttcacttgtcacggtgggtcagtgagaaatgaaagtactttttggatggatcccaacatcggcagcagtattaattctgtgagggtgttctggatatgttatgatattaagcttcttattgcttaagaaggtagcagagcttggagtttccaggctcaaaggagaaatttcccaaggcagtcttctctgtctaggaacannnnnnnnnnnnnnnnnnnnnnnnnnnnnnnnnnnnnnnnnnnnnnnnnnnnnnnnnnnnnnnnnnnnnnnnnnnnnnnnnnnnnnnnnnnnnnnnnnnnnnnnnnnnnnnnnnnnnnnnnnnnnnnnnnnnnnnnnnnnnnnnnnnnnnnnnnnnnnnnnnnnnnnnnnnnnnnnnnnnnnnnnnnnnnnnnnnnnnnnnnnnnnnnnnnnnnnnnnnnnnnnnnnnnnnnnnnnnnnnnnnnnnnnnnnnnnnnnnnnnnnnnnnnnnnnnnnnnnnnnnnnnnnnnnnnnnnnnnnnnnnnnnnnnnnnnnnnnnnnnnnnnnnnnnnnnnnnnnnnnnnnnnnnnnnnnnnnnnnnnnnnnnnnnnnnnnnnnnnnnnnnnnnnnnnnnnnnnnnnnnnnnnnnnnnnnnnnnnnnnnnnnnnnnnnnnnnnnnnnnnnnnnnnnnnnnnnnnnnnnnnnnnnnnnnnnnnnnnnnnnnnnnnnnnnnnnnnnnnnnnnnnnnnnnnnnnnnnnnnnnnnnnnnnnnnnnnnnnnnnnnnnnnnnnnnnnnnnnnnnnnnnnnnnnnnnnnnnnnnnnnnnnnnnnnnnnnnnnnnnnnnnnnnnnnnnnnnnnnnnnnnnnnnnnnnnnnnnnnnnnnnnnnnnnnnnnnnnnnnnnnnnnnnnnnnnnnnnnnnnnnnnnnnnnnnnnnnnnnnnnnnnnnnnnnnnnnnnnnnnnnnnnnnnnnnnnnnnnnnnnnnnnnnnnnnnnnnnnnnnnnnnnnnnnnnnnnnnnnnnnnnnnnnnnnnnnnnnnnnnnnnnnnnnnnnnnnnnnnnnnnnnnnnnnnnnnnnnnnnnnnnnnnnnnnnnnnnnnnnnnnnnnnnnnnnnnnnnnnnnnnnnnnnnnnnnnnnnnnnnnnnnnnnnnnnnnnnnnnnnnnnnnnnnnnnnnnnnnnnnnnnnnnnnnnnnnnnnnnnnnnnnnnnnnnnnnnnnnnnnnnnnnnnnnnnnnnnnnnnnnnnnnnnnnnnnnnnnnnnnnnnnnnnnnnnnnnnnnnnnnnnnnnnnnnnnnnnnnnnnnnnnnnnnnnnnnnnnnnnnnnnnnnnnnnnnnnnnnnnnnnnnnnnnnnnnnggactggttgcaaaacgccgctgggctctagagaaaccccatccccatttgttgagaatttaaatactactcactgttgattcgtttttattatgttccaaaaatcttctagtacaatttatgtttcaggaaggtggccatatttaattcattgcgttgccttctctaacatacatgtacacatcccagtttgagaaacattgtccagtccctattgttcttacccagtttgttcaggtattttatttggaaaacatggctccgaatgatacatgcatgttggattaaaactgaacttcttctgtaggaaagatgatttgcccccctgtgaagtgcccagatacccactgttgcatttgaaggtggatcccagagaatagcctcagtaaaagcatagtcatagtgtgtggcctgccaagtgaaccatgtaaaatgtatatagtaaataattcatattgatattgtgccttgtacaacattgactttgagggttgtaactaccttgtggatgttgctgccactaaattatttacagtaaaggttctgtttgaattacaatccaaacagtgttcgattggtagttatgacaggtgtatgtagtatgcatttttggtggagtaattcttctaggattgtaattaatcctgtttcttcaaatcaggtcatgttaatccacttaatccataaaaattggatttaagtaattgcccttgtgtaaaccttatggtttacaaagtgctttcacatgtatcttccttacataaccaggtggatatgtggtagtattcccattttatagatgaggagacaggttcatcaaggtaaaacaatttgttgaaggttatagagctatgaagtgacagaacatgtgcgtgatcctaggtgtcctctctctgtaagtgcatacttgtctgctttggagtggaaagccactttcccaattagatgtacagctgtctgtcgaaggagactaagtccgagattaacggatggaagcaactgaatactttcttaggccctagtattatatggttcctagcaaatccctgaaaaaaaaagagcatgactcgtgtaagatagacccagggttggtccttcagtaatattttactgtatgctagataacttctttagttttatgctaattctaagtgtggattatccacagatattcagctacatagcttttgaaatgtggaaaatttaaatctgaaatattgggattagtttgtggaacacatgccattgtaatgtgtgctgagaggttgcctttagaggagctgtcctgtcagcttgctttgctttgggattattttcagcagcaagtaacaaaaccctgactcaaccagctcaaacaataaagaatgcatgatgtcacttaacaagaagcctggaggcagggtggttctgggttggtttactcagcaggttagtgtcagcacctgggagcctggttcttcggacctgtctgttctgttggactctgtgtgccgtgcagctcccctcacgtttgcaggaggtctgtgtgcttcacagcctcccagcctcccacctgaacatccaaaggcaggttaaaagaacccctggctactttctcagaagtactccccagcagacttccccttcacatcttacaggtgggtctgcactcaccttgaaccactcacccacccacgcctgtggagtggtggaaccacgtgatcagctctgtcctgcagggtttagtcatagggagcacaacccggctttgcctaagtgggaggaagggaatgggcagtgggaaggccgacagcagtgtgtgctatgctgagtgctatgctgggccacctgagctcagcgagaaatgagcggtctagggcagtgtttctcgaagcctggtccagggacctaaatcagcatcgcttgggaactcgctagactggccggttctcagaccccaccccagacctggtgtgaatcagaagctctaggggaggagcccagagatctgttttaacaagccctccaggtggctctgatgcacgctcaagtttgaaaaccattggcccagggtgaggcagctcagggaccatgttacaaaatatactttttgtggaggattaaataatgagaggtagaaatagtcttgtaggtaaaacagtgggtggaaattgggagatggttgcttttcagcctgacttaccaccactggcccagggttttatcaaacctagaatccgtacgtattctcttcatagggtatggagtgttagctggtggatcgagtgtgtccgaagaagttctgctgcaatgatgcacatgggggtggggttccaggctgagctttggtgtccacctatcagggtctcatatgtcctggcatgcctggtaaataggtgggttaggccattgcaggtcagcttccaggggaggactgaggaaccttctgagggagaattcattcattataagggaagtaagtttggcagaaaaccttggcccagtaacagaaagtctcagttgttggatgggagtggccactcacagcacagggtggtatgtgtattcagatctgtctcctggcccaggcccctgtggagctgcacaggcgtgtgtgtgtgtgtgtgtgtgtgtgtgagagagagagagagagagacaccctcgtgggcctgtggctgagctgtatgtgtgtgtgtgggagtgtgcgagagagaggagccagggacaaggagagagacccttgtgggcctgtggctgaggtgtatgtgtgtgagagagagtgagagagacaaagagacagacagactctggtgggcctgtggctgagatgtgtgtttgtgagtgcgagagagcagacagggacaaagagagagacctttgtgggcctgtggctggttgtgtgtgtttgtgtatgtatgagagagagacaagagagactcttgtgagcctatgactgaggggtgtgtgtgtgtatgtgtgcatgttgagagagaccctggtgagcctgtggctgagttttgtgtgcgtgtgtgtgtgtgagagagagaccgagaccgttgtgggtttgtggctgagttttgtgtgagagagagagaccctgtgggcctgtggctgagttgtgtgtaagagagaatgagggtgcgtgagtgcaccagtgtgagtggggttgttggggcatgaggaaggatattacttaaggcaaaactgaaagaagtgttctaaaaattctgtgagaaactggggtgggcggaagcagcacggggcactgcccaccccaaggggacttccacaccccgtcctgcagctggagggccagggctgcctgtgggaggagtggggaccgggccctggtgagggcagggcccagaggaggcagccgggaacttggagagaaggaacaaaattgggacaagggcctgggcctgggatagcccagcctgttgtgtgccacttacaggggagaagggcctccccagccacacagcaacccggggattccctgcggctctgttgtggtggagtgggagcatttgccagctgagggggctggatggagtagggcaacaggaagcaactcaagttcaagtgtggtgtattaatttcccagggctgtctaacgaagtgccacaaactgcgcggctttagaacaacagaattgtattctctcctcacagtccggtggctggaagtcctctgtcaagccggcagggccacgctgcctctgaaaccctcggggagtccgccctcgccttttcctagcttctgcgggctcgccggcagcctgtggggtttcttggcttgcagctgcggcactccagtctcttgtcgcacagcgctctccctgggtgtctccgtgctttcacgtggctgtcgtataaggacaccagttatattgaagcaggggcccaccctactccagtccagcctcatctggactaattgcatctgcaccaaccctgtttccaagtcaggtcacattctgaggtactggggttaggactttgacatatcatgttggggttggtggagacacagtttaacccataacacatagtccccagcgagactcgtctgtgagcccttgtgaatgtccctcacttgttttccttgccctcccccaacaccagggctcctgagaaacgcctttttggtattgggctggtgatgtgtgaagcgatccactgtgaagcttccttcctgagagctgcacagaccagtctacggcagctttggactcctgggctccagccgcagctgcaaaacccacgcagtttcttcccagctcattgaacctggccttttggttgaatggattttatttctgaattatttctttgtgtatctgtaggagcacgtccaaggaaaattctttattttcacaagattgtgagcactggggagaagtatttttttcttgagacagagtctcactctctcactcaggctggagtgcggtggtacgatctcagttcactgcaacctctgccttccaggttcaagcgattctcctgcctcggccccctgagtagctggggttacaggcatgtaccaccatgcccggctaatttttgtatttttagtagagacggggtttcaccatgttggtcaggctggtctcaaactcctgacctcatggtccacccaccttggcctcccaaagtgctgaaattacaggtgtgagccactgcgcctggcccaattttttttttttcttgcggaaaataagtgggcagatttaataatgagcaaataggcaaaaccatgaaatcaaacctcgttccttgtgtcagaattcagaaaaaagcgactaatgtaactggtgccaggctgtgtgtgctgtggtgtgtctctgtatgtgagtatcttaaacttgtttcattatcagtttaatttagcaaatgaatacgagttgattcccaggctgaagcaggtcttggtgggccattctgttggtttgccaggagaatccttttgttatttcctggaaatgcttgaatcatagatgagtctcttcctgcgtccgtgtatttcagctgcagttttccaagtgtgtaatagtgctgtccataaggaatagctgctgttactgtgaattgaaatacttaacaggtctactttcaggtggataaatgtcacatccaaattgcgtgttagtttgactttcaggtaacttaattagcagattcatgttttgggaaaatctgatctgtgatcctgaaattggttacagttggtgtaattcgtgggtaattaggcgcctttacagtgactactctagtcattagagggctggggtaatttgaggttgaaatgtgagagtgagatggagaaggcacttgctctctagtccttaatcttttaatccatttaacctgggttgtaaattcaggccttattttaatttgaaagtatgtttagggagctgggaaggggtttcattaattcaccactttcaggtaatatagttaggagagggaggttattcctagttgtttatttgggtaaacataaagttattgtgagtactggaagggctcatgaaagttatgttgctccttgttggaaacaaaagcttctagatttaaaaaatgagcggccgggcgtgggggctcatgcctgtaatcccagcactttgggaggccgaggcgggtggatcatgagatcattagatcgagaccatcttggctaacatggtgaaaccccatctctactaaaaataaaaatattagccaggtctggtgacatgggcctgtagtcccagctacttgggaggctgaggcaggagaatggcgtgaacccgggaggtggaggttgcagtgagccgagatcacgccactgcactccagcctgggcgatagagtgagactctgtctcaaaaaaaaaaaaaaaaaaaaagaaagcctaaaacccaaagaaaagcaccacaaaaacaagaccccgttcagagatgtgtcatataggtattgtccgtgtcgaagtcagaaatacatttgtggcatgtggaataggctttatggacacacagatatcaagtaacctgatctcttgctgagtttaaggcctgtcacgtaaatgcacactgcttacgttttctttttatttccacttttgaattggggataaaaggggaaactggtgaaggaaagacatgttcctagagagctgaacacctgtaatattgactaatagaagggaagagagtaggtaggaagtaagtgcaataggaaactggtaaacagagaagagaaaaaccgtgttttgagatggattggaggcattttttgtccacacacttgctttggggatttttattaggtagacggtaattagaggtgtcagtcatatgaaagtaaatcactagtctttcgtattactgttttctcagtggtccttatcagttttttttgttgctctgtaatcattcatatggtaagacttaacttttagtcatgtaaatttgtttagggacaatttaaactattttgtcaaattagtcgttttattccaagttgtacgtcttatgcatttatttagtatagtgaaagccttatatacacatttaatataattagtctctggatatttggattattttttagtagtacttttttagagtgtgggttttttcttttcttttctgtttttgagacagtgtctggttctgtcacccaggctggagttcggtagcccagtcttggctcactacaacctcagactcccgggctcaagccatccttccacctcaccctcctgagtagctgggactacaggcacttgccaccgtgtctggctaattttaaaatattttttgtagagacaaggtttcatgtttcccaggctggtcttgaactcctaagctcaagtgatccacccactccccaaagtgttgggattgtaggcaggagccaccacacctggcagttttttccttcttgttttgagatggggccttgctccatcacccgagctggagtgtaggtagcatgatcatagctcgctgcaaccttgaaatcctgggctcaagcgatccccctgcctcagccttccaagtagtggggactattggtccatgccaccatgcttagctaattataaaaaaaaaaaaagaaggtttttaaaagatggaggtctcactatgttgcccaggctggcctcaaactcctgcgctcaacagttctcccattttggcctcccacagtcctgggattaccggcatgagccactgcacatagcccaattttttctttttagttcactttaaattaaaaatagagtttgaagaaaattagaattttagctaaaccttatccaaattattacattttccaaattgatgaggcttcagggagattttcaaatattctgaatccttattaatatgcacaaaactttgtttaaatcataggcggaatctcaaggttgtgtgtaaaataagtctaccactttggacttgggaaaacaaatattctgatgtaataagtgattagaagaaaatataatagtaatatgaaactggcatggcatgcctgctagacagcccctgaagcatattggttaaactagtaggttataaacacagtctgtgctctgaaggaatgtatatagttttaagagaaggaacatgtgacttgggctacacttaaagtgtaaggtgtgtttatgagcagagttttaaatttaggtgttttttttaacttatatatcttttctggctttgtataatttggctcagggctgggggcagggtggaaagaatagactggaaagtggggaccaagatggaggagttgagtggataagagcagcaggctgagctcaggaggagaacttgataaggagtaggggaaaggaaggtcaggaatgagccaaggctgggagatcagatggtgagatacaggtggatgtggtaatgatgacctgaggcaggagatttttgtctaacctcaaggtagggtagtagctcagtggctaaaagatatgcttgggactgggtgcggtggctcacgcctgtaatcccagcactttgggaggccgaggcaggtgggtcacaaggtcaggagatcgagaccatcctggctaacatggtgaaaccccatctctactaaaaatacaaaaaattagccgggcgtggtggcaggcgcctgtagtcccagctactcaggaggctgagggaggagaatggaatgaacccaggaggcggagcttgcagtgagcggagatagtgccactgcattccagcctgggtgacagagtgagactctgtctcaaaaaaaaaaaaaaaaaaaaaagatatgtttggggctgggcgcagtggctcacacctgtaatcccagcactttgggaggccaaggcgggtggatcacaaggtcaggagttcgagaccagcctggccagtgtggtaaaaccctgtctctactaaaaatacaaaaaattagccgggcatggcggtgcgcactggtaatcccagctacttgggaggctgaggcaggagaatcacttgaacccaggaggtggaggttgcagtgagccgagatcgcaccactgctctccagtctgggcgatagcactagactgtctcaaaaaaagaaaaaaaacgcttggagccagaccgtctgggtttgaatctgatgtcatactgcttagctggtgacttttggtgagttgccaaacctctccatgccttagtttgcccctctctcaaataggggtattgttaatagtacctaccacagagtttgttttgaagattacataaatctgtgtaaggcatttaaaagccttgcatgtaaatgctctaatgttacctgctatgaagttgaaaaggtcattttcttagtggtggctgctgtgtaacagtgataaggtttcctgatctggctgacaccgttccctggcttccgggtgacagaatcctttttttaatgagttgtgtctgagaagctagaattgttgtgggtaaggacctgggctctgggtttgaatcctatctctgtggctttccagctatgtgatcttgagcctcagttttctcatctgtaaaagtgggccagtagtacctatctcgtaaggtaaggatcccaggggttagtctatgtgaaagaaactgttaatagtggaatttgtagttggcatcgcatatcaaggtgtgtgcgtgctttagcgaaattccattcttaagaatttcttaaggaagtaggataaatttacaagctgtatttacaattatatccatctgtttatattggggaaaaattaggagcaacttaatgtccaatagtacatccatatggataatgtagtacaatatttgacagagaaaggtgtttatgatacttctttacagaaaaattttctgtggagtctggaagaatcttctaaaatattcagtgttttcatttgctaatgagattgtatttttttattatgccataaggtacattaaaaagtaagacatcttgacttggggaaactcacaataaggggaaacagacgtttagacataactatctttaatatctgatacaacagtcttattgtcctgagcaccgtgaaccgaggaaagccccttctgccaaagttttcatcctgttgcagaccttgcctacggctgtctcacctaaacaataggaagttgtcttcttgcaaatgaggagtgattatgaggctatggaaaatggaaaagctggaaagttctttagctaacagctctccgtcgggagcgctaagagggcctcagcaccagtgggcttggttagggggatattttagacatttgctctgagaccagtgcattgggtgacctgccggggctcctgctctgccgggtgttcaccctttacctgcgtgatccggggaagtgtgagaggggtctggggaggggcagtagctattcaccaaactctgaacccaaaatatctgagacagatctgtaccaaattagaaagttggttttatggccaggcatggtggctcacgcctgtaatcccagcacattgggaggccgaggcggtggatcatctgaggtcagtagtttgagatcagccttgccaacatgctgaaaccccatctctactaaaaatacaaaaattagccgggcgtggtggtatgcaccagtagtcccagctactcaggaggctctgaggtaggagaattgcttgaacctgggaggcatcctaggttgcagtgacccgagattgtgccattgcactccagcctgggcgacagagtgagaatccgtctgaaaacaaaaaaaaaaaacaagtaagttaattttgccaaggttaaggatatgcccggaacacagcctcaggaggtcctgtgcccagggtggtcgggatacagcttgcttttatatattttagggagacatgagacatcaatgagtaggtataaggggagggcaggggcttccaggtcataggtgggtaagagagaaaaggttgcattcttttgagtccttgattagtctttgagtgaatacacaatttagtctgcctcagtgaatgcatttttacataaacaataggtcagaggaagcaatcaaatatgcatttttttcaggtgagcagagggatgactttctgtctccacctgtgaagatgagctatcagtttacattgccagggtgaaatccaacagaacgttctggggtaaagatcttgaggcctacaaggaatttccttgtgggtaaattgtgagggaggtatgtaacttttaaaatctttgtagctatcttatttaggaataaaacgggaggcaggtttgcctggcatgattcccagcttgacctttcccttggcttagtgatttttgggtaccgagatttagtttgctttcacaaaacaagtgtggaactgtttcagtggagtaatgaggatgtggctgtgctgagcttaaaggggcggatgtcagccctggccagaaaagaagtctgaagatggattcctagagtgccaacaaggcctccgaatgccaagctagcccctctcgagggcggcgagacctgaaatcagaaaggcagtttctttaaaataatcccattcagagttggggcatcaaaatagattaggctatgggtttaacggataggaattctttagaaaggtatcaaattatccttgcctaagcattacttcacaggctggtcctaacctagttttgcaaaacaaatcaaaacattttaaatccatggaacactttatttaaacagaattttctgtagaagcctggtacaaaaattaaatacggggctgctccattgcatcgaaaacggggaggcccactgaggcacagggatagttgcttttccaggaccacccccctcatgtcagtattattcagcagggaacacaacccgttcccccagccccacagggatttcagtaatctaagtcccctctgcataggtcactgtgacagtgtcattgtcattctctttggttttgttagtgaaagatttaggattcagtgtttatgaagacttgttttgtttttgtttgagacagggtctcattctgttggccaggttggagtgtggtggcatgatcctggctcactgtggccccacctctcaggctcaggtgatcttcccacctcagcctcctgaataacaggtgtgagccaccagtctggctaattttgtttattttttttgtagacatgggggtctcactatgttgcccaggctggtctcaaactcctaggctcaagtgatccactcgctttggcctcccaaagtgctgggattacaggtgtgagccactgtacttggcctatgaagacttttttttttttgtttttgagacagggtctcattatgtggcctaggctggagtacagtggcacgatcatggttcacttcagccttgaactcccaggctcaagcgatcctcccacctcagcctccctagtagctgggactacaggtgcgtgccctcatgcccagctagtttttgtgtttttttgtagaaatggggttttgccatgttgcccagactggtcttgaactcctaggctcaggtgatccacctgcctcagcttcctgaggtgttgggattactggcatgagccagcacacctggccaagattttcgaagggaatgtttttgaggactttggggaaagtttgtctcccctctgaaggatgcccgtgagtgtgtgctgctgagaggatggcagaatggcaaggtgggagcattctgcaagcatcatgacatcattgagctactgaatcacccttccctagaactggcttccaggactttgggtcatatgagtcatgtggggtcctttagagtcgcactaaacagggctgtcaagtctcgagtgnnnnnnnnnnnnnnnnnnnncaacttcatgacttgaaatgccctgttcgtgcgactcttaaaggacccccttcacttcagccttgaactcccaggctcaagcgatcctcccacctcagcctccctagtagctgggactacaggtgcgtgccctcatgcccagctagtttttgtgtttttttgtagaaatggggttttgccatgttgcccagactggtcttgaactcctaggctcaggtgatccacctgcctcagcttcctgaggtgttgggattactggcatgagccagcacacctggccaagattttcgaagggaatgtttttgaggactttggggaaagtttgtctcccctctgaaggatgcccgtgagtgtgtgctgctgagaggatggcagaatggcaaggtgggagcattctgcaagcatcatgacatcattgagctactgaatcaaccttccctagaactggcttccaggactttgggtcatatgagtcatgtgagaaaaatattctcctctacctttttctgagttaggcctcatgctgcttgaagctgaaaacatcctgttacacctcggttttaagcaccctcccctggcctctgagataagcctctcaggaacctgtggctctctaacccagtttgaaacgttttgctctccatagaattgtgtaccaggagagttatattgattaaattaggtcttacattttatgttatatattcagagacatatatttgtagtctgcatttcaggtaaagcgttttccatgttggaggtcaaatcccacgaggttcacgtatctattgctgctgctttaccctgttctggaaaagaaagttatttgcctgccgaacgcacagacatgagattagaaagtgatgacaagcgttaatgcttggctctttttatcatagactatactcttttctactctattatttcatctgtgtttgtgtaacatgtatctcacaatgcagaaatcttttttttctttttgttatgaaaaatttccaaaaaaaaaaaaaaaaaaaaagaaaagttgagagacttgtacggtgaacacccagatacacatctcctagcttctacagacatccttaagggttctgatggcagagatccgtgtgtaagcattttgaagtttttggctaaagaaaaacgttgtgttccgttctttttttattgtgtcggatttaaggcacagctcctgttcagcctgcctgctattctctgagtttatgtaagtttgaggaggtgggtgggagaagatgtaggaggatggaaaatgagcagcttgctttattcacaaatgatgcttggtaggctctggacagagccaggggtttgggggagtcctgagcatggtgcccttgatctgctcttgcaccctctgaggctgaggggcctgggaggagccctcctctgctgggaacttttcctaaaagcccacttacggacagagaggcagggtttacagcagcagagccaaggagggctgaggccagcttcctttgctctcccactcattcccagctcgctatttaatttgacatcctggaacatgtgtttcagtgaattggttcataaaaatgttttttgcaggattctggaatagaggctgcacattctttagatacatggctaatcgcactatgtgagagagcgtgtgggtgtgtgtgtatttttggaggtgggtagggaagtggggggtgagcagagttctttcaagctctctcttcacaagatgcaaatgtttttccccttagggtttatagagagtgtgaacaatgaggagttgagatcctgtggccctttggtccccagggtcttctcattcggccctactgagcaaggctggcttcccatttgctctcatctttttctccttcagtcactctggaaactagtagttaggagctggaaattgagaagctgccatttaggagtttatgcaacaaatgcagaggagagtctgttccagactttgcagttatatcaacttagagcttttgccaacctttcttggaaaaaaacccactggaattaagtgaaacttcacaacactgcacaatgtagccaattctgcatttggggtatgtaagcctggaactgtgggaagctggaagttgccccttagtattaacgtttgtttttgttgtccttttccttgaatgtagtcttacgtagagaacttggacagcctgtcattttccaaaacctctgtggctcatcctaggcacaactcatgtctctcctttcttctgttagtgtttagggatgggccaggcctgaactaaccgtttcagggctccgaggctgcgccttgtaacttgtgagcactggttctgggcagtcgcctccctgcggttagtggtgcccagcctccagtcgctgtagctcagacatggcctcgggaggtttggaggatgcccagcgcttgtctgcccattgttgctgacctgccgcattgtgtgatatggctccatgtgcacatcttccatggatttatcagtcttgacaggagtcttccactttctgccagtgatgaaatagatctttatgatttttttttttttttttgagatgcgtctcgctctgttgccaggctggagtgcagtggcacaatctcagctcactacaacctctgcctcctgggttcaagtgattctcctgcctcagcctcccaagtagctgggactacaggcacgcgccaccatgcccggctaatttttgtatttttagtagagaggggatttcaccatgttggccaggatggtctcaatctcttgacctcgtgatctgtccaccttggcctcccaaaatgctaggattacaggcgtgaaccgccgtgcccagccccttatgacattcttaccctgattggttattcagcttcagcttgagcacttcacgtgatgggaagttcacctttgaaactgactttccatttttgagcctctctcattgtaaagatgttctctgattttgacttcacatttgctctctttagtcttccaccgtcagatcccagtctcacagacttgagacagttatcacatctcttctctaggttggttttacctaaatttttttttttaactcgcccaggctaaattattcctcatgtttttcagtcagtcctaatgttaacttggtcagaaccaaccttccttcctcccttcctcccttccgttcccttccgttcccttccctctgtcccatccctccctcccttctttctttttgcaagagtagatagggtctcactctcttacccaggctggagtgcaatggtacaatcatggctcactgcagcctcaaactcctgggctcaagcagtcatcctgcctcagcctcccatatagctaggaccacaggcttatgcctccccacccccagctaatttttatatattcctttgtagagacagggtttctttatgttgcccaggctgatcttgaactccttgggctcgagtaatcctccagcctcagnnnnnnnnnnnnnnnnnnnnnnnnnnnnnnnnnnnnnnnnnnnnnnnnnnnnnnnnnnnnnnnnnnnnnnnnnnnnnnnnnnnnnnnnnnnnnnnnnnnnnnnnnnnnnnnnnnnnnnnnnnnnnnnnnnnnnnnnnnnnnnnnnnnnnnnnnnnnnnnnnnnnnnnnnnnnnnnnnnnnnnnnnnnnnnnnnnnnnnnnnnnnnnnnnnnnnnnnnnnnnnnnnnnnnnnnnnnnnnnnnnnnnnnnnnnnnnnnnnnnnnnnnnnnnnnnnnnnnnnnnnnnnnnnnnnnnnnnnnnnnnnnnnnnnnnnnnnnnnnnnnnnnnnnnnnnnnnnnnnnnnnnnnnnnnnnnnnnnnnnnnnnnnnnnnnnnnnnnnnnnnnnnnnnnnnnnnnnnnnnnnnnnnnnnnnnnnnnnnnnnnnnnnnnnnnnnnnnnnnnnnnnnnnnnnnnnnnnnnnnnnnnnnnnnnnnnnnnnnnnnnnnnnnnnnnnnnnnnnnnnnnnnnnnnnnnnnnnnnnnnnnnnnnnnnnnnnnnnnnnnnnnnnnnnnnnnnnnnnnnnnnnnnnnnnnnnnnnnnnnnnnnnnnnnnnnnnnnnnnnnnnnnnnnnnnnnnnnnnnnnnnnnnnnnnnnnnnnnnnnnnnnnnnnnnnnnnnnnnnnnnnnnnnnnnnnnnnnnnnnnnnnnnnnnnnnnnnnnnnnnnnnnnnnnnnnnnnnnnnnnnnnnnnnnnnnnnnnnnnnnnnnnnnnnnnnnnnnnnnnnnnnnnnnnnnnnnnnnnnnnnnnnnnnnnnnnnnnnnnnnnnnnnnnnnnnnnnnnnnnnnnnnnnnnnnnnnnnnnnnnnnnnnnnnnnnnnnnnnnnnnnnnnnnnnnnnnnnnnnnnnnnnnnnnnnnnnnnnnnnnnnnnnnnnnnnnnnnnnnnnnnnnnnnnnnnnnnnnnnnnnnnnnnnnnnnnnnnnnnnnnnnnnnnnnnnnnnnnnnnnnnnnnnnnnnnnnnnnnnnnnnnnnnnnnnnnnnnnnnnnnnnnnnnnnnnnnnnnnnnnnnnnnnnnnnnnnnnnnnnnnnnnnnnnnnnnnnnnnnnnnnnnnnnnnnnnnnnnnnnnnnnnnnnnnnnnnnnnnnnnnnnnnnnnnnnnnnnnnnnnnnnnnnnnnnnnnnnnnnnnnnnnnnnnnnnnnnnnnnnnnnnnnnnnnnnnnnnnnnnnnnnnnnnnnnnnnnnnnnnnnnnnnnnnnnnnnnnnnnnnnnnnnnnnnnnnnnnnnnnnnnnnnnnnnnnnnnnnnnnnnnnnnnnnnnnnnnnnnnnnnnnnnnnnnnnnnnnnnnnnnnnnnnnnnnnnnnnnnnnnnnnnnnnnnnnnnnnnnnnnnnnnnnnnnnnnnnnnnnnnnnnnnnnnnnnnnnnnnnnnnnnnnnnnnnnnnnnnnnnnnnnnnnnnnnnnnnnnnnnnnnnnnnnnnnnnnnnnnnnnnnnnnnnnnnnnnnnnnnnnnnnnnnnnnnnnnnnnnnnnnnnnnnnnnnnnnnnnnnnnnnnnnnnnnnnnnnnnnnnnnnnnnnnnnnnnnnnnnnnnnnnnnnnnnnnnnnnnnnnnnnnnnnnnnnnnnnnnnnnnnnnnnnnnnnnnnnnnnnnnnnnnnnnnnnnnnnnnnnnnnnnnnnnnnnnnnnnnnnnnnnnnnnnnnnnnnnnnnnnnnnnnnnnnnnnnnnnnnnnnnnnnnnnnnnnnnnnnnnnnnnnnnnnnnnnnnnnnnnnnnnnnnnnnnnnnnnnnnnnnnnnnnnnnnnnnnnnnnnnnnnnnnnnnnnnnnnnnnnnnnnnnnnnnnnnnnnnnnnnnnnnnnnnnnnnnnnnnnnnnnnnnnnnnnnnnnnnnnnnnnnnnnnnnnnnnnnnnnnnnnnnnnnnnnnnnnnnnnnnnnnnnnnnnnnnnnnnnnnnnnnnnnnnnnnnnnnnnnnnnnnnnnnnnnnnnnnnnnnnnnnnnnnnnnnnnnnnnnnnnnnnnnnnnnnnnnnnnnnnnnnnnnnnnnnnnnnnnnnnnnnnnnnnnnnnnnnnnnnnnnnnnnnnnnnnnnnnnnnnnnnnnnnnnnnnnnnnnnnnnnnnnnnnnnnnnnnnnnnnnnnnnnnnnnnnnnnnnnnnnnnnnnnnnnnnnnnnnnnnnnnnnnnnnnnnnnnnnnnnnnnnnnnnnnnnnnnnnnnnnnnnnnnnnnnnnnnnnnnnnnnnnnnnnnnnnnnnnnnnnnnnnnnnnnnnnnnnnnnnnnnnnnnnnnnnnnnnnnnnnnnnnnnnnnnnnnnnnnnnnnnnnnnnnnnnnnnnnnnnnnnnnnnnnnnnnnnnnnnnnnnnnnnnnnnnnnnnnnnnnnnnnnnnnnnnnnnnnnnnnnnnnnnnnnnnnnnnnnnnnnnnnnnnnnnnnnnnnnnnnnnnnnnnnnnnnnnnnnnnnnnnnnnnnnnnnnnnnnnnnnnnnnnnnnnnnnnnnnnnnnnnnnnnnnnnnnnnnnnnnnnnnnnnnnnnnnnnnnnnnnnnnnnnnnnnnnnnnnnnnnnnnnnnnnnnnnnnnnnnnnnnnnnnnnnnnnnnnnnnnnnnnnnnnnnnnnnnnnnnnnnnnnnnnnnnnnnnnnnnnnnnnnnnnnnnnnnnnnnnnnnnnnnnnnnnnnnnnnnnnnnnnnnnnnnnnnnnnnnnnnnnnnnnnnnnnnnnnnnnnnnnnnnnnnnnnnnnnnnnnnnnnnnnnnnnnnnnnnnnnnnnnnnnnnnnnnnnnnnnnnnnnnnnnnnnnnnnnnnnnnnnnnnnnnnnnnnnnnnnnnnnnnnnnnnnnnnnnnnnnnnnnnnnnnnnnnnnnnnnnnnnnnnnnnnnnnnnnnnnnnnnnnnnnnnnnnnnnnnnnnnnnnnnnnnnnnnnnnnnnnnnnnnnnnnnnnnnnnnnnnnnnnnnnnnnnnnnnnnnnnnnnnnnnnnnnnnnnnnnnnnnnnnnnnnnnnnnnnnnnnnnnnnnnnnnnnnnnnnnnnnnnnnnnnnnnnnnnnnnnnnnnnnnnnnnnnnnnnnnnnnnnnnnnnnnnnnnnnnnnnnnnnnnnnnnnnnnnnnnnnnnnnnnnnnnnnnnnnnnnnnnnnnnnnnnnnnnnnnnnnnnnnnnnnnnnnnnnnnnnnnnnnnnnnnnnnnnnnnnnnnnnnnnnnnnnnnnnnnnnnnnnnnnnnnnnnnnnnnnnnnnnnnnnnnnnnnnnnnnnnnnnnnnnnnnnnnnnnnnnnnnnnnnnnnnnnnnnnnnnnnnnnnnnnnnnnnnnnnnnnnnnnnnnnnnnnnnnnncacttgtgtggtttttttgttttttggagatggagtcttgctctgtcgcccaggctggagtgcagtggtgctatctcggctcactgcaagctccacctcctgggttcacgccattctcctgcctcagcctcccgagtagctgggactacaggcgcccgccaccacgcccggctaattttttttgtatttttagtagagacggggtttcactgtgttggccaggatgttctcgatctcctgaccttgtgatccaccgcctcggcctcccaaagtgctgggattacgggcgtgagccaccgcggtcggcctttttttttttttttttttttttttttttttggagacagagtctcgcctgttgcccaggctgcagtgcagtggtgtgatctcggctcactgcaacctccaccttctgggttcaagtggttgtcctgccttagcctcctgagtagctgggattataggtgcgcactaccacgcccggctaatttttgtatttttagtagagacggggtttcaccatgttggtcaggctggtctctaactcctgactttgtgtgacctggtgatccacctgccttagcctcccaaagtgctgggattacaggcgtgagccaccgtgtctggccacttgttctttatgctaagcaagagaaatattattttgctgattgatcagtctgagttgtaatataaattttcttataaataatgatttttttcacttaccctgtagaattagcaaaattttataagtctcttaactaggttatgagatttgctttcacagaaagacttttcccataaacgaatgaaacttaggatacatgagaagcagaatccttgacattttgcttcttcatctcatttgccacagacaacatgccattgtcaaggatggatgcattcacttgaatctcagcttgttttttcagagtgaccagccttgctgagttgtaacagaggttaggtttccaggggggcatgtgtgagcagaggatgggttggctaggagcgaactgtggggtgcagagcaaatgtcagggaactaggctccttggcctttagatgactatcttctccctatgtcttcacatagttttccctttgtactatctcttggtccaactttccatttctttctttctttctttttttttttttttgagatggagtctcgctctgttgcccaggctggagtgcaacagcacaatctcggctcactgcaacctctgccttccgggttcaagtgattctcctgcctcagcctctcgagtagctgggactacaggcacgcaccaccacaccccggtaatttttgtattttttaatggagatggggtttcaccatattggccaggctggtctcaaactcctgacctcgtgatccacccgcttcaacctcccaaagtgctgggattgcaggtgtgagccaccttgcccagccctcaacttgccatttcttacaaggatgccagtcatactggattggagtccactttgatgacctcattttaatttctttacctctttgaagatcttatctccaaatatagtcacattctgataaatgggatgaggacttgcagataggaattttgtaagaaacataattcagctcataacatgtcctgaaggggaaaagcaaaatgtaggtcatggttcctggtattcaggttgtcattgtgtttagaggtaagttcaaagctcatgacacattactggtatgagacagtactataattttatttcccagctaaaatatcttatacccctaaatgagttgagcagcgaaatcatacaaattcagaaaaagagagctaatttggggccagaatggtgagagagggacttgtgaaatagcaggaaaaggcttgagaggaactggagacatcaagttggaatgagtaagagtgtgcccagggtgtggtgaggaggctgcctggccagagcagggggcttgttttgtgtgtccagcatgtgtctcagatatttcgtaccagatcttgatagcttgaattcttgtctttgaaattacaactttttcatgtagtaaaaaagatcagagggaagtatttgaagtagaactaacttaggtataattgcgctgtgaaggtgaaaaacaatagtagagtcgaactaatatttaaaatccaagaaaaggctctaaaacaaaagatgacctgaatctacatattggaagagcccaccaggtgatacctgggaaaagtaacccagaattataaactctgagatacattctattagatttcaaagataaagagaaaaaatttctcaaggattccttgcaaaaaaagatcgtatggtttacggggacaaaataatttgactgtcatcacatttctcaaaatgatgtacaaagcaaggtaacaatggagcagcattttgaaaagattttagggagtgacagccaaggattttatcccagccaggctgtccttcaggtatcaagaatagagaaacagtttacacagtgactcagggaattctgtactttaagcccttactgttagagggtgaactgcttcattcaaccaaaaaatgagtaaatttcagcaaaatgactgatactaagtatttacgccgggtgcggtggctcatgcctgtaatcccagcgctttgagaggccaagggggggactcatctgaggtcaggagttcaagatcagtctggccaacatggtgaaacctcatctctactaaaaatacaaaaaattagccaggcctggtggcacatgcttgtaatcccagctactcaggaggctgaggcaggagaatcgcttgaatccaggaggcagaggttgcagtgagccgagattgcgccattgcactccagcctgggtgacagagtgagactctgtatccaaaaaaaaaaaaaaaaaagaagaaagaaaaaaagagtatttactactttatttacagatctgagactaacacagaagaggagaccagagtggggaataaaaacctcctcctgtaaccatagctgaaaactcttgaaggtggtttgctggcacagtttgggttctttagaagtggatactgagacagtttggtgtacaggaatgcacattttttaaggattaacacctgtggaagggagggggcagaagcagagttgggcagagcgagaagtcaaactgcagtataggcctgcagagccttgaacaacaccacgggaagctttggagtgtttatggcccatcagagctatccagtgttgggttgaaatggccaggcttgtttttatctgcctgtcttcatcagtctctggatgtgaactgtcctttggagggtgtgttttgggcgggtggctgttagtagccgaggcaaaccctgaaggactaactgctagaggctgtctccaactaaggcagtggggtccttgaagtgggatctgcgtggcacatctccacgtcccccatgcttgctttttctctagtagaagactgtgtttacagtggtaagttaggaagatgagtttcttctcattgctgtggacttctgttaccttatggcttccaagagtctggaacatcgtgttcacatttgtattattctccacattgtgagtcctcatgtcccaaaagagaatacaaaacaaaacaaaaacgtaagaacctatcaaaccgtattacccagattctcttgctgttaggatgcagacttttgacttaagtttctcccatttgagtgagatcttgtagcaagacttggattcaggagtgagatgcaaaacaaaaaaacaaacaaacaaaaaaccagggaacgcttatgtggtgtgggtgatttcagaggcagcttcctcatcgtaatacagctggggtgcatctagtggccatgttggcagctgctcccttaccagaccggttctacagtgggattcagcccagatcctagggctgggtatcaccatcctctgctgcagtaaatgactttgaaacacatagaatggattctgtagttggcagctaagaacgctgacacatttcgtgggtgagttgtgtggaggaaagactggaggcaaggagactgattagaatgtgaaggcctgaattaggatgggtttagtaaaataggaattgatttgaggagaatgtaaaagagggaatgaatcatatttaatgatgttaggactaaggaactgaatcagggaaaaagtcatttagcattacctctggggaatggatttgggtgtaacataggaatgggtattggatatttgggtgtatgtgaataataggaaggcagatagactttttaatttatacccaactctatgttgtgtttactgcatgcgtataatatttttatagtcttaaaaaagattgctctaaagtttgagccaggatgaccaaaaatattgtggtgtccatatgagatgttactttttctaacctgagaagtcacagtaagtaaaatgaacggaaaccatgaagactggaattgttgagtaagaaaattatgtcgatattccatctgaatcctaagttcagaactttaaaaacacaattactgagcacctgctgggtgccaggcaatgtgctaggttccttaagtagtttctcatttaaccctttattctcacatctgtatcgttgataatgttttccactaaatagactcccagtaaaaattgatgaatgatgtatctcatcgaattccttgaattgagagatgtgatttaatgtttttttttaatttttttttttttttttagctcggacacccaggctggagtgtagtggcctcaacctcctgggatcaagcgatcctcccaacttagctccccaaggagctgggactacaggcacatatcaccacgccctgctaattttttatttttcatagagaaggggtctcactatcttgcccaggttggtctcaaactcctgagctcaagtgatcttcccgccttggcctcccaaaattctaggattacaggcatgagccaccacgcccagcctagtgtttttctttaaatggcttaacttaagtaagttaaacaaatggtacatttttatttgcatagaactatataacctatgatgctttttaattgtaaataacacatcttaaaaagagggccgggtgtggtggctcatacctgttatcccagcactttgggagattgaggcagggggatcacttgaggccaggagctcaagaccagcctgggcaacatggtgaaaccctgtctctactaaaaacaacaacaacaaaaaaaacaaaaattaactgggcatggtggtggcatgcacctgtagtcccagctactctgggaggctgaggtgggaggatcacttgagcctgggaggtggaggttgcagtgagccatgatcctgccaccgcactctaacctgggtgacaagagctagaccctgtctcaaaaaaaaaaaagaaagaaaaagaaaaatctacaaattagaaacatccattacccttctacaataaaaactatcattttggctgggtgtggtggctcaagcctgtaatcccagcactttaggaggccgaagtgggcagatcactttagaccaggagtttgagaccagactggccaacatggtgaaacccttctctactaaaaataccaaaatcagccaggtatgatggcacatgcctgtagtcccagctactcctgaggaggaggaacgagaattgcttgaacctgggagacagtgagctgagatcgtaccactgcactccagcctgggcgacagagcgagactctgtctccaaaaactcccaaacacctcattttaatactttcatattaattccgtgattcttaaccctgacccacactttagaatccctggggagttctttaaaaaagctactgattatattggccccaccctaaagtaactggatcaggatatggacagagttggaaatcgctgcgtcgggattgcttttgtagtaggatggcagctgcttttatggtgcccttgtgttgattttgctacatgaaatatgatctgtcaggaaaggaactacaaagttcattttgtagaatgctaccttttcattttaaaagcccatctgatcgagtgaaagtgtatagaagcacttgttttgtattaaaattttgatacctgactctcatttatgaaagaatctgtgtatgaaatagcccaaattagtatcagcctttggatagtttaaaaaatgattttttttttggtatgcttccctatcatctccatctgccccagaactcaaggtctgtccatgctggtgacttagagtagtgggatttaaaccagaggatgcacacttggaggcacttgaagatgtttcaagggacatgcaggcattgaatatttaaaggaaattaattgccgattcttagatcttgagtgttaatcagttctaacactgaccgtcctgagaaaatgcctatggcccaggtgacctgctggttttcctttcacaccttctctttcatgattaccattctttaaagggaagacatacctttcacctaccccttatcagagtgccaagtagggggataattaaaatactgctggggctgctgggaaagtgagtgactctaatgactgggcaaaggaaccttttgcaaatgtttcccatttttgcattcagtaaaattgggcagggtggctcatgcctgtaatccaagcgctttggaaggctggggcaggcagatcagttgagcccaggagttcaagaccagcctgggcaacatgtcaaatcctcatttttacaaacaaaacaaaacaaaattagctggacgcggtggcacgtgcctgtagttccagctacttggagggcactgaagtgtgggaggattgcctgagcttagggagtttgaggctgcagtgagccatgatcatgccagtgtactccagcctggacaatgtagtgagaccctgtctcaaaaaaaaaaacaagaaaagaaaaaaaccggaaagatgacttaatcaagtggtcagctgatagattattaaatagtaagcccatggatacatattacttttgttcaaaaagacctttttccaaggaatgcttatacacggttggtaggagtgtaacttagttcaaccactgtggaaagcagtgtggtgatttctcgaagaactaaaaccagaactaccattcgactcagcaatcccattactgggtatatactcaaagaaatataagttgttctatcataaagacacatgcacttgtatgttcattgtagcactattcacagtagcagagacatggaatcaacctaaatgctcatcaatggtagactgcctaaagaaaatgtggtacatatacaccgtggaatactacacagccatcaaaaagaatgagatcatgtcctttgcgggaacgtgaatggagctggaggccattatccttagcaaactaacagaacagaaaaccaaataccacatgttctcacttgtaagtgggagctgaataataacacgtggaaacatagggtagaacaacaggaatggggcctaactgaaggtggagggtgcgaggagggagagtatcaggaaaaataactgagtactaagcttagtagctgggtgatgaaataatctgtatatcgaacccccatgacacgagtctccctatataacaaacctgcacatgtatacctgaactgaaaagttcttcctttccctactgaaaaaatacaaaacctttttccatctatatatgtatatgaacacattttctcagtgcctacatctataagaactaaacaaaataatagattttgtgctgaatcttgtctcattccagtaataagtaatagtcttctacagagactgacctgattggagaaaaagttccatctgtctcattaagatactcgtttccaataaaatgttatttatattgaataactttatagtttcttttgagcaattttgcctttaaaattgtatttaactccatttaaaataaacatttaatactgatttttatggttaaatacacaaattttatttgcagaatttttgttgcagcgtagaatagactttcaaactttaacaagatggaatactgtggaggaggtggaatggaaagttgagatcgaggagaaagggaaatgatgtactgtttccaactcttttgaaagagtttgttcatttatttttttaaaatggatatcggttgtggggatggctatggcatttaggtcagaatggatacgtttaagagatgtaatggttttatttaaaactcagtatttataacatgccagaaattatattctttgcaaccgtttaaaattacagtgtgaaaatttgaatattaaccttaaaaatgtgtgaaagagtctatagtttctccaggtctctttctggggttatgcaaacaaagatgtgaagaactgtgggcaaaggctatcatgggggcagaagtaatgaggaggacagtaagcatttatttattttttcccctacttaaaattcctggaaagatgaactgattggatatttttaagtcatagcaacattttaacagaaaagaatacttgccaaactttaatatgacatccaaaatacactctttctaagatcacttttacaggccctctcctcatccctgagcctttcttcatgccattcctgacatctagatgtcttctgctttcatcctttatcttttgagacagagtcttgctctgtcgccaggctggaatgcagtggctcaatctcagctcactgaaacctccgcctcctggattcaagtgattctcctgcctcagtctcctgagtagctgggactacaggctcgagccaccaagctcagctaattttttgtgttttagtagagatggggtttcaccatgttggccaagatggtctcgatctcttgacctcgtgatccgccgacctcagcctcccaaagtactgggattacaggcatgagccaccgtgcccagccctttattttttaaggtgttattttacatgtgcaggctatctgcatgatcagtagccattaatgaagttttaaatcaccagtctgtcatgcccaggtactatacccttcatcttttattaattttcttttttcatctgctggttttagttatcaaggcgtctagagaggttggggaggcataaggcagtcagtagagctctggaggtagggggtcagggtattctgtggtctaatctggttctgttctagcaggctgtttgaatttactgtcatgctggcctaatggaaaaataaagtttggcgtttgccttttttgttgccttcgccagagcacatttattaatatatacttaccagagaaaactgtgaggcttgactatgtaagaagcttatttgtgttggctcaggttctctactcagtaggataggagctctattctgatttattttggacagttttgaagagatagaaccaaaagacatttatcaaatgagtaaactgaagactgaactggggcagaaggggttcagttttcttttcaaatttttgagcactttaggtatcaggcagcataggtgttcttgttttcttacttactctttgagttccagttctgaggttgcacagagctgcagaagctgtcatagcatgaaaatatttaataataaatgtaatactaataaaattgctctccattcgaacatgtcttcctgcttaaaactggcttttgttgctcccatttcccatctggtctgtagccagtgtctttgtgttggcaattgacaaggataatgtgtttgatgcttcaaaagaggatggtttaaatgtcaaaacattaaaagatggccttgtgtaaattaatgtggttctcagatgttttagcaaaaatcacctctttatgaccctctctatgtcattatcatgctacaattttgtcaagaattacactaaaaattcttgactcttgactcattctttgtcatgctgagacttaggtcatggttgggattataacaaaattgattaaatatgaaacacttattttcataacattttttaggaaaatctcagataagtctcattttttttctctgtctcataattgtggattttaagtggattcctttgagtagctttcttttgaggtaccagtttccctcagatactgcatagcacagctttggaatcataaaccttggtttgaattctggctcaccctcttgccctgggtgaccgtagccaattaatctttgcagctttgattttctcctctgtaaaacaagactaatggtaccttttctagaggattgttgagaaggcttagtggtgcagttcacataaagatcattgtgtgaggtctacacaatgcacatgctctgtagcaggaccagaggctatcgtgaattattgcccatgtttctcttggatctcaattgcttttcacttggcatttgtctcggctgagtagagaattgctttttaaatgatgagaaatgagtcaacaatgcatggtgatgtaaataggagggcatgttttggttttcaaagtggaaatagccacttctattataaaagttacaatagctgattattgagggcttactttgtcctagattctctttaaagccctctacaaatggcatctcatttaatcattccaataaaactatgaactaggtaccattaagataggtatcattagtagccccattttataataggaaaccaaagttagtactcattcaagcttgtctagctggtaagtgtaatgcctgttaaaaatttttttgtaaagaaaatactataaaatataaagaagaaaaataaaaaataacagctttattgagatagaatttacacttcatagaatcccacattcacattacttcaccctgtttttttcttttcttttttttttgagatggagtctcgctctgtcccccaggctggagtgtggtgacgcaatcgtggctcactgcaacttccgcctcctgggttcaagcaattctctgcctcggcctcccggatagctgggattataggcgcctgccaccacactcggcttattttgtatttttagtagagacaggggtctccccatgttggccaggctggtctcgaactcccgacctcaggtgatccacctgcctcggcctcccgaagtgctgggattgcaggcattagccaccgtgctcagcctacttcacccttttaaagcatacaattcagtggtttttaatatattcatagttttgcaactatcactgctatcgaatttcagaaattttcatcaacttattagaaaacaccactcccatcaagcagtcacttcctgcccctggccaccactccattcccctgacaacctctaatctactttctgtctctataaatttgcctgttctgaatatttcatataaatagaatcatgtagcatgtggccttttttgactgacttctatttagcttaatgttttcggggtttaccacatggcatgtaacaatactttattcctttctgctgccaaacaatattccattgtatagatagatcacattttattcatcatttgtacatttggattgtttccaattattggctattatgaataatgctgtgaacatttgtgtgcaagtgtttgtgtggacgtatgttttcaattctattggttatatatctacgagtggtattgctggtttatatggtaactttatgtgttccattttgaggaactgccaaattgttttccaaagtagttgtaccataccttacttttcatacatgacttttctacaggtaaagtatgatagttgcaatttttctacattctcaccaaccaacagttaatagatgagtttattatagcccttctagagggtgcgatgtggtatcattgttttgatttgcatttttctaatcatgttgagcctcttttctatgtgctcattgaccatttgtatatattctttggagaaatgtctgttcaaatcctctgcccatttttttttttttttaaagatagggtctcactgtgttgcccaggctgatctcaagtgatcctcccatcttgacctcacacagcgttgggattatagacgtgagccactggtctcagctcaaatcctttgcccatttttacgttagattaattgtatttttatttttgagtcatgtactataaatggtatgttatttttatatatttttaaatgagattaaatgacaattttgtaagttgctttttaaacttaataatcttcccatgtctatatctaagtacatcagttttactgactgccttatagttcattatatgaatgttctataattttaaaatctaattctttgttttttcacccaggctggattgcagtggcaagatcttggctcactgcagcttccacctcccaggctcaagcgatcctcccacctcagcctcccaagtagctgaaactagaggcatgcaccactgtgccgggctaattgttatatattttttagagacagggtttcgccatattacccaggctcgtcttgaaatcctgggctcaaacaattcacctgcctcagcctcccaaagtgctgggattacagatgtgagccactgtgcctagccctaaaatcgaattctttatacgtgaagtttatttaaaaggaaagaaaaccccaccaggctatatctacatttgaatgcttgtgcaatcatttctttaggatacattactagaactggaattgctgggtcaaaaagtgggcatgcttcaaggcctttgaaaaatattctgtacttgccctccagaaaggttgtttcagttatacccttatgctaatgtcttgagattgtcagtttcttacgagcctcccagcactaggtaccagtactttttgttcatcttttaaattttatttatttattattattattcttttgagacggagtcttgctccgtcacttaggctggagtgcagtgggggcgatcttggctcactgcaacctccgcatcccgggttccaacgattctcctgcctcaggctcctgagtagctgggattacaggtgcgcgccaccatgcctggctaatttttgtatttttagtagagatggggtttcaccgtgttggccaggctggtctcaaactcctgacctcatgatccacccacctcggcctcccggagtgctgggattacaggcgtgagccaccacgcctggccagctcatcttttaaattttaatctaagaggtccaaattggtattatatacttcttttagtttgcatgtacttatgaagatgaagttggttgaagtttcctttgtttccaccattggacttatttgctatgcctggagatcacttcctgtgccgcctccagacctctgctgggacatcccttaatctaggaagcatttcccacctcttccctcaactgcacaggcacagacatgttctctcatcctcccttgcacgggtcctttacaaggccctgggcgggttcctaggaatgtttttacatgactgtgttttttattaagtcttcagaagtaatatatagtgtgtatttttttttcctttaaaatactccactttgccctctcacataagtttcagagctccataaaacctggatctgccctgcctgggacattaggtgtcgaatgtaatgctgaattgaatggaacccactgagtatattgctccttagcgctcttaatgtttaggtcaggagccttttgttcaaggaagcttggttaccagtgagtgggctcctgaaaactatggtagcagtgaaagaaagactcttggaaaatggttatgattaatcttgtgtgcagtgtctgtgtatatgcagtcatgtgttcccaaaccttattaacaagatgaaatacctattttagtacacacttgattttctggataacccaatggtggtagtaggcacccaaatagcctctctcctaactctttggttcaccttgtttaaagcctttagactgagtaagaatcttttggaccctgtttttttggcttgaaaatttgcccaatttgagtggtgggtgatatatttactagttttctttattccttgaacttacgatgagtgtgtgttttataatggggtgaaaaaaaaaacagtaacctttttgttgaacagacagaaaatttccaacttgcttttagtgagagctgagacctgacaatgggagtgaacatgccgggcttgattccagccaggttcctgtttagaattgaggccgaggtcagtcagcaggtgcttgcgttctcacacagtccttggaaccaagcatgctgtgcactgtgattgtaggactgaacacttgcacattaaaaactcctcctcatttcccgagcacttcttgtgggatgctgctgcgcatttcgaaagacagtgtttttgctataatagaaagctgtgtccaccaggggtagaagggaacacacgagagcaggtccagagagaaaaaagaatcagaagaggctgaacctagtattgaggcctatgaaaataagatgcagacatcatacttgagaaactgttaatggaatagaaaagcttgaaaacatagtgaatacattcaattttttggtctcagcacaaaatcactggagagaaaaatgtacgtaacaagtgtgatgtgtttggtgctacagggaagggatatagaatagtgatactcttaagcatcatagaagcgatgggaacatcaggccaattactgagaaatttcctattgactgaaatcatgtgtgacagtttcagaaataatgataggctctcgtatatgttggtacgagtttactgtaaaaatcaatagcccgacttggtgctcaggctctgttttctccttcggtgatatcgaaactgactttcagccctttcattgcacttgtgactccgggggacacgtgctgatttcctggttctatcctaacggtgcctgcccttttctgtttactccatgtcagtgcaggcattgataagaattctagtcggtggggtggtgaagacatcaagagaccttaacctggggtttccttgctgtatcttaaacttttgaccaccattcttacatttgctgtgatcagtttgtagtctttatgtgtaatactttttctccccaccttcctggggggaaaattccacatgtaaaggatttgtcaaattggtgataagaccaaacagccttaggggacatgagaagtcttatgagcattgtagacctgctggtgagctagggggtgtaggctgtgtggggtactttctgttctttacttagagatttggtagggaaagttctctggaatttcagcagttgttctgatgtcatgtgtaaatattatctttctgtgttgcagcttggggccaagcttttcatggaaactgctgaaaattatttagtggcatagtagttgtttttgaagttgaagactttatacccaaatccagatggacgaatctttcactttcttgctacagattttgtgaagaagtgttactcaaactttaggtgacattaacaccataagtgtgttaggggaagagctgggataaagggatggagatgctttgagctgctacagtagtttgcacattcttacctgtctgactctatttgccatcacatatagaatgtggagaatgaccaagcaatcttaaactttaataattgggtttacataggaaggaaacaacaggcaaatctaattgtaaagcagagacatgcatttagtacatagataattggaccaatttcagagacagaaatgaaggaaaaatgagccccacaggcttgagggtcaagctaggctgtaagacagaaattcactctgcatttctaggaagatggcttgtggcttttacacaggaggactctgaagaacctgctatatcaagtgtcagttatgtgcaagaaacgggattagatactgtggatgaatagggaagtttactagtccttgaccacagggagttcacacattaatacacatgaaaacaaaactgccagggtaaagcccagtacatcctaaatgccaagtgaatgatatacacaatagccagttgctcagtggaagaaccagaaatttgcctggggaaggtctgtgtagacttgcttccatatctgcactgactttgggggtcaggggatctcttaaggctttgaacaaacacggtccatctttcttggtgccagttttacttaagatttggaaggaagatttttatattaaaataaactctgccaggcacggtggctcacgcctgttgttatcgcagcactttgggaggctgaggtgagaggattgcttgagcccaggagtttgagaccagcctaggcaacatagggagaccccacctctgcgttaaaaaagaaaaaaaaagattaaaaaaattagctgggtgtagtggcactcgtccgtggttccagctacttggaggctgaggcaggaggatagctgatcactggaggtcaaggctgcagtgagacatgatcacaccattgctctccagcctgggcaacagagtgagatcctgtctctgatagataaatacataaataaaaactcaaaagctggaagagagtgctcagtttgcatacatcttaaaaatagatgactagtcctcaatatttttcacactttgggcaggaaactgggaaggccctaggtctccagtgcagatcgttctcctctgtcagtaatttgggggcaaagtttgaaaagcgctgatgagagattagcaagggctatctctgtgccctgtctcttcttctttccttaataactgagcgggtttagtgaggagcagttatttctgtgacataaatgggtgtgctagagattcatgattggaagtgattaataattaactgtgaagaattggagcacgacttaaagtacgtcgtgtttagaattagttaatgggaaggactggggaccctttcccaggggtaattgtagcttctgctttttcaatcaacgtctttggatcctttacttcctggaatttatagagcagctgttcagtgtgtctgcattaaaggaatgagtaggtgaagtgacttgcagtcctccctgggaagccagttctttgtgtgtgtgattttggggaggggaagtggttgtagggagtatccactggggagtagcactgcccacacattaacttgagccactttccggctctgtgatctggggccttgtttctgcatgtgtagaatggggatgatactgactcttctaggcttgtgaggatggaggtaatgtgaataaccattagggattcagcaccatcagggtggtggctgtggcggctgtcagggataatggtgctgatatcattgagaaggggcggggtggttattgctccagggaaaagtctgggccgtggccttccaggcaggaccgtttcaaatgcgtgtctcctcttgatgttctagctaggaagtgagtctacattataatcactagaaccattgtacattgctataggaaaggacacgtgctgttaaatacagatagaccttattttgcaccaaatacattcctgaaaactgttctttttacttagttattttttaaattggggtacaatagacgtaacattaaatttaccattttgaccatttttaagtgtacagttgagtggcgttaagtatacccatgttacagagcaactatcgccaccatccgtctccagaaatcttttcatcttgtagaactgaaactgtgcccattgaacaataactcctcattcctccctcccgctcaagcccgtagcacccacccttttacttccgtctctgtggatttgactactctgcgtgcttcataggagggagaatcatacgttacttgtctttttaggattggcttctttcatttagcgtaatgtcttcaagatttatccatgttgttgcatgtgttttctgtgttttttttttttttttgttaacatcatgttgttattacacaagaagtgcatgtttattttacagtttttcaacagtatacagaagaataaaaagattacattattcccctacccaacataacttttgttattttggtgtatgtgcttctactgagcctgcaacttaaagcagaatcgtttagagtgaaatcttacacgtgctgccctgggacctctggttttcttgggtgtgagaggaactgttgaatgtaaattttcaagagagtgagaaatcaagtgtgggtctgtgaggctgtggtgaaggagccggaggagaaacgtggagtggtgaagtgggaaccctcaaccgccatttgtgaaatgggacgttctcacctttgaagcttgagcttgtgggttttgagttcctgttttgtgcccttttaatgtcaactttcagagttcataagtgggaagaaaataggtgtcctaacttacattgtgtgcagataataggagacttaaataaaaggcgtgtgagaagcaggcatgttgcatgccaagcactaggggaaggaggagactgggatggaagtaaacgtgaaggcagtgctgcgggcagagggaccgccctctgggctccctgggactcggtctgtgtggctcttccaggaagcgtgacccttccccctgcctcatgctatttctgccagaacgctttggtgccctaccgagctctctcttctcgtttggctccacccagtaagatggagttccttaagagcaaggtccttcagttatttcttattttttatccccagcacctagctgggttccctcgccctagccagtctttaataaatgcttcttggaatgaaagaatgagagcctgcccagaaggtggtcattcccatatctcatcgtgtgccacagcccatttcatttctcacctcacctccccatccccatcctttgtgaagtccccttcctggagggcctccccatcctcccactatcactgcccacagactactttgagcaatgggttgcttgaagccctgccttgagttacactgggtgatctagaccaggcagaggaaatccccattgcctttgcctgggctacagagcttgggttttcccttagtccactctgatacatggtagttagactttataggacttaaggatgagtaggtttttgtggcttggtttgctcacctaatcatcaacgtactgtgtttcttagttcttaaaaaaaatagtttaaggccataggattacctgtatttttaacttttgtgcccttagaattttatgttagaataaaatctgaaatatagtttcttgtgactataattcccaaatgttatgtcaggcattggcaagccatgttatttaaaactgccagaagtatgttgccttttaagtggaagtatttgtgaaacgtatgaatttcctagtatccctctaggctgctgtgtgttgaatggaattccttctataagacgtgagattaggcagtttgccttaagctagcagaggggactagctattcattttaggaatgaatggaggccagagagaagcataataagccaaaacttaaaattcagaagggaaatagcactacattgtttaggaggaaactaaatctgtggcataagtctgaaggtaagacttggtaaaaagaaggggaagtctttgaggaagaagaattgaggctttagaaaatgcaaaggctgacatttgcagagctggtcggctagttgttttgaagagggtgctaatgggaagcactcaggaggttgtgtgcttctaattggcctcaagttttatagttgaattttcatggatcgttatcatattattattgatgggattatggagaaaagtctgcggttagtgttaaaagaaaattaaaatatttccaaatcaaggccacacccagaaaagatctcacctttactcctgcagtcaggctgatagattacatagcaagttgtattttgttttgtaccccatactcagggtgatacccaaggttttacctaatcagaggaggcctcagccttccataaagggagcatgttctgtttgattatcagccctgcccttacttcatgacatagttttctcattagaaaattcatgtttattgtaggaagattaagtaactcagaaaagaacaaagagaataaaagtcgtcatcacccaatctcctggctgagaactgatttaccagcacgtctcactttaggttttctgtctttcccatgtttcacttctgttttttttttttttttttttcctgtcttagctgcaaagtctagtggggaatttggcccctggctgctctggattgccattctcagagctttgcattctcaggagttcccttccagggcatgtagcccaaggactctgatggacctgccctaggtctctcagcagaaggaggggcagcagctaagttgtgtgtgtcggttgaggccataagcgagggctactccctgctggcagtccaggtcttctcccacaacactttgtaaattttaaaaaggccaaaaagaaaaatagttgctaatatcaaggacacagatatatgttttaatgactgacattgtttgcaggtaaatatgtcaaagggagagttatatttttatgagctttatgtgtgtcttattttgaagacagtttatacaataatgatgcatgctttttattttaagggactttgtaaagaagataaagcttgtctaatagtgcatgggattgcttggtaggaggcctaggtttgtttcttagctcagctgtttaaccagatccttgactttgggcaagcacccctctgggtttccatttcgtggcctggaggaggagaaatttagaccctgtggtctattaaggttacttccaacataaaactcccatgttatgggttgaagcctgattttatcactttatgttatttagaggatttgtagctgtgtcatagattttgtgcagtgtcgccattgctgtgatttatttggtgcctttggccaggatgtaacccttcaattacagtgtagttcccatgggaaggtatgatattggcttcatgttgtgggttctaggaatgttccatggaggtaaagcaggggctatctctgtaagtagtttcattggatggctcgtgttttaggaccacactgctgtttggctagtgaagcatacgtaatgatgctgagtgtaatagcacactgtccaggtatttgacaggcatttctctctggtttatgggttgatgcgacttgatacataatgattattctccttctttccaatgtgtttgagtggtgcacacaaatcaggcatatattggaaagttttaggattttttaaaaggatttttccgtttttaaaaacttgaaatagtgattgtgatagtacctctagagccagtgcctgttctttcatcacaggtttaacagcctcataagtaaatccttttcctttcagtttctttttttttgagactggatctcactctgtcacccaggctggagtgcagtggcgctatctcggctcactgcaacctctgcctccaaggttcaggcgattttcgtgcctcagcctcccaggtagctggggttacaggtgcacgccaccacacctggctaatttttgtatttttaatagagacagggtttcaccacattgaccaggctggtctcgagctcctgacctcaagtgatcagcctgcctgggcctcccaaagtgctgggattacaggcgtgagccaccgtgcccagccctttttctttcagtttcttaatttctttttattactcttgctgcctaagtctaactgattcttctcatttgttagtgggtttcccacttaaatcttctctgtatcagtgtttttcaaatattaaggcgcacaggaatcatcgagggatcttgttagcttggagatgctgattaagtaggtctgtggtggggcctgcgattccacattcctttattttttatttttattttttttttgagatggagtctcgctctgtcgccaggctagagtgagttggcacgatctcggctcactgcagcctctgcctcccgggttcaagtgattctcctgcctcagcctcccaagtagttgggactacaggcacgcactactgcacccagctgatttttttgtatttttagtagagatggggtttcaccatgttggccaggatggtcttgatctcttgatctcatgatccgcccacctcggtctcccaaagtactgggattacaggcgtgagccaccacacccagcctgctactccacttttctaacagactcccaggcgatgcgatgctgctggtctgtggatcatagtttgagtagcaagggcataaagtttgtgtaggccacacttggtccacctgtcctctcatccacaggcctctcttctcctgtccactacctgtattgttcatctgagaatcatttatccctaacttcaagtttccaacacatgttttttgagcactccctcctgcagatactgtattggatagaggatgcagggatgaaggacgcactccctgccctcaggaagcttgctgtcttggccgggcacggtggctcacacctgtaatcctagcactttgggagtccgaggcaggtggatcacgaggtcaggagattgagaccatcccggctaacacggtgaaaccccgtctctactaaaaaatacaaaaaaaaattagccgggcgtggtggcgggcacctgtagtcccagctactcaggaggctgaggcaggagaatggcgtgaacccgggaggcggagcttgcagtgagcgagatcacgccactgcactccagcctgggtgacagagcaagnnnnnnnnnnnnnnnnnnnnnnnnnnnnnnnnnnnnnnnnnnnnnnnnnnnnnnnnnnnnnnnnnnnnnnnnnnnnnnnnnnnnnnnnnnnnnnnnnnnnnnnnnnnnnnnnnnnnnnncatgtctattctgttgagcgggcgtgtaggttttggggccttgagagagggcctgcatttattgtttatatgtatctttgtgtcccttttgtctgggacaatacctgagacatggcaattaaatgttgaatgcatgaggttatttaaccctccatgaaagactgaagatccctttttaggaatcagatgaccatcttttttcagttgcacttctgacacaaagctcatgttggctacagtccattgatgttttaggatttggggttattctagcaggtacttgtgactgacaatagtaaatgaatcttgcaagggggaggtgaaagtaattttcatcgtaattatcatttggtgacttgttgccaaatcttcagttttttttctttgtgggggggcggtgatgaggtctcattctgttgcccaggctgtagtgcagtggtacgatctcagctcactgcagcctccgcctcctgggttcaagcaattctcccacctcatcctcccgagtagctgagatttcaggtgtgcaccaccatgcccggctaagtttttgtattctttggtagagacagggtttcaccatgttgctcaggctggtcttttgaactcctgggctcaagtgatccgcttgccttggcctctcagtgtgctaggattacaggcatgagccactggcccaaatcctgagtttcttctcgtcttttttatagtgcattgatccaaatcaggcaagtgtatgtgaccccacccctgccctgatttaatgtttacttccttttcttcatagttttataacttgttgccagtgaaaggatcagaatttgggggtctttcgtgtttgaggaaacgcagcccaggaagggaacccaacacgttttacctggcagcgtgtggctgagcctggagtgtcatcttgggcccctgactctgaggtgaaggctgtttctgcaacatttgggtctaacctcgtccttttactgcgacctgcctcaggaccaccttgcatttgtctctcttcagtttcctcttttttggtactatatgcgtacaacttcgagaagcttctgtaattttagttcagtttgtgtgttgtgcagccataccattaactgagcaggttcttttcctcaccgtctggtctgaatttccttgtcctgcggaaaggcattgcctgccacgccttgttgagttctctcatctctgaaataaagaggaaaatagacgttatacattttgaaagcctcagtttacttccaggttttggcataatataaaacaggttacagcttgcctcttcaggtggattatttagtcgtaaaaatggaaacttattgatagggaaaacccagcctacgaaaacagaacagagcgcaagactgcgtttgagctcccagcagttggcattggtagatttgtgtgggtgataaaacataagttttgtatttgatgtatccttttccagtgaagtgggaaaactgtgacatgtttcacaatattgaaaaaagcgtaccagttttaatatagagtgtgaagtctggtggcagtaatgcagataaaccattcccctttggaaatttaggggctttaaaaacaacaaaacaaatcacaataaggtaagaaaaagtgtaagttcaaaagcaggtaaaggaggaaaatacttttaaatttaaggaggaaattgctttctcacttgcattctttttaatgtttttcctactttccctaaaataacagaacctggtctcttataggttctctgcctaggctgtctcgtaatgtgttcatattaaagttgctgttccacaagcaaagcaggtacagcgtatgcctctgtttcagagcttccaagcctaatagaaatagtcttggggagagagggatttggttgggggtgggggagccaacccctccctcggagagtgtgggccacagatagggtagactttgaaactcaagagaaacatctgcaatggtttcttatctgaccatgcacagtgtatggtgggtcacaccagtctttgaattttggcaccctttcggtagggtaagtttctgtgggtctggcctccgagagttgtggcctccggattaaagaggtgggatccagtgagctgaggaagaaccttccattgcttttatccccactgtccagagggtcccagagactgcccatcagttgcctgttctgtgatcactggtgatttctgggaggttttgtgattaattttatctcggtgcttatgagaaatgacacttaacctcatgtctttgaaccttgactttcatctgtagaaaatggaaatgttctgttccatagagagtcagttgtacttgcactggtaaaagaaatgattgattactttgaatattctatttaaggaaatggtacacagcatacttctaaaatgtagatgggatggaatcctttttacaaaagaaatgaaagtaaaatttccactaaaattggcaagcttttgtgggtgtacctgtttcatcttcagcatgacttgaagaggaactttagtcagtgtatatgtttccacttactgaaagtgagtatgtaaagtaactaaacctatagtggactctttatttagaaatagatactgctactttggaagggagtggattgaaagagttgaaaaactaaagagaagagaaaactgaatccttggggggaaaatcttaatgcaagcacaaatataacaccaaattaaatctaggaggaaaagtagtttgagcacaagggaaaataaattttaaaatttaagggtatgtgtacgttttatgtcacgctgtggtatactctctggtctgaatccttgtgataggaatgatttcatttgcttcaaacacctccctttttctcccctacccccttcacataacctgtgggagattttctgtatttggcttatgcccatgttttgaagtcacacagtgtattaagtaagatctgattgcaaaaatggtctctgttaaaacaggctgttacacaagatgttaccatatgttcatttcacgagacctcacacatgctttaaggaccatcattatttcaaatctaagtagtttatagttcatatttgtgtcaaatattccatttgcagcctctaaaattcttgccatctctgttgtcctttttttttttttttaggtctgtgctgcttcctggagaatacaaactccttgtagtcagggtctgtgttttatacttttatccattcactacacctaatgctgtgttggatataaggtccgggaaatactgtgtaaaaattgctggttgaattttggcagatcttggtaacgtgattatcaggatattccaggggaagtggcattagtatacttaaactgatagtttaagtgtcattaatttggtggatggtggcattttggggaaaagagccggtttattggatgataaatcaggaccctgatctagacaggctgcattatgagctaaatcaaagaataaattcaaaagatattattaggtatggtacagtactgggacatgaacgagcagtttccccacaggaaggggaaatagaaaaacgcccaaaggaagtactgtaggtgagagagacttgagggttgttagagactgcttgaaaagagaatgctgcataggcgtagtttgaagttgagggtcttctgtccagggtaggctggcttgctgtacttggtgctggcaagtacctttaaaaggtattcattgggtattttcacaagcacatttcactcatgcaagttcgacctctggagcatagcaaaaagtgagtgatttcgtcccactgtttgactgagttgatatctgacattggaccagcagcagtgacagaggtagctcttaggtcttaggatcgcagctgagaggatgtggctgactcagtagttccaagatagcttcctgaggcccccccactttcctgatgtggcagaggcaccagcaccccttgtgggccagttccatgtggttctgggagtctttcctggaggcccggcatagagcctgctcccttgaactcttcagtgattttataagcacctaattctctatattaaatccctttctgcttaaaatagctagctcatttcctgcagcctgactctggctgaggctgaagaattttataatgggaatgagctgcattggaaacagaagtgtcactgcaagtatcctggaatgagcagcagatagatggataaatggatcagtggttcccaaatgcatgtactcaggttccttctgctcccctagtggatgcatgtacactggaattgtctgagagagctattcctcaaacacagattcctaggctctatccctagaaattctgatacgggggaagtgctggaacccttgaatccatattatctctgagagatggccacattggctattactggactaaattatttcttgactctaggagccagtgcccatgagaattctttttaaaagggaggaagtgtttaggagctacacatttttaaagattccactacagaggatataccttttcttggatataaagggattaatcctgtaaatactgtcagaatgtgaactctacaggatttccctcttttgttattactggaggaaaggaatatatttcaaaaatgttactgaatccagaataaaaattgagttgtctgtaatgagagttaaaaattcatgtgactaccttattatacagtattttattatataaacgtggcattttacagtataatacgctattttattgtataaagtgctgttagtatattttcttatctctgtttatagttaaaggaaaaagacaatggaagttatttaaaatccggaaatgcctcctaagaagagaggtcaagggattatttggagaactggcgaatttaggataattttgtactgttagagtttgctgagctctggaagccaggtgttttaaggatcacatgtctggtgtaagcacttgttcttctcttattctatttccccacctctccaccacctccccaccaaaccccagtcctgatttctgcccttctcttcatcttctggcccttttaaggtgcatgctaacagatgaagaaggaaatcaccattgttctccagtctagtagagcctgcttgattgaaattgattagctctagatgattggagtccttgtagcagcaggggttatatgtcaaatggatctccactgaaggccaaagctgttcttcctctgcagctgccaggctgcttgaaattaggcagaatgattttgcacttggataatagtcaggaattaactgcagcttacaaagcactgcataattatgggaaatgtggatggtgctaatcaaatgcatctgcatatggcattttcattatgtacaggaggcgtatgtgtgcacagaaagggaatgagcttgtgtagagcttgtatgggtacatgtgtgagaagatgcatctgtagaaatggcctcctctttcctacatggaatcctgacagaatgattgaattaggagtctggcgtgtgtgcttacttgctattagtgcttttttttttaaaaaaaaaaaagctttattgagatacaattcacatggcatacaatttgcccacttaaagagtgcaactcaatattttttagtgtatttgtggggttttgcaaccagcagcacactctaattttagaacacttttatccctcctaaaataacctgttggttcttttataaagaaaatgtagtttgtacttttcgacggacactttttcttttttttttaagtgggaatttcagatcatcttcagccttttgcaaaattatactgtttctcggaaagcatttgtttttataaatagtcataaaatgtttcttaacgttccaaaggttacctgctgacttttggacacaatctcatgaattatgttttagttgctgggttcatgtacctactagttggaatcttttcagcttcaagtgacagatttcactcagctagctgacgcattaaaggaactcattggccctggtaacctggaagaagcaggggtattagcttcaggcacaggtggatttagggattctctctctttctcaattcttttttttttttttttttgaaacaaagtttcgttcttgttgcccaggctggagtgcagtgttggcgatcttggctcaccacaacctctgtctcccgggttcaagcaattttcctgcctcagcttcccaagtagctgggattacaggcatgcactaccacacccggctaattttgtatttttgtagagacggggtttctccatgttggtcaggctggtctcgaactcccgacctcactttatccacccgccttggcctcccaaagtgctgggattacaggcgtaagctaccgcacccagcctccttcttaattcttttatttccacattggccacgttcaccccattataagtagggggactgcgtgtgggagtggggcgcacatctgcagcagcagtggcggaggggaggctgccaatcaggtgctgagcctcacctcagtttgcctgtattttgtgtcactggcttataaattactctaggttttgatttatttcttcattctgggattacagatctattcattcaagcagtggaactaaaagaaccatctcaggcatgctgcaataaccaatgttgctgattcagatggttagtcaaagcatttgaaccaggcccaggctgtgggtgctactttctaaaagattctccccaagccaagggttaccaacttggacctcctcttacagtcctgtttgagcatgatccacctgatcaggcaatttctagcttaatctctttctaaacttttcattgcctggttcagtaccttattttccttagtaggatcctatgttttttgcatttttaagtttcttagttgtcttgccctctaacatttacagcattcgtaatttagcaaatcactaaatgttgtatttgtgattggcatgaatagacccgatatattttttaagctgaaaaagaaatataaccaacctgacattggtttttaaaagtattctatacatacttttattgttttggtaaattagatttggtgaaggttttggttgaagtttgggaaacgttttttatgattctgcagtttctgacatgctaggatgaagccagctttatactgagtaattaaaaagaaatattatgaggcctgaattgtgattttataaatcaatgacaccggtttgggaaggttttctttcactcaacaaatgttaccgagtgagtgttctgtaaatacaaaacagcaaaccaaatagaccaaaatctagtggaccttgcagtctaataggatgtgagaaagagaaaactgcgaaactaaattttatggatgttataaggtgatatgtggtatagaaaaagtggaaacaaccggtcaagggaaaagaggatgaggattgtggtgtgggctgcagctataaacaggaggttgaagcttattaagagggtgagattttacaaggatttgaaggaggtggaggatttatttttattttttattttttttgagacagagtcttgctctgtcgcccaggctggagtacagtggcgcaatctcagctcactgcaacctttgcctcccgggttcaagcgattctcctgcctcagcctccctagtagctgggactacaggcgtgtgctaccacgcccggctaattttttgtatttttagtagagacgggatttcaccatgttagccaggatggtctctatctcctgacctcgtgatacgcccgcctcggcctcccaatgtgctaggattacaggcgtgagccacggcgcctggccaggagttggaggatttgatggagatgagggagtttgccatgaggctgtctgggtgaagaatgttccagatagagagaacagccactgcaaaggactttaaggtaggaggaccatatacttgggatattcccagtgaagccagaagacccttgtggtgagagcaccgtgggtacagacctggagaggggtgtggagttggtgaggtcacagggagagcacagcgtgaggccttggaaatgcggagttcttgtggggattttgagcagagcagtgatgccatttgaattaggtttaaagaggccatgctggcagtgctgagcctgggtggcagggaaaccagtgaggcccttacagccaggaagcaagagatggagagacatgatgggtgcttggatcaggtgtggcagtgggcctggtgaaagcggagctcatgggatttccgatggatgggatgcggggtgtgagaaagagaacagttagggatgactccagggttattggcttgaacaactgagcggagatggctgtgggcagttgggtgtgggggtaagatcaggagctcagtttcacacctgttgagttttgggatgtcttttcgacattccagagcacatgtggatgggcagttgggaagggtgctgggctagagatgtaaatttggggtggtgtttacagccttcacgttggatcagataagcattgagtcattttagattgcttagaaaagaggaccagggtctggagcctggggtgtctctgcattcagaagggtggtagaggagactgagaggtggccagcgagttaggggaagtgaagcaacataacaaaaccaattatttaaaagctaacttttgttagcttttaaataatttattaatgtggaaatatgctgtttgaatcaaaaaaagaaataactataagctgtatttaggaagagtgtaccttcctattgctcttgagttttcaaaaagcacatcgttctgaacatctttaatattctcacaggttcagaaccattttggagagtcaggcaaaaggaaagtgtctgatattctactcatcctaacgttgctgttaatattttggtatttgccttctcattttcctttgtatattttttttagttgtaatcttgttgcacacagcagctttgtttccttttgtttacttgtcacggcaacggcagcacttttttcatgttgctgtttacaatcttcaaaacacaatttttattggagcgctctgcttcttttggaatgggtatttattgagagaaggattgaatggacaaaaccacgttgctaccagctgatctttgcttttccctgccttcctgcacatctgcataggattcataccgtgctttgtctggggatggagaatgctggaaagacaggggaagttgttaggatctgggctgaaaatccaggagcaagactggggcagacctggccactgggggggttaacaagctgctgatggggcagagggagtgagggcctgtggagagggactcctgggcttgagggaccacgcagggccattctttcttttgcagacatcttcagcaataacacttcagtgcctcaagggtttgaaagaagaattacaatttaaaaggaaaactcttcatgtatgatttgcatatgagtggcatctgtataattaagaacaattaagttccctgagctgaattgaaagggaggctcctgcttcagttgctgcagtgcctgcagtgcagcctctagctgtcagggcactggagttctgttggaggcattctgcccacctccccacaacctctaataaaagaaatcctgaaacactttgctgggtgcttggcaaaactctttacaaacacatttcatttaatcctcacaatggatttagggggtctgtgtcagtcagattctctagagggacagaactgacagaatcgatcgatctatctagctatctgtcttgtctgtctgtctgtctatctatctccctccctccctccctcccttctatgtatatatataaaggggagtttattacaaagtattaaactcacccgatcacaaggtccaataggttgtctgcaagctgaggagcaaggaaaccagtccgagtcccaaagctgaagaacttgggagtctgatgttccagggcaggaagcatccagcacgggagaaagcataggaaaaagatgttggctgggaggctaagccagtctagccttttcatgcttttctgcctgctttatatcctggctgcgctggcagctgattagatggtgcccacccagattaagggtgggtctgcctttcccagcccactgactcaaatgttaatctcctttggcaacaccctcacggacacacccaggatcaatactctgcatccttcaatcaagttgatactcagtattaaccatcacagggtcttaccttaattttataatagtggaaactgaacttctgatcacaagagcattagatgatctcttgtactcatctttatggttaactccacctttgtagattgttcctgattgggacccagtgaacctgttacaggaaagaggttctgatctagaccccaagagagagttcttgaatctcacacaagaaagaattcaaggcaagtccatagtgcaaagcaaaagcaggtttattaagaaagtaaacgaatgaaagaatggctactccatagtcagaacagccctgagggctgctggttgcccattttcatggttatttcttgatgatatgctaaataaggggtggattatttatgcctccccttttttgaccgtatagggtaacatactgatgttgccatggcatttgtaaactgtcatggcgctggtggagtgtagcagtgaggacaaccagaggtcgctcttgtggccatcttggttttggtgggtttcggccggcttctttactgcaacctgtttcatcagcaaggcctttatgacctgtatcttgtgctgacctcttatctcatccaagacttagaatgccttaactgtctgggaatgcagcccagtaggtttcagcctcgttttacccagctcctatttaagatggagttgctctggttcaaaagcctctgacaaacctgtaggaatttagcctcattgtttcttccactgctgtgttatatctgatggactcctttctccctagactaactgggaagcaagatgcaactttccctgattttttctcttctgattttgcaagaactctgcagtttcacacaacactgaacaactttaagtagagcgggaacacaagtattttcccttgtaaggttcctgccagccaccccacaggaaggaggtaatgtgtatcggtatttgaggatgttttaagcaatcttcaaagagtaggataattcttaccccttgccttccctgaaatgtaaatggcagtggttcttattgactatgctccttccaggactttgttccttccaggtggggatgtcacctgtgtgctccttctagcacctcttttctttctggtgtggccacatcagtctggaataccctcccacctttggttccctgaagcatctcatggaggtccttgtacgtccctgcaggtctagttacgaagcagaaggataggctctaaaccagtcacatgcaggcacttcccagtttacatcagtgcagggccaaagccaccctaggcccccaccagaaccaatgggttttcccagtgaaagacagcaggaaccatcctttccatacttaggattttctttgttttaccatcagatttgggttatgtttgagtgacttttattgcttcagccacttagctttctggtttattgggatgctctgcttctggccgccctgaaaggctggcactgctgaaaaacccgcctccctcagggcaagcaggggctggagtgatgaggccatgtagtattagttccgctgagcagctgctgctggcaatttctggtgttggaaaagaatgggaagctgttccagttagaattaaagcttacatcttaagagagtgttttctctctcctgagagagtctgcagatatgcagccgctggctccaggaagtctttagggaccccacgtcgccttccccagggtactgggatctcctactcgtgggacaaggtggagacgtttgttttcctggcagcagtttggaaactgccggcgcgatacttcggctttcaccccatttgctggaacttagtcccgtggccgtacccagatgcagagaagccttggaaatatgcccacttaaaaattccattatgtgaaagaagacgagaaggggggatattaggggccaaagagcaacctctgtcacagaaccttgggaaagaaacagtgagatctttaccattatttctcaaggaaaaattgcttttcatacaacatatgtttaagtcacatacctcccccaaaagggggggaggcggaaaaaaacccaacaaaacaaacacccagcagtcctctgacttgtgttaaggagtccttgtttttctgggcacactctagactggtttctccagtgccagtgtttgttgggtttcatataagaaaaatcgtttttaaagtcctcctctgacagtggggttatattatataagtgagcttggtgatagtaaattatactttatgggcaagtgtgtggtctatgctagtctgctgactggacagcatgaaacttaattaaaaaggtttctgctgcattccgttttaaaaacattatgttcagaggctagatttttttttttttttttttttttttggaggagagaagacttaactttttgaataatgacatattgtctgggtattctgagagatgggactgggccctggtggagtgaaacactgatatacatgttagtattgtgctcgactgtaacagctgctgtgaagcaggaggctcccttgctcctgccggctcctttactcatgaggctggtccttcaaagaatagttagaaatttttcattagatttttctggcaatcttgttaacattctttgtatttgtctgaagatcattttgagatatttgctcatattgggactttaaaaaaaaaacacctgtcagggccgggcacggtggcttacgcctgtaattccagcactatgggaggccgaggcaggcggatcccctgaggttgagagttccagaccagcctgaccaacgtggagaaaccccgtctctactaaaaatacaaaattagccgggcatggtggcgggtgcctgtaatcccagctactggggaaggctgaggcaggagaattgcttgaacccgggaggcggaggttgcagtgagctgagatcgcgccactgccctccagcctgggcaacaagagtgaaactttgtctcaaaaataaaaacaaaaaaacaaaaaaaaaaaccccaaaacaaaaaacatctgtcagttcagtgtgttttagtaaaatattattccgggtcataaagttacataggattgttcttcggtcctactgagaaactctagaaattaattatcttttgtacttcactttttatcttatcagcctttctgtgatctgtatgccttaacttgtgttttttcacttcgttaaaactcttcctccagccttacctgaagacagcacgttcagccttctagatcctactcaaatgccacctcttccaaaaggcatttcctaacctattccacgccaggtgatctcttcctcttgtggatacttaaagtactgtggactgtgctctcccttgtatcatatgtgttatgtattgtaggaggtgtgtgatacatacataacactgtgagcctgtgaaagttaggcagcctgtttttatttgcctttggggatttctgaatctaactgccttgggtagatagaagaaatgaatgttggtgggatttggcatgtctgcctttacagtatgaataagttcagctaccaagttgcttaaagtgttatagatgagctttaaaacgtggctagtgcacctttaggaaactaataacttaaatttttatggacactttgagaactcacggttggttttctaaaaataacatgcacggtaatgcatgagcttgcattgtccacccatgatcaaagaggaaaaagtccttcatccctagactcccttatctgcttagggttcgtgtgaatttctgctttggcttcttttttttatgtatagtgtctggcaaactctgttaatgctggaggtatctaatactgaatgttcgtgctaacttgtcctagagctgaaaggtaatgcaaaatgtattttgtattttgcagatgttataatcacatttcattattttaacatatagtagagtgacctaccctagcgtctaggaaagatgtcaaatctttaaaccacagaggagaagccatgaaagtaaggagaaagttggaatgggagttggagtaaggagaaagttgggatgggagttggggaaatgtgagcttaattgctggcctattctttaatagggttttgcaaagtcctttaactagttggctaaagtagatctttatagtatgtggaatgtggtaagagtaaatatgtaaatataataatgtattttaaaattctttgaattggagagaaaatgccttttggtcctcatggaatgtgggggtgagggacagatttctttggttgcacatggagttatggaagacacaagagtcagggtatcaacaaagctttcagctgggcaggtaggccaaggcactcactggcgtgggaatatagtacagccagctgaggggcgttgcaagcaagatggtgaactgcatcttttattccattgggaggtgcctgtgggccatccacgggatgaggcctggtacagatggaaacacgagtcaggagctcagcagagtctaggccacagatacacaggcttgggaaatgaatcagtcaaaccacagaaaccaaactttggctgatttgagctgaaaagatgttgggcagctgacagaatctctaggaagaccaaagaaccaggcccagaaaccaagccggcaaaaagagggattagcagctagagccacagccaaaaatattccatggaaatagactgctgagaaccccaccccatcacttaccctgctacagtactgctgtggtcccccaggacagattcttcaacttctttgcttccttgtggcatcagcttgaggaggccctgcctcaggcgggtaaatctggagaagtctgggtcatgggctagcaccccagctgttagtggggctaggtaaaactagtatctggccctttccgaatccaggagggatgaccatgggaaatgtaccaatgcagtaaaggaagatgctgaacagctacagtgatcacaaatgtcagtgaaggaagcattaatctgtgggtgataggcaaacccactggataggtacaataggctagagtgagaaaagagtagaggaagagctttggaaatgacagcatggaagagataggcagaggaagaggagttagaaagggagaaggagcagccacagaggtaggaggtagtggggaggtttcctggaaaccaagggagagccattcaagagagggtagccagtggagaggccaagtcagctcggtacttgatttcgcaggctgtgatcatttatgacctcagcaagggccacgttgcagagagggctggggccagagagcagtcaggtggaggcagtgtagtgaaggggctgtgaatgcacgatcacattcccattcagccaccccacagccaggtgcgcttcggcaagttgtttaaatccccagagcatctttgtgtgcgaaagtgcaatggatgattattggtatccacatagggttcttaggattatatataataaagtgcttggcacaacatctggtatactacaagtacttaataaatttacttgctgtcattgttacatcacctatggtttggcttcaaagggaagaagaggacttgaagcggctagggaaggtgaagaaggatcttaagtgagcagggcatgattcttttcatgtaagtaagtggaggagacagagctgggagggagatggaaatcctggagagggcaggacagggggctgtgagcctgggatgcatccagaaagagcaactgtggggttagtctgacagacgcaatgtctcctccttggatagtgtggatgcataggtcatcagcaatatgagggacagattagtgtggatgacttttgtcgctgtcttaggaaggccagccatcaacacgctgggctgctgtacatccccaggtgctgttattagcgagagcgcctccaacagaccactcttggtatcgctccaaggactttttgattcctctcttttggtttaataattgctttgaccttgaagcctgaagctttctacagtgaaagaaactaggaaaatcatgtcctaccaaaaaactttttcttattggtaggattttaatggagaaaaatactggtttctgcctctattgttaaatggttcttttcaagtagttaattgactggtaagaatggcagttccagcttaagtagcaatgcctgtgtcttttatgttttttcctatcagtaaacttctggggagaagtattttttaaattaaaaataaaaacagaaaaaacgacttgtactaagatcatgatgtagaattttataactatgtagttgtgtaactcatttaataaattgtgcagcttaggccatttgtttttcaaggaaggccctaaaggtcagtgccttgcctcagttcataggcgtttccaggcagtgagagcctggggaaggccgccgcctggagtaaccagtctgattgttggcatgcatcggtatagacaccccccaggctgggactttttatatctgtgcagggatcgatttgaagtccagttgcataatggaaaaatactgaattcctctaaggtcccaggaggtagcagctgggtcttagaaatacctgtctcctgctcagaggaagatggtggttgactaagtatcccatcagacacactgtttagaagaaagggaccaaggagattaatgcagggatttctgccattatggagtctccaggtctcttccagcatttccagctgtgggatctctcatttctttgaataatgagaacagcccagtaagtgtctcgttagcataacatgtcattccttgagcacttcagagtcttgatacaataacattattctggttaccgtggtctacttagttacctttcttgaggcagagggggtttgtgaaatggatgggaaacctttcctcttgtccatgcaaccttttgccaacatccagcggctaaagccattgttgctgtggccacaaggtttttgtttttgaaacacccactgtcctttcaggtgttggaagagtttgcatctcaaagacagctagctagatgtgggggcatcaagagatggatgaaacccagttcgctgaggaatatggaaacccagacagttcagtcctcgatgtaggtgctcactgttgtgtctcagatccctgttaggaggtgaagctatttttcacttgttcgaaaggacaggccctcttctgaaacactgtggtgttctccaagagctgagtaaacccttaggaataaggccagcacacatccacagcacgtcacctggggaagtgtctgctgagtttccctcgctatcctcctcatgggccagcaaagccttcctgggtagctgctatggggcccaggctgccctctgccttgggctggccctcttcccttacccctcacactggcttccctgcctcactctcctcactccacccctggagccagcaggccagcttgtgagtgcactttctgtgctcagttctccaaggtggtccatgctatcttcactcctgccattggccttactggaagcagcctttgttcagtgtccctccgtggtagctgctcattgaggcccactcagatagccccattctccaaaggctttgctgagtttctccggtgggttttcgctcttctgtttttggactctcctgatctctgggttttgatcgtgggcatatgaggcagtccagcctcctgggtggtaagcctgaggggagcatcttcctggagctgaccacctgcctccgtgcagctgagccttattaaattgccaagagctttgaggtggggtcagcagtctctggccctgcctctcactctggggagatgaagctttgtctttgaaatgacgtgttttggttggataacatttgtgaacagctggaacagttggttacagccaactcatttccatgtctaagttactggactcattttttaaagtgtgtctgatatcagcagacagatttaattttcctaggcataagaaatctgggcatctacatgcttttgaaggatcttggagtcatccaatgcagcttgctcattttgttgaagaagaaactgaatccctgtgtcacattggcgttcacgtcacactaggacctgacccagcaccttctcatttccagtgaaatttctcttgtatcagccactttttcaaactttttttttttttttgagatggagtctcgctctgtcgcccaggctggagtgcagtggcgcgatcccgactcactgaaagctccgcctcccgggttcacgccattctcctgcctcagcctcctgagtagctgggactacaggcgcccgccaccatgcctgactaattttttgtatttttaatagagatggggtttcaccgtgttagtcaagatggtctcgatctcctgacctcatgatccacccacctcggcctcccaaagtgctgggattacaggcatgagccaccgtgccaggcccaaactgtttctttgttgtatgtctgtagaaaaaaatgtggccaaagtttttaaaaagatttttttcttttaaaagataaaagaaaaaaggccaggtaaaatcttaggcaaagatcaatgttttttcaaaataagacatgtggaaatccttgtctacaggtcctgctgctgagaaagctcagctctttgcagaaggtcttcaaaataaggactaagagtgtgtggaacaggatctgtatcaacaagagctcagacactgcagatggctcttgcctttatttcttatcctcgtgcctttctcctgttatagaagcaaaatggccccttttatgtgttgcccaggctggagtgcagtggtgcggtcattgctccctgcagctttgaactcctgggctcaagggatcttccacctcagcctcctcagtagttgggactaccagcgtgtgccactgagctcggataatatatatgttatatatatagtaatagagatgaggtctcaccgtattgcccaggctggtctcgaactcctaggcttgagcaatcctcccaccttgtcctcttaaagtgcggggattacaggtgtgagccactgcacccggtccatttttctcttttaactaggagctttttttttttttttacaattatcttacagatggagaaggggtgaaaattagaaatatgtggcataaatttatcattgatttctacaagatgcatgtaattatttgatgccaggttgtggggactcctaagagtaaaagaggccaggtggtctttgacatacatgaatcattattattaagggtgaaatatgagaagggtgaaatgtgaaatgctgactttcgcaagaaaggggggaaaaggaggaaattttatcttttattgctatagttcttgagatttaagttatttctttgaagcgaactttggcatttcaaacaggatataatttcttggcactgatatttgaggataattgttcatgtctgtagctgactaaattttagcagtttgttctctcccacactcccccagttttttaacaaatatttgagccggggcgcagtggctcatgcctgtaatcccatcactctgggaggccgaggcgggcagatcacctgacgtcaggagtttgagaccagcctgaccaacatggagaaaccccatctctgttaaaaatacaaaattagccagacctaatggcgcatgcctgtaaacccagctactcgtggggctgaggcaggggaatcgcttgaacccgggaggtggaggttgcagtgagccgagttcatgctattgcgctccaacgtgggcaacaagagtgaaactctgtctcaaaaaaacaaacaaacaaatatttgaaacatatgcatgtgtaagtactctccagatcattacctatgtctgaaatagttttacctgcaagcgcttttaaatttatatactgacgttaaaactccttataacttaatgtagtatttttcaagctgtaaagtcaattaagctgaaatcagccaatgagaaaaataacttattttatgactcttagagaaaaaaaaattggcatggttttatttctctatttgggatcaaaatagagttttctttgaagttagagacactctggctatttctgccatattactctaggtttggccctaaatgtctgatttttattgggtatgtaaaactttctaattgtggaatttaaaaacctctatcagaatatgagacagccaaagtttatatttcatttattctataatattcagagctaattattaccatcccgtttggggcttttaattccagaggtcgatattgactttaagctcaatcagcttctccatctgttctctttgcttttcttattagatgagggtcatcctcttagtaatatgagcgaatatttattgaccttaatgaagcctttgcttcatatctggcacatcattttatctcatcctattatttcattttattctcatgataactatggggtagatcgtttccattttacagagaataaggttaggacttgagagaggttaagtgactgatactctcagggctggaaggtgatggccataggcctcgagtgctctgcttcccaagccgtcatcagcaggccagactgcatcggttccttggataggtcgtacagtgcctgaacttgacacagggctcatgtttcccacttccacagatctggattggaatttgggctctgccttttagtagctatgtgaccttgggtgaattacttaaatcctccaaacctcatctgttcatgtggaggttgtgtaaaatctgatggcaaattcacttttcagtgcacaagacaggaagaagactgtcattaattgctttatgctatgcagtagcctgacttttctcaaaattatttttggtacatgaagttgcctgtttttttttttcttcttctgaaatactgagcctggccagctccgtctggagtagggtccctgtggtggacctgctgtgggcacctcttcaccttcgttaccacctgtggttcttcacgtcgtttccggaggcaacttctctgcaagccagttgtaggattagtgctggccttttagggtttgagtaaatagcatacctcttctccgaccgtgttcaaaacaagtgaagagattgacaagaattaggcagatggagcccaaggcattactttatttttttttaatttctttttatttttttgagacggagtctcgctctgtcgccaaggctggatggagtgcagtggcacgatcttggctcactgcaagctctgcgtcccgggttcatgctattctcctgcctcagcctcctgagtagctgggactacaggcgcccgccaccacgcccagctaatttttgtatttttagtagagacggggtttcactgtgttagccaggatagccttgatctcctgaccttgtgatctgtccgcctcagcctcccaaagtgctgggattacaggcgtgagccactgcgtccggcggcatcactttattattaatacagctggtgctggagatagaataaaggaggtacaaacagactataatggagagaggatagagaaagagaagcttaggtaaaggcagaaagtggagggaggaagaaaagattgcaactagattcttcctgtgagacaaggactttggaagggttctcgggtctctgcattgtttgtaccttcaagaaaaatggggccttggagagggagttgctgaaaggtcacaaagcctgttggccagcaggtttaaaagtcaaatttccattcctggaccagcctttgaaccagcttggttgatggctgctcggtgggaggagaaaatggaaagattctatttacttatttatttttgagtcaggtctcaaaaatggtcttgctctgtcgcccagtctggagtgcagtgatgctatcatagcttactgcaagctcaaactcctgggctcaagcaatcctcctgcctcagcctccagagtagctgggattacaggcgcatgccaccatgcctggctaatttttaaaattttttagtagagatagggtctcactgtgttgcccaggctgctctcaaactcctgggctcaagtgatctgcctgccttggcctctcaaagtgctggaattacaagcatgagccaccatcttcagccaaaaagattctattttggaaagcttgttccagtctttgaaaacagttgttcgtattacctttaggagcttcttcagttaaacctctttagattaatagagcttttaaaatgtcatatggaagttgatggtttttcatactcatatgtgtattttgtattttatgtttttaagtatgtttatatgtcatgtatctttattatggttttcttttacatgtttttaaaaatatgttttgatatgtttttctgctatattgatttgtgccttttgactatgaaggaaaatgaaatcatagtgatgattaataactgaaatgtgacctgccatgtgagattgtgtatgattgttattcttatgcaggcttgtgatggttgtagcctcaccagctatgcgacactgtccttgccttgttataagaagtcttaacaaagtcagaggccacagtcccccaggccaactttacttgtatatcatttcctgatttagggtttatgaaaatagccatgtcatccaaattcacccagaaatgaaggctattacaaattaaatccatctctatttctgtctgaatgcttaaaaaatctgtacatttgatatgaagttctactaaccgtaatcttaaattatcttaagtttacaactctagaattataccagacttctaatagttcaattttatcatttaaaatctatgagggagtaaaattatatgtcatgcattgagagtcattagtctaagtacgttatatctcagcatttaaatgttaaaactacaacaaaatcaacctctcttttctttttttagcttctcggacaaactatttagtggaaaaggcttacattttcagccatcagttttagattttggaatacagtaagtatcttttctttataattaaaactcattttatttatactatttattttcagaattttttttacatatatgtacaatgttaaattttaggtatattgataatatgaagggatattgatcctgggacttaagagaaatatttttgtgaaaaggagagtacaagaattgtttcagccctttctttaattttttctttttttgagacagactcctgctctgtccaccaggctggagtgcagtggcgtgatctctgctcactgcaagctctgcctcccgggtttacgccattctcctacctcagcctcccgagtagctgggactacaggcacccgccaccacgcccggctaattttttgtgtttttagtagagacggggtttcaccgtgttcgccaggatggtcttgatctcctgacttcgtgatccgcccgcctcggcctcccaaagtgctgggattacaggcgcgagccaccactcctggccttctttaatttttaataagtataccttttaatattttgtagtgattgaaatttaataagtcaatgttgtttttccaaaacaaatccggttattttataatgaaaaactaaatattgatggtctctgaatttttgtacactagattcatttgctcacttggttttacttcttgctgtgccttctggattcaaaattgcaccatgcttacagttgttaggattaagactttggagactcaagatggggaaggcagtgcataaactgtaatgactttacagtatcatgtaaagaaccgcaagatgaagacagtgtgatatgagtgtcagttgagggcctaacttgggaacctggaaaaattaaggaagggtgacgctgtggagatgaaagcaacataaggactcttgttgtccgtgataaagtttggatcttcaagtgttaagcttcctggatgcagaatatagcgcattgaaaagaacttctaattagtagtttcaagagcgagaggtaaaagcactgcttgtttccggggctggcaaataacacttcaatttcatggagagccttttgagtgacaagcaaagttttgtgaatgaaataaccatggccgtaggagagcatctgggctgggttagggtgggctcctggtgtgccctcctttatgcatctggattgctttacattcccttctaatcatcaaaatgttagagctgcagtgaaggagaatgaacttggaattttttttttttttttgagacggagtcttgcactgtcacttaggctggagtgcaggggcacagtgtcggctcactgcagcctccgcctgttgggttcaaacgattctcctgcctcagcctcctgaataggtgggactatgggtgcccgccaccacgcctgtaatttttgtatttttagtagagacagtgttttgccatgttggccaggctagtctcaaactcctgacctcaagtgatacgccctccttggcctctcagagtgctgggattacaggcatgagccaccgcacccagcctgaacttggaatttaaaaggaccatgttgagctttttagaaaaagattctataaagggaagaagagaaaactgggagtttcccgactttataaaattnnnnnnnnnnnnnnnnnnnnagtttgccgactttataaaattctaggtgtctgtttttttgagtttttatatttttactcttatgtaaagaaagtttaatagaagctgaatgcttagtagtttagttgataatataaataagctgaatttatcataacctcattgattttacattctgagagggtgctataattttgtgaaaaatctttattgtgaggctgagcgcggtggctcacacctgtaatcccagcactctgggagcccgggctgggcggatcacttgagctcaggagttcgagaccagcgtggccaacatggcaaaacccatgactctaataaaaatacaaaaattagccggacatggtggtgagcatctgtaatcccagttacttgggaggttgaggcacaagagttgcttgagcctgagaggcagaggttgcagtgagccaagatcatcatgccaccgagttctagcctgggcgacagagggagactctgtctcaaaaaaaagagtctttattgtgaaaagaaattttgattcaggacctactttaaagaatatatgttatagattggtagatagaataatagtagtagtaagtatagctattaggataataattccagttcataggttcctggctgtctaaaatatttactcttcagtaacgtaaaaaaatcctatagtcgatgcacatgggggtatgtttacagctgtccctcgttatccacatgggattggatccaggacccccatggataccaaaagctaaggatgctcaagtccttggcatagtatttacacacaacctcccatatactttagattatctctagaggccgggcacggtggtttatgcctgtaatcccagcactttgggagactgaggcaggaggatcacttgaggccaagagttcaagaccagcctgcgcaacactgtgagaccctgtctccataaaattttttttaaaaattagctaagcatggtggtgcacacctgtacttccagctactcatgaggctgaggcaggaggatcacttgagtccaggagttcaaggttactgtgagctatgatcatgccactgcactccagcctagatgacagagtgagaccttgtctcaaaaaaacaaaaacaaaaaaaactctagtttacttataatgactaatatagtgtaaatactatgtaaatagttatactgtatctcttttttcttgtgttgttattttttgtgtttttttttttccctcaaacactttcaatcaaggttggttgaatctgcagatatggagagccaactgtatatgatacacttttgttaattagcaatatacattaatctctggtcctaatagtcgcatgctgagagaatgctgaaagtctttgatttgaaaggatttctgatttttagatggaatcacctttggaggacttagttacgtttatataatactttatggttcccaaagtgtaatcatgtccgttgtcatttgagttttatatcagtccagtgaagacaggcattatctgagtctgtgtgtatcgttttcaaatatctctttgtttgagcatgtactacaaatgtgttcatacatttgttgctgagaaggaatgccatttgctcaaggtcatttcactacaagtggtagaataaatcttctgatttctaagagcactcataatgctatttttcttgttagtgagatctggaatatgattatgagaattagtcattttgctgaagttaaaaaaaaaaaaaacctcagaacaaactttagcctaaattagaacacatttaagattagttgagttttaccttatgtctgacaaatggtctaatatatagacattagagtaaaactttagcctgagggttctcctcctgatttcttcgctgtcccagttcagcttttgctatggtttattttgatgttggcctcgagcaaatcccaaccctcttcatagctttgattttcctggggggttgtaaaatcgggatcttgttactcggttgccttctgcctacttcttagggcttatgtgaagggttaatattctgttggtcctgagataaaaagtgctaatcattcatagagattttaatcattcttttgtagtgttaaattaacagagtatcttccagttgtcactagtgaaggaaatttatatcctcataacacttttaaaaatagaatctaaaaaatagaataaaaatagcagtggtgactaggcttcagctggcattctctgttaggtctggagagatttctggtggtgcagtcactggctctgtagcattgctgttttgcattcttattttctcatgtatttctctgatagacatttgtattcttagaaaccttgtatttcaattatgtacatgggatataaagctttgaggataagtattaataactttgatgattgatattatttacttgaaacccaaaacctcagaagtccttatttatttaattttaattgtgggaagaaaggcagatacaagcccactgctctgaggtaaggcttttctgaagtgaccctttatgtgtatggtagtgttgaacattttttaaaaaaatggtattacttaagaacactttgaaaaatcaggattttaatcacattgatgttggtattttatttgtaatgggatgtgaagaactacgttttgaaatacacattggatatattaaacctttcgttaagactagtgattaaaaggaagggtgaaagccaaaagaaaaattccaaggatttgatggtagtaatacagtattttggaaatctcattgtatataagagaagcaacatccatttcatgtttcctaaaggatacatttttaatatcaaagattttacctaattttacggaattcattcattatgctgatatttttccaattttattccaattatagatataattcattcagcttaaattagaatataattttatttctaggccatccgaatgacagctgtatatttggctctctctgccactgaggctattaaaactgaagaaatgactttagtgaaatttttgctggctccctgttcattgcaacataattgaacaagactgaatttggtcttgagcagtaggaatcagagttaagtgattagagggagcattgtaggtggctccaggtaggtgggcctgagcccagctcctttcctcttggcaattcctttatcagagccgagacattggaggtggagagtgctgctgaaaagaatgggtatcaaacccttcatgaattagtgtatttgccacggagcagggattcttactctgaggtttgtggaaggttttgaagctgtgtatgaaacttttcgtaagtgtatgtttgtggagggaagagccagagctttcatcagagtttttggaaaggctcataatttaaatggatgagaacctctgctgcaaagtgctgccggattttcagttttctcaaaagaatagcctttagccataattaagttttccttttctaagacctaataaaataacatctctttgtgagctgaaaatacatacctccccaaaaagtctcttttactcagaaaacataaccctaagaaaaattgggtttttctgtgagtacagtttcttacctaaacatattttcgtttgtttcaatattttcgaatgaatatttcagtgaattttcattcatactttcattgaattattcaacatattttcattgaattagagacccaggtccgagaagtgccagtgagtgcctacatgtgttttgttttgtttttttgcaagcattttaatggcctagatgggttaaatttttctaacactgaaaccaatggagtgctactgtgggttggcctaagccttataaaataaagttgttttttgttttatgacttttgactgttgtgaattgaatgctttattaccaacacgattggataatttaactttgtgatgaacagcaacagctttctgggtttaaaaatctgtgtgtatatatataataatacatatatatgtatggtaatatttataaccacacaatacattgatttttctctttgtttctcctcctaggttcctgggacatcctgtagcaaagattctccatgcttacaaccctagtagggacagcgaggttgtggtgaattcagtgtttgcagctgctggacatttccatgtaccgccagttccctgcagggtgggtgttgatggactcctggaaactatgccgtggcaggcagccaggttttcttgctttctttggcctgaagtttttactttctgctccctgtctcccgctttttctggtacccaaaccttttccttctgtgtgtttaccttagcatttacttttccagttgctcatttttataattttggtggctcttgatatctactggggccggggggaggtggggggttgggggagagtttgaaggctctcagctgtgtagtaatgtatgtatatttaacatggctctattgtgactaaggaaagtttatattacttgtcttgaaatgactccaaattctgaggcatttagtaactaatacaagtttatggttgagacctcttccatctctcaagcctactaggaaagttaggtctcctttctaaatccagaactgcaaggtatagtgaatggctccttgtaaagctgattggcaccataacacagagctcaaacttagtcttctaatagttttaatttcagtggtctttaacatttagtgaagatcctaattgctagtaggcttttatttattttgcttactatgtctgcctgatattatgtacttaaaaaaaaaactaggactaaggatatgttgtaaggggaagcccaatatttggtttatgacagtctgtctgggtaaacgttgttcctgatttttattacatatcaacatgtttgcacgttggttattgtctatatttaagtagagatagaactgtgttagctaaagacagttggacctgtggaggtggaagaggaggggaaggaaagatgtgagactcacagctccagtctgaagcgaaaggattcatcctaagttagtggtaatatttgctatatctaagagcagataattggatgctgatcagtttggggattcttagggattcataatactgataagggtgcacaatatacaaatgtctgttaacagaaattgtcaaaaaaagaaagtctgtgaaagacagtttatcaaaggaggccattccaagtggctgactggggacctttctttcaggtaattccagcaatggggaaaacttccttcagaattattttcttacctactgaagaaggaagcattgaaagttccttatttattaatacctcttcgtatggagtcctttcctatcatgtgagtaactttttccttttgtcacaactttggttggtgacttaactgtaggggtgtgtgtgtatatttttaaaaagacttttggaaatgttgtcacctggtttatgtcgttaaaatacaagactgttagtgatgttaaaatcatcagcattcacccttttctgcctgacatgccacagttggctggctttcctactgatgacggagctatagtcctactgtgggtctttggaggatactagaacaaagcaaagcaatctgtcacacagtttcccatcataaaatacagaaggctttcaaaactcatggctctcacctcacgggcgttcagaaggaggtgctctaaggacagtctctagtgattttgcctaccttccctctttggctcaggaatatttctaattaggagacattgattgtgtgcttggaggctggttccaagggagctcactattcatatcaaggtaccaggaagggagcttgaagaatcttgttgctattctcagaaataggaatctttaccttaaatggtacctgatatggcatttaacaagatctggcatcaagtaatttaagttccaagatcagtaatttttgtggttatttcttactggattccattaaagaggtcccatatcagaagagttgcctacttgtgaacagatttgctacagtgaggaacattcagcttaaatacagcattctaatctgtttcattttttattttttagtttttgaggcagggtctcactttgttgcccaggctggagtgcagtggtgtgatcaggctgactgcagccacctcccaggcacaagcgattctcctgcctcagcctcccaccactgcctggctaatttttgtatttttagcagaaacaggctttcaccatgttggccaggctggtctcaaactcctgtcctcaaatgatccacctccctgggcctcccaaagtgttgggattacaggcgtgagccaccgtgctcagccagcattctgcatttctgaaacattcattgtgttttttgtagacaaagataaataaaataattggattagtagagtcttgaaggccatgctgatgaatacagatttcctttggagacgtgctttagcattatggcaaatgtgttttaaaactcttaacagaggagcaattctctctctttttccgcaggtatctggaattggcactcgtagaatctctacagaagggtctgcaaagcagctaccaaatgcttattttctgcttccaaaggtccagagcattcagctgtctcaaatgcaggtcattttaatagatttactttgaatgctggtggccaccaaactttgtaaccttctcagaattggttattttactattttctgctttttgaaaaaattatatagaagtaatatacatatataaaatatcagtggattccacctaacttctttttaatggctgtggagttcacagtgttgatattccagagtttgcttaatcttattgttggtcttttgaaatgtttcctgtttttcactgttattaccgttaggccatatacctattttataagtttctttaattttccttctgaatcctctgtttccttggggcatgtttcataaagaggagagattctttagttaaagactgtgaacgattttgtagagcttgttaaatcttaccagcttgcttttcagggaggcagcccccatggtcacaagtaataacaggcccctaaggatgtcctgcttttagccctgcccggatggggcttggtgggaagaactatttctgatgttatagtagatgtataatgataagtttaaattcttttaatatacatttcatgaatcattttatagggttggctactttttccctttgattatccatatttccttgtaactggataattttataattgagaaaagctcttgaaccaatatattatgaaacttacctcttctttctgattggtaaataaagaacattgcttagaatttgtagtcagtaccattagtacctggggctttcattcattcagcggttttcctgagcctctgctttgtgccaggccttggtctagagtttgtatctgcgtagagcctacattccagttggggagaagaaccaaattaatttacctctaggattatatctggaatctttatcaccaagtacataattcttagggatcttaaatcatatttttatttttataaaatggaaaagcccctccttgcagaattttaaggaagacttcttttaatttgcaaatttatatttggtttaaatcctaaaaccagggggcatgtgttgaaaggttttaagcaggagactgatactgatgtgctgtggcttgcatttttggagggccagatgcctcatcagtggagatctaaatattggaatagagacaggtattcagaataccttagttattgggggttaatgtaaggataagtggaatgaagggagagaggaaactgactctgcaggcctcctagagagctagaacagcgtacccattctctcatccccctggcctggcagatcctgcgtacttctcatgatgcccactgccctttaccacacccaggacatcctcatctctctgatggccaactgatagtatcccattaactgccaggatctactttagtcccttcctacctctttccaaaaaattcaagttggaccccattagtcccctgcttgaaacccttcagtgcattcccataggtcttagaatttaaaccaaatcccgcttatggctgtaagacctgcgtggtgtggctgctgtctctcttcagccccagtgctcaccacctgttcttggtctctagttcatggccacaagagccttcccccgctcacttgtgcaatgccgttttccctcctgccacaggtcccttgtgtctgcaatgttctcaacctccacctccaattttctccaaattaacccttatttcatccttcctttttcaactcacacttgagctcttcagggacttttgcgtctctccccatcctaatttctgctcccatatttatctagacttccgctcccatacttatatccattaaataatcacatgcccacatgatgtaattgcttcactattcttttcatcacccatggaatggaagctccatgagaacagggaccatctgattgagcttcccgttgtactccctgcacctcacctgggaagcagtggttgagtggagttttggcctgaggtagctctggggctgtcctcacaggccacgtctctgtctctccctgcactgtagcctaccttggcagtgccttggcttttcttggtctttgtttctgcttcagaagatacccaaactctgtttcttttcttttttgtatttttaaaatgtattttgtaaacagtgttatgaaatataattcacataccacaaaatctgcccacttaaagtgtaccattcagtgggttttagtatatccaaagttgtgcagccctcacgatcactgtctaattttagaacattttcattgcctcagtctcttactttctgtctctaaagatttgtctattttgaacatcttatataaatgaaatgtatggtcttttgtgattggcatctttcccttagcatgttttcagtttcatccatgtatttcattcctttttattgcaaataatacacattgtaggatatgccacattttgcataaccattcatcaattggtggacatttgcgttgtttctactctggctattatgaatgacattcttgtgtaagtttgggtggacatatctttcatatcttttctcttaggtgtatatttaggagtggaattttgctgggtcatatggtaattccatgtttaacattttgaggaactgtaaaactgttttctaaagtggttgcatcattttacaatcccactagcaatgaggattccagtcttctacaactttgccaacacttgtcttccatttttgtttgttttttaaatagccatcttactgagcatgaagtggtatctcatgtggttttgatttgcatttttgtaatgactaatgacatggagcatcttttcatgtgctcagtggccatttgtatatcgtctttggggaagtggttgttcatatcctttgcacattttaaaattgtgtttgtctttttattgttgagtagtaaatgtattaaattctggacattggacctttatcaggtacatggtttgcaaatattttctccctttctataggttgtcttttcattttcttgatgatgccctttgaagtacaaaagatttaaattttgatgaagtcaagtttttctgtttttcttttttcactttatgattttaatattatatctaaaaaggcctaatgttgtgaagctttactcctatgttttcttctaaagttttatagtttacatttaggtttatgacccatcctcactttaagttttagcatatggtgtgaggaagggattcattttcattcttttgcatgtagatgtctggtagttccagtaccatttgttgaaaagacagttctttgtacattgaattgtcttggtatccttgttgacctctcatctgtggccccattcctggctctagattctctccttcatttttcatttatccaaggatctgtgagtttagttaagtcactttctaaggctgctccttttgcccatagttctctcccattagtcaaaaatagttattgaacattatttattgagtgttccagtaaatgatagggcaatgaacacacacagtgtccctactcttgtggtgttacggtataaaatacttcagagtttgtagatgaaacttaatttttttggctggtcttttcttagaaaccagtatttaaaaatctgaatatcaaaaaaaaaaaacctcttaaaagtcagttattttaatttctttcacttttactgtgatttaagaaaataaattttaaattttttttttttttgaggcagagtcttgctctattgcctaggctagagtgcagtggtgcgatctcagctcactgcaacctccgcctcctgggttcaagcaattctgctgcctcagcctcctgagtagctgggactacaggcatgcaccaccaagcccagctaatttttgtatttttagtagagacagggtttcaccatgttgatcaggctggtctcaaactcctgacctcgtgatccgcccacctcggcctcctaaagtgctggaattacaggcatgagccaccgcacccagcctaaagtattttttaaggcttgctatacctaaaaacaaaaacttaaaaaatttaaacctaagaaataattgtggcattcctctagaagaaaaaaatcttgactataatatttctgcatctaaattgcatacattatgtgagttatttcttgtattttaagtggctataaagttgtcaactgttcttagaaaggaatgtctttattttgatattctacgggttttatgttttttactctctgcctgttgtcaagagcccattgtccagggttggggagttagtggattgaggaggtcagacttcaaagaggataagagggtgtggaaggtaccaaaggcataattgcctcttctccagtatagagctagaaagtatatctgatagaaagctaagcaagaaggtttagacagaaatatgtcatcagcttttctttaacttgttcccttagtgccatgtgaagagaaaataactctgtttggtttaggaataaaatttgaaattgagagaagaaatactgttgttttatgtacgtcagttgaatcattatgaaaaagaaaactgagactaagatgatagtagtaatttaaaagtattttcactgaaacaatagggccatctaatttttagatttttatatgtgagtgggtaaaaagtacaggctgattatatgtttgggtctgccttacatatgggtctaaatatggattttagtataattcattgaatatttaaaaaattatctggcttcagcataggcagagggtagaaaggcatgtacccaaggatccctgaacataaatagtctggaaggtgaaggttccaaaatttgcaggtactgcttgactcatccatctgtgaaatgctgatcagagaaggaaaaacagcaggaatattttataaaactgtggagcatggattgtaaaatgggagatgtgcttgatgtagtatgttgaggacacataattcaaatggcatttaaaagatcgttatgagttatctgttgcaaaacttgaaatttgggttgccagaataatctcagaaggtaactgatcttttgctgctgcaaacttagcaaaattcaatcatgagaaaggaaagcagtgagaaaacggatatgtaccctttttttttttttttttnnnnnnnnnnnnnnnnnnnnacagggtctcgctctgtcacctaggctggagtacagtgctactgtctcagctcactgcgacttcagcctcttgagctcgacccgtcctcctgcctcagcctcccgagtaggtgagatcacaggtgcatgctaccacgcccagctaatttttgtattttttgtagagacaagattttgccatgttgccctgcctggtcctcaaactcttggactcattgatccacccacctcggcttttcaaagtgctgggattacaggtgtaaaccaccacgcctggcctggatgtgtgattttgtgtgcagcgttgtgatatacacgaaccacgtgtggtatttctcttcacatttattacaacactgcacacaaagatatgcattcagtttttcttattcctcccaattcatatgctgagttgaatcctcaatgcaatagtattaagaggtggggcccttgcgaggtgaccaggtcatgaggaggggccttcatgaataggattggtacctttaataaaagaggcccagccagatgcggtggctcacacctgtaatcccagcactttgggaggccgaggtgggcagattacctgaggtcaggagttcaagaccagtctggccaacatggtgaaaccccgtctctactaaaaatacaaaaattagctgtgtgtggtgatgcatgcctgtaatcctagctactggggagggtgaggcaggagaattgcttgaacccgggaggcggaggttgcagtcagctgagatcatcttattgcactccagcctgggagacgagcaaaactccgtctcaaaaaaaaaaaaaaaaaaaaaaaaaaaggcccaagggagcttgtatgccccttctgccatttgaggacatagatggcacatagcaggtgccatctaggaggaaccagccctcactagaatctcttggtaccttgatcctggacttcccagaactgtgagcaataaatttctgttgtttataaactacctagtttgaggcattttttaatggttgaccatgtggaccaagataataggaaaacatggagttaagattgcttttttaaaccttgtcatttggtccttcttttttattgttttgaccttcatgcagagagaattcctagtgatgaaagtcactgtcgtggtgggtctgaatgacaggctgaggctctcctccttttgttgcattcttcttgttgtttgtcacttggttttcttccagtcattctctttctgctccagttcacatgtcactctgctgctggtgatgtcatgttacacaaaactgtttgttaattccctggccactggattagctgagccctctcttgtttacaggataaagtccaagctcctttgcttggcatacaaggtccttgataacctgggaccagcttctccctccaggctcagagcttctacccctcttttctgaactctggcctcacagacctttcatcattcccggaacatgccatcccttttccacaagctctcttagcctcataagcttttatcccattctaattattcttctaattccatccttcaagacccagttcagatatcgcctctctggcacctctccaggttcccaggcagcctgtgctcgaggtctgcatgccgcttggtccacaccctgccttaatgcttagagtcttggatgtctctctcctgctcttccatgaagctctgcaggagggacagggcctgctttttcattattataatctctatcaatttcgtgtttagtgcattgaggactcccagagtttttaatagataaatgagtcaatgggcatctgagttgagatccccaaatagcatatctactagtcataacatctaagatttgtataacttcaccttttcaccacatcaaccagtttgaccttcagcagatttactaccggggcaggtggtattattcttattttagaaattatagaatggacttagagtttaagttacttggtgaaggttgagagtagagccagtgaatgattattaactttttgtaatttttgtaataagggcacattttggtccttggcagtgccagctcagtatgctttaaatttttcccaaatttagtaaatgctatattgattttcatatctattgctttagtaatccatgatccagaaaagataaatgcaaatacagtgttctctgaagcatttttattatggctaaaaagaagatgcaacttaaagtcccaacagtagaaaaagaatttgataaatttacgtatattaacatagtagaatattaagtagttctttgaattataattatgatacctatttgggaatgtgtgacaagtattaaaattagactgcgattgtaactaaatatatggcgaggtttatgttgtgttaggctcatgagaaggcaagaaattttattatttaaatgttttctccagtaatgtattggattcaagccattgagatttggggagtgtttcagtgacttatttgggcaaaacagaatatttgaaattggcattgtctcagaatctggcatttaggatcattagccatatactttgtctgaaagattgaaaagaacttaaattattattattggaatcattgtaaataatgttgttgttaaaaatgtgattataagacaatgtgggaaactttttttttttttttgagacaagagtctcactctgtcgcccaggctggagtgcagtggcgcaatctcggctcactgcaagctccgcctcccaggttcacgccattctcctgcctcagcctcccgagtagctgggaccacaggcgcccgcaagcacgcccagataattttttgtatttttagtagagacggggtttcaccatgttagccaggatggtcttgatctcctgacctcgtgatccgcccgcctcagcctctcaaagtgccgggattacaggcatgagccactgtgtccggctgaaacttggttttaaagttagaggaaaaccctgacacagagttctgccaaataaaggtagttttgtctttgtgtgtgagtgtgagtgtgtgtgtgtgtgtgtgtgtgtgtgtgtgtgtctcaacatagtatcaaattattgaattgtctaagagattttctcttaaggatattttgggattatcagaaggtataatgtgattataagaaaacatgggaaacccagagaaatgaaacattagaaataaaccttaagaccacagtcatacttggcaatgatcatcacaattaatagttggttgtctccttgcagtgttttttctaagtttatgtgtggatgagagattttctcccctgccatggcaacatgttgctggattgtgtacaggagagattatctctggatattctgtgtgatatctaatacatttcagaccaggaattcctaaccttttaaaactggcacagcccttgctttcagcgtgtggtgtcaaaccctcgtgcccgcctgccagggacaggtgctgggcaaaggttgcggtcccgggctgcctacagcgtggtgcctgctagatttggcctggggtgggtgcctcaagttgttacctgctacttgccttctaaggtgctgatccctgtcaattaacgtggcaatctagaagggaagctgtaaaatcagggtaaggaggagaacgtggaaagcctttcaatcacagtttgatgaggaaatggaaaggggcacatttctccctaacaagttacaaaatacctgatctaggatttgaagatggaaaaagagataacagagaaaggttaagggtctttagagctgtcccattttcctgatagtcttacataattagttaaatggaataaacagtattgtgatagctgagaattcctacaaatacctgtgtaaacataatgtatttagtaacattttgttgtagttttagcagtacaccaagatgtaactgttttttgttgtttgagagaacacctggagttttttgtcctacctccaagaggattaaggagcaccacatgaaggtgaggttagagtgaaagtttagtaagtgaagcaagaaagctagattttttttttcccccaggcttttttttttttttgagacagactttggctcttgtcacccaggctggagtgcaatggcacgatctcggctcactgcaacctccgcctccagtgttcaagcaattctcctgtctcagcctcctgagtagctgggattacaggcacgcaccaccacacccagctaatttttgtatttagtagagatggggtttcaccacgttggcctggctggtctcgaacttctgacctcaggtgatcctactgcctgggcctcccaaagtgctgggattacaggtgtgagtcaccaagcccagcccccaggctgctttttatgttatgtgggaataaggcaccaaactttgaactgggggctctctggaaatccttcccttgctatctacctaaggcaagctagcactcctttcagtttctttgagtgataaaagttgtttgatcttttttacataaaaatgataggctgtcaatctctggaaaatgattatatgttaaggggaaattaagtgatgttgtacatttacttatctacctacttctgaatatagcttttttgtttgtttgttttaaaaggaattgcttaaacttctaaaaattttcttaagtttcaagtgagaatgcttctgtggaatgggaacttgggaagaggggaggtagaggagggttagtgactggaagaaaggaggggcgcgtcatgaagactctagaaagaataccaagatgtgtgagtgggggtgttctccctcccctcacttttgtttcagactcagtggagtgtcttcacgctccgtcttcctccttgtttgtgctttaaaatctcggctttcttggctactgtgaggacacagtttcctggtccctcttttaactcaatgtttaccttgtctctttttatttttttgcctcccaggagaattgactagttccttactgaaaaccctaagagatccctgctgtagcagctataatactcaaaagcttttgtttttatgaatttttctgtactagatttaaccccttaagagcaagaattatgccctaatctttgttttcctattacctggcaatataacatgtagtaaatcaatgattgacaactggataaatgaatcttaaaaaggaaaacattataataagctatttatgaagatatgacacacagactttcctttgacttccttcatttattctattagagtactttagaaacttttgttagaagacttagagatacctaataaataacacctctcttcctgaccaagttctgaatcattggatatttaagaatctggagttagagaactaaaaccggctttgtattactgataagacatattctcctgtatcagccagggtaagagagccaggagttactaactccttctcccctagggtagactttggggtggcccactggaggggaagtttgggtctgaaggacagatgcttcccaaagtgtagagaggaggaggaaagaaaccaactcctccaagagcccctgcccttctcaccccttcctacagcacaggatgcttctctgttgcccaccaattaggtaattccttgacctccaaggagagaggaaggcttgggataaaaggacagtagtgtttagggaaagagaagcctctcattgtgacgtccttggtttctgtgctcttgaccctttggaattacctgttaagcctgagatcagccgatttccagccctgtgctttcaccttcttggacctgttcctccttcccctgagagccaacccctcccctgatttctttgttgaccctcctcggactgctggggtctgctgttgagtttgcccctagacagctttgagatggattagataaattcactaataatctgccccaaggccacactgtaaccagggttgaaagttcacatcttcctctgtttccccatcccaaattcttttcaactgcaatatccggtacagtttatcagagcttttgtgatgcgattaaataacagtgttaaaatatggcagtagaaaatatcagccatataaaatgcctgtcatagagatgcatagtgggagtgaataagagggtgaattccaaaccagaccacctggctaaaaatcttggttctgagtgactgtagccaagttacctaatctccctgtgtctcagtttatctgtaaaatatgtaataatagccctttcggatagggttggtgtagcaattgaatcaaccaatttatttaaagagcttagaactagtctctggcacatagctgaaatgccttaatcacttaacttttaaaaagaaccttctgaatataaaccctcttctattatgaaactccgggagaactttaatattcagagattagaacccccaacgggacatgaaagttcaaggctatggtagtgtatccagttatcttggcctgtgagttaacattcaaagaatttgaagtcctcttcaatttcttgtttttattttattttattttatttttattttaatcagaagttctccatgcctctgtgcagctggggaacttttagtagctacaggctggatttgttcttgctagaatgtgcgtggtttccccacggtttcagaatttatagtggttcaatagtaagtcatttgagcctcacttgaatctgcaatcttaatgaaacgcacaagaataacagattattaacttcacatccaaaaaaattggaaaacgtgtccccccacttcccagccctccaagcactaattttaagcagaatcgtccctagtacttcgatttaccaaagagagggaaggaagttggagagagcctcaccttggtttccgcttgaattcatgctggttgtggagtctcagacctttgcacttaacgcttggcagggagagatcaccattagtcaggaggctaatctgggtactttgggggttagagaggagccacctgtgcataccactgctctactcaggaaggggcacctgagatgctctggccttccctcagagtttataaatttgcctggcggtagccgacatactcggcctgccttccttctgttttccatgtgtggatttctgtttcttccttgggcccttgtttctggcatctcccggcacttttgtgctagtggtatggaagctgtgttaggagcagagcttctgcagtctgtgggcagtgacgttgagatctgtgcacagggtggtttccattgcctctcactgtggacttgcgggggcttctgaaacctgcttcttagggaagtttgtttcctttttgtccacttatttcaactggagtggtgttctcagcagatgccctgaggtgagcagttgttgacactttggaagtgtgagtccatcagggcctagtggtgatagttccttctttttctgtgttagtcggctgttcccccaggacttgcttgttctccactgttcaatttaaccagctttttgtgttgctctctttctttttaaattagtacattcctttaatttttttttaactttttggtctagatatttattttccctttagatctttctctagatttttttcggtgtgttctcccaaagcaaaagagataaaatcaagttctgggtctactaaaaacatctatagttcaaacaaatcttttttctgtttgttgcgttgcataatcttacataagagatactctcctgtcagcccagtatcccagtcaggcccaggctcggtttatcttgtcctgcctggttctcctttaatggtttcctctttgctgtgccttcttttgattgagtcctaaatgccataaacttctcaagcatattccctcagggcacaagcagtaattgtatctccattgaaaaatgcactgagcattccacactcaccttcctggtttcctttcacctgtccaggtttgtgtaaggcttggtgtagccgcctcagtctttgatggtagagctccttaattgtttactatgggggatttaagtgtatttcttcacagttcctagaactcaatcatggtttcttaattatttttatttttacttttgttttaagacagggtcttgctctgttgcccaagctagaatgcagtggtgcagttacagttattacaaccttggcctcccgagctcaggtgatcctccctcctcagcctcctgagtagctgggactacaggcatgtaccaccatgcccagctaagttttatatttttttgtggagacagggtttcaccatgttgcccaggctggtttcaaactcctgagctcaagtgatccacctgcctcggtctaccaaagtgctaggatgacaggtgtgagccaccatgactggcctattttttgaggaacaattccagtctgctgagatcttgcctgtcttcctttattagagtcttttaaaagctccatttagcacagatatatttcattttgaatacctgcacaatgagatctcaaagtatctccacttctctttttatatctgtttaacctgactttctagatgttgttttcttttttttttcctttttagttggcatgtaataattgtacttaggtatgggatagagagtgctgttttgatactgtatacaatgtgtaacgatccactcagggtaattagcgtattatcacctcagacatttatcatttcattatgttgtgaacattcaaaatcctcccttctggctttattgtagtcaactgcagtcaccctgtagtgctgtagaacaccagaactcattctgtctgtctagctgtaactttgtgttggttacccagcaaggtttggttatttcttttttgttttgttttgttttttgagacagagtttcgctcttgttgcccaggctggtgtgcagtggcgtgatctcggctcactgcaacctctgcctcccgggttcaagtgattcccttgcctcagcctcccaagtagctgggattacaggtgcccatgaccacgcccagctaatttttgtaattttagtagagatggggtttcaccatgttggtcaggctggtcttgaactcctgaactcaggtaatccacctgcctcagcctcccaaagtgctggtatttcaggcatgagccaccgcacccggcccagtttggttattttaaaccatttcagctgtgtctagctcttgccttcccctttccctatatatatggggtaaaatatacttaacacaaaatttaccattttcaccatttgtatgcgtacagttcactggcagtaagtacattcacagtgttgtacagtcatcacctccatccatctccaggaccctttcatcaccccaaggggaaactccatacccattaaacaccttccctcagccaccattattctccctggcaaccactattctactttctgtctctatgaattggactattctaggtccctcatagaagtgggattatacagtatttgtccctttgtgtttggtttatttcattttgcataatgtcttcaaggttctcccatgttatatagcatgtatcagaattttattcctttttaaggctgaataattttctgttgcacatatatatcatgttttgtttatccaccttgtggcatttatgagtagtcttgccatgaagatgggtgtataagtatctgagtccctgctgtcacttttgagtgtatgcctagaaatggaattggtaattctgttcaagttttttgaggaaccaccacagcgtcctttcttttatagcctaattctcgccacagcgatgcctgcttaagtataagctgtgcccatgctactcaaggtcaagcgacggcagcctgcatcacaaagcttaaacttttgccgagcctggatcttgtttcagggcctgtgccagacatgcagggcctacttgtcatttgtttgaggcccagcatcatccaattgtataaaaatagttacttgcctttggacagagccaacatacgctgcctgacctatcaaggtgaaaatcccacatggctctgctgaagctgccagcccaggttgtaatagttaaaagctagttatccaggtgtaaaaaccaaggtgttgcccaacacagatgacttccacttggccaaaccaaaagtttagatagtacaggggttatcttagtctcccaattgttttttgtctgtctttcagggtttctggcacatttcagggagtgggaggtagtgtccagtaaatgacacttctttttttcttgagttctgttccaatcatgaaataaaaagaacttgaagtgttttaggggaaaaaaaatctcttagaaaccaaaggagtgtggtaaagagttatcttctaaaagctttaatgtgggaaaaatgcttcccccaagcatctaaattatttgttgtggaattttattaaataaatgcattaattgtgaatgagcaaatcaatataatctcccctttgaggcctactgtgtacccagtggtttgcatatgtatctcatttagcacccatcatattgctgtgaattcaataacttgatttcatagaagaggaagctgagtcttagagtgggtggggaatgtccccaggcttttatggctggggtttgatctcaaatctgtgttggctaagcacttggccacactgccttttctaaaatgatgtggataaggaaaaatgctatccatatgcagtagcctcttttttcctcaaagcaaactaatttcagccacttcctaggtttttgcaaatgtttgcatgagtgggtctggcagtatagttagattttgttttagtggttaatatctgaggaataaaagggtagtggtggtggtgggggttgaaacacaattgctatttaatatcagggaaaaatagctgtacagtacttattaataactcagctgagcctgctgttatgcaggaaacactaaattaggagtgtggttatagaatctgagtgttatgtggaaggcacccaagatagctctcattttatacaagatcatttgccatgtgcataatactgtgtgtgggggccacctgctggagcagtcagatggcttatacagaatcagtgttccagatgcatatgttggcataagagatttactttttcttgtctttttgagatggactctgttacccaggctggagtgcaatggtgcagttgcagctccgcctcccgggttcaagcaattccccagcttcagcctcccgagaagctgagattacaggcgtgtgccaccatgcccagcaaatttttgtatttttactagagacagggtttcaccatgttggacaggctggtctcaaattcttgacctcgagtgatccgccctccttggcctcccaaagtgccgagattacaggtgtgagccactgcgcccggccgagatttacttttataatgacttctaatatttagcattcaaaattgtgaaaggggagaaagatgtctgagaaatacagaatctaagattgggatttgtctaagtaattctttcatatttcataagttgtagtccttaaataaaaaggtttcatgtggttattaccaggaacatcaagcctcttgttcattctgtctggattaatatagattctcaaatatatttatttattaggctgtgctttactcttgttgataagacatcagaatgacttaatactttaagtctgttatttcctttcctgtttaattgcacacagtccccccaaatcacacccttcttgtggcccagggcaccagcaattccttagcaagtgaagggagatgattcctttctctctagtatccagttccctaaattcatacttcttcaccacaaaactgtggaaatacatgacatacaaaaggagttttaacatttctattttcttgacctttgcattttatcttggtatggttttctaatatatatccctgtgttgatggatttttaggcctttaggtacctaggagaaacagatttgatctattttaatttgttaaaaaagtactgactgcagttgaaaaacctgatttttttttctgtttttctactacctagccccaagatctttgataagtctcttaacccctccaagccacaatttcccccatcttctaaaaggggataatactttatatgaaataatatgaaatatataaactatattaatactttcaatgaagactacttaagaaaaagttgtttatagagttactttttcttttttctataaaatatctgatctgatttgttaaaggagtatgggaggtttcaaaactagagaattacgtttttatttgtttttcctgtctaatcagcccaggctcactctggatgagggcgtgtcctgttgtcacacagtgtgctcagttggggacagttggggaacttgtaaccctagtatgtggttgccccctggctaacattttggttagagtttcttttttatcaagttaatattgctattgttttgttctttttttttttttgagatgaagtctcacgctgttgcccaggttggagtgcagtggcccgatctcggctcactgcaagctctgcctcccaggttcacgccattctcctgcctcagcctcccgagtagctgggactacaggcgcccgccaccatgcccggctgattttttgtattttttagtagagacagggtttcaccatgttagccaggatggtcttgatctcctgacctcgtgatctgcctgcctcggcctcccagagtgctgggattacaggcgttggccaccgcgcccggcccaattgttttgttcttttgagaaagatatggacttgaaactttttcttttagaaaaattagcatacttctgaagggcagtttggaggtgctagaactcccccttgtgggattctgaaatatgtcctacaacaaaagaaacaaaatagtgatttttaaaatgcctctcgctaatagaagaatcttaattaaaatggcaagttataaatatatccgtccagagatttactaagaatgacaaaatattaggctttaaatcatagcaaattactctgcgaaatagggttgttaattgtgtcaaaaactgttaatatgagtgtgaacttttaacatcttttcatttgaagaaatattgtagggtagagaattgccttgtcaggttaagaccttaacatagttaaattgttgtagatttcttaaaaaaaaaaaaaaaacttataaatgtgtactttaaaagtgtgttaatatgatttttttctttaaacattttttgaaagtttcagatcagaaatacacactgttaggtttttattcttttattttgtaggcaccgtttactattttctgtttcttgcccttttcaagcttctcttgcccttttcaagctgattccctagcatctgtggctgtatgcccacctctatccactcatcagctgtttattgagtgctgatgaagtgataggcattgtgcattcgaagcacgagatgcttagaatctcctggcgtaggtagaccttgaccatgttgttgtgagaagtgttacaaaaggtcaggtagaagttgctgtggtgtctgagagggtatttaagccaggacatgaagcataaatcagatttagctaggtggagaggtgggtgggttggaggagtgggtgcaaggcaaagggacagaaaattcaaaggtgttgaggcaagcagagcagaaacgagaccagtgaggttggagcatgcgcagggaggtcgagactaggcaggtgccggagttttatagcgacagcagaggatttgggacttttgccaagtgagaagtctttgaagagttttaagcaaatagtggcatgaccagatttgtatatgggtaaattcactcttggtgcagtgtggagaatggagtggaaagggcagaggtggatgcagggagactaagaggaagttactgcaccatcatttttttgtgtagttttgtggtgttagagtatttattttgactttgtaggctgtacagtctctgttgcaagtactcaactctgctatcatagcacgaaggcaatagtagacagtccataaaggaacgggcatggctgtgttccaataaaactttgctgacaaaaataagcagcaaactggatttaacctgtgggcatagtttgctaacccctgatatctggggtatttattaagaaagaggagaagtgagtgggtttaagggctcatgaaggaggtacaatcagtatgacttggttatggatttgtttgaggagagtatgagaagctgaagtgaaaggggttttcaggtttctggcttaaacaactggataaataatgatagggttgatgaataatggtgctaagatgaggcacacagcaaaggtggccaggttggggtgtgtgaagattcaggtggatgcccagtcactggttggacatataggtatggagaggactaagctaggggaatcgatgtgggagggttcagcatgccaacaagctcccctgggagagagtgaagagggcataggcagcatccagcataactcagtgtctgatggttaaaggagcaacagctggcagaggaaccagagagaaagaaaaaccgagagggacaagtggttcaggctgtaacaggacagggggctggtggcagcagggagagtggtgaacaaaaggagaagtttctgttggatttggccgtgtgaggatcatttgtaaccttagttaaagcagtttcagagctgggcatggtagtgcacgcttgtagtcccagctactcaggaggctgaggtgggaggatcgcttgaggccaggagtttgaggctgcattgcgctatgattgtgcctgtgaattgccactgtgcttcagcctgggcagtataacaagtattttatttttttttgagacggagtttcactcttgtcacccaggctggagtgcaatggcatgatctcagctcactgaaacctccacctcctgggttcaagtgattctcctgcctcagcctcccaagtagctgggactacaggtgtgcgccactatgcccagctagttttttttttttttttttgacggagtctcgttctgtcgcccaggctggagtgcagtggcgcgatctcggcacactgcaagctctgcctctcaggttcacgccattctcctgcctcagcctcccgagtagctgggactacaggcacccgccaccacacccagctaattttttgtatttttagtagagacggggtttcaccatgttatccaggatggtcttgatctcctgaccccgtgatccacccgcctcggcctcccaaagtgctgagattacaggcgtgagccacaatgcctggccatttttttttgtatttttagtagagacggggtttcaccattttggccaggctagtctccaactgctgacctcagatgatccacccacctcggcctcccaaagtgctgggattacaggcatgagccactgcacccagcctaacaagtctcttttaattttaaagataaattttaaaaattaaaaatcagtttcagaaagtgggctttttctgtttgatgttgggatttgttcatagacaaatttaaaaatctagttcttcaggctggtgtattggtgcacacctgtaatcctagcactttgggaggctgaggtgggtggattgcttgagcccaggagttcaaaaccagcctgggaaatatggtgaagctccgtctctataaaaaatacacaaattagccatgtgtggtggtgtgtgcctgtagtcccagctacttgggaggctgaggtggaggttgcatgagccaagattgcactacccgactccagcctgggaaacagagtgagaccctgtctcaaaaaacaaaaaaatctagtttaagattttagattcattttacaaatcatattattctatttaagaatactagcagatatgaacaatgatttctttaaaagagtgtttaatgtttggtcccatttacaaacttaaactccttaaatatttttactgcattaaaaatatattttattctttttcttaaaaaaagattaaaagagtcacggttcactacagccttgacctcttgggctcaatcaatcatcccacctcagccttcctagtagctgggactataagcgcacatcaccacgcctggctaattctggtattttttctagtagagacggggttttgccatgtctcctagctggtctgcaactcctgggctccagtgatccactgccttggcctcccaaagtgctgggattacagatgtgaaccactactgtgcctgacctattcttttttttctgtattttaattgcctgaatgacaattgaagtagtttaaaatgtattcttttataatgtacttgggtaagttttataaatctaacaaacataattgtagtgattcttcttagtaatgcatctttcctgggtttttaaataggtactccctattaagccagcctaggctttggagaatgccttcttaccttgccaagatttgatgttaggactgtggctcccgggtggagtacctttttctaatcactatgccagagacattaaacttaatgaaagaggaagtctcatagcccatgtcttttagattcacatactgcactgagtaactttttgctgtattcacatgcctgtagcccccaccctcctacccaaggttgtatcccttgatttgatttttcattttccttttcttaaatatgtgttgacatcatcccaggggctgttaagatctttaaatttgacagagtcttgcattctttttatatgcttttgtctctttcatccataactcttccctgttaaaaatgatagtcagttgaattttggacatctctttttttttattttttgtttttttggtctaacttgagggtcatggtttctaggtcattgtactgatggaaggcacacttagaattttgttactttgtaaacctactttaaaataacaatagattcctgtgtttaaataacattttcaacaaacatcagaaacaccaaactccagtgttcctgtgtatatttagaacatattcacctgcttataggtgtaataaggaattttcatgttgcccgagggagaacttatgattttcattagaatgtaagctcagtgacagtcctgagaacagatttctctgtttagcttactgttgtgtatccactaaaaagaataatgcccagcatttagcagatactcagatatttattgaataaatgaaaaagtgtagtttctgaatacttgataaattgtttattattagtgtgagattgagccttttacttaaagttcttttcctccttttttcttcttttaggcagaaaccactaatactagcctcttgcaggtgcaactggaatgcagtttacataataaagtgtgtcagcaattaaaggtaaaataaaatgtgtagtgttttctctctgctttcctcctgcctctttgcttaaaaataaaacacaaggctgggcgctgtggctcatgcctgtaatcccagcactttgggaggccgaggcgagtggatcacgaggtcaggagattgagaccatcctggctaacacggtgaaactccgtctctactaaaaatacaaaaaaattagccaggcgtgctggcgggtgcccgtagtcccagctacttgggaggctgaggcaggagaatggcgtgaacctgggaggcggagcttgcagtgagccgagatcgcaccactgcactccagcctgggtgacagagtgagactccgtctcaaaataaaataaaataaaataaaacacaaaacagcatattctgttctcacacacgtcccattacgttaaatgcttctcctttcctccatagtttgaaaccacaaagttgagatgattttttttttccttttttcctcctccttccaaccatagggttgttatctggaatctgatgatgttttgcgtctacaaatgagcataatggtaacaatggaaaacttttcaaaagaatttgaagaaaacacacaacatttgttagatcatctctctattgtttacgtagctacagatgaatctgagacctcaggtaaggtggaatgtttaaaaattttattatattttcatcagtctgcatcatcattctatagcatttatgaacagattgtatcatagcaaaccaagacaaatagcctttgctttaattattaagtgattgtagtagtaactggttctcaacctacaactgctaagaaggctgtattattttggggagaagtgacaactgcaaactattctgagtttccttaggaataatttttcttcatgtttggagacagtaaggaaattaaatgggcatgacagtttaatataaatatttacaaagtatttgaagtcttgggtttcttgttccacttttaatgatttgcctaagctcatttaaccacatcatgctgttttgtattttaaatagctaataggttgcggttgttcctggatgcttgacaagttaggtagaattttagtgttcagttttatgaattttatctttggaaatgtgtgtcctacttatcagaaataaatgcattcatctgtttaacttcctaagaacttttttcagagacacattctgtgatccatgaaattcctaacgtagagtatactagtatcttttggttatcaagacttctgaatgtgactgtatatttgtattcatattcaagaaagtatggtttttattctttgggtttttttgtttgttttttggttttgtttctgtttttgttttttttagacaggattttgctgtgtagcccaggtgggagcacagagatgtgatctcggctcactgcaacctcagcctcctgggctcaagcgatcctgccaccttggcctcccaagtagctgggaccacaggcgcacaccactatgcctggctaatttaaaccgtttttttttggtggtttttttttttttttttttttttttgtagagacaggttctccctgtgttgctcaggatggtcttgaactcctgggctcaagcattcctccccgcttggcctcccaaagtgctgggattgcaagcatgagccaccgtgccctgctttggcagtcttaattggttaaacagcctttacctttcagtcttcagagctggctgtggtagtgctggatcagcaggagagctctcctgtcctcagtgcttggtgattctcatagtggccagtgaacatctatgagggcagatccctgacccatggggaccacttctgtgggtgagggctaaaaggaagcctgaaacctgagatctcaggattttcttctttccaaatgtggttatccaaatgaggaaatgaggagctttctaatcaacaggagaacatagctttatttgaagtcgtccagttggttagtttcattcagaagagcattgtgtgaccctaaactcagaattttgctcctggtagttcctcatcatttagagggcttaggttggtaggcatttttatgaggatcttttttcttgtgattaaaaaagaaaaaaaaaaagaaaacacctcctagttttgatttcagttttgagaaacaagttaacattttttatagaaatgtgtaatgtggtattttaatgattatatgaaggtgtgagaatgagatggctctgttttaatctctgattaaatactctgctttaatactctgattcttttggacagatgattcagcagtaaatatgtatatattacattcaggaaacagccttatatggatacaggtaattgtaaatgcttacctaaagtaacttttaaaattgcaagtgtgcatttaattgtagaatatgagggtttttcaggaacagagacagaagcactatctttattcttttttgctttaatttaagcccatttgcccttgcttgaacctctgtttgtatgaagattgtcagcatcccctccatatggttatggcacagatgctgagcagttgctatgtatggctggtctgtgctatttattctaacggttcattcaaactggataaatactctcccagctgagagtagtcacatgggacttttcttttatttcaggatatacgccatttctcacagagagatgctctgtctctgcagtttgaaccagtactactacctacttctacaacaaactttacaaaaattgcttcttttacctgcaaaggtacagatttttaaacagattgtcatttgacttttgttatctggttgtcatgatggcaactctttctacaactacagattaggcatggtttcaaaaaagtgaagggaatgcgtttgatttcaagaagtcccagccttagtagttctaagatagtatgatgtagaaactattgttgatgccacttttattctgccacatatgtagaattttgagtttaaagcttaatattctgtgttgataacgattaggaaggaaagcactgttaggtttttgacaggagtctatgcaggctgtttttgagggaaaattggcaaatctctatgaaaatttaaaatgcacatatttactctttgatccttaattctagttttaagagtttatcctccagatatgtatgtattcaaaactgtacctataagaaatgtgtgtttgttaggacagaacagctgatcatctgtgttcagatgtgagagagtgttcagaaacatgcatggacagcgatgcgagcagtgtgtgtacatttaatttttttttagaggatatctgtgtacttatacatgcacagaacacctggaaggatgttgcagaaactgctaacagctgcctcctccaagataattgggagtcagggtgaagaaaggtagattttattttcacatttttttgttagtgtttgaatttttaaaaaccatatatataactttaaaaaagttggttattagcatcagagagttaagaattgaacacaagcgactcaatattataacctaatcaaggagagcttaaaagtattattttgatcaatcagcactgctttcaaatgcagcccactttttgctggtcagctcccttttgctctttaggttttattcctttcttgctcgtgcctccacacattttactctgccaagtgagcttcttgtttcacttttgtcatttctggtagagaagttggtttttaaaagtatggacttctggataattggcaacaaagaagatgacaggaacatttgagaaagtagttaccttttatgtctgattcactattttaatggagacagaaaagtgaataaaaatttataaataagacatatatcttttgttcaggcttaatgaaagaaaaggtacttaagcttcacatttatttctttataccacaaagcagctacatcatgtgacagtggaattatagaagatgtgaagaaaacaacacacactccaacactaaaagcatgcctcttctcttctgtggctcaggggtaggttacttccactttccctgaaatcttgtatggttgttgttgttgttttcccctctagaaatggtttaaaaatatagtgatatgatttgtgtgattctctctctcactggccttgcctccccttgccttagcattgctaacaggcagtgaaagggatattagctgagtggggaaaaggaagtgaaataattcagtttatgaaataggttcagcatcaggcatccagatgtgtgaaaagagtacatattcacatggtgtttctgagttggcttcaggttctggtttggtcctggcggcctctgtgagctgtgctggccgcagcctggttgcttcccctcgggcttccagttgctccctatgtgagccagaaggttgaaggaggcgattgccgaggttgtctctggcgctagctttcatttagtaacgttttatgatgctcctgtttttgcaattagaggctcataagagggctgactgttgtcccacactcaggcctgatagcatgcatgtcgtctgttcacaggtattttagaatggactcttctgcaacccagtttcacatagagactcatgagaacacatcaggactttggtcaatatggtaccgcaaccattttgaccgtagtgttgtattaaatgatgtgtttctttccaaggagaccaagcacatgttaaaggtacatatagtattttttccccaagttttagcttattttaagctttgtttaaggtcagatgctgtgaaattatttctataaaataataaaaaatattccaaatgctatgaagttattatttatataaaattttatgatttttaaaacatgtatttttcttttaacattttcagaattacttttaggagacttctctttctctctttttaaaaaactgtttttaaaagagctcaaagggaccaggatatagcctttcaaaattatttgctcttaccattattcaaaaatattatgtatatgtattgttctaaaaagattagtaaaaatgagcctggttcatgataaaatagtaggttttttgcaaaatatcacttactgaaatttcaagattacttttgtgaaatttaaaacagtgtcatcttaagcattatttgtaacctatcatttctataaaaatattccaacttttgatctggaaataactgagtaaaatcatactttctgaagtatagaagaatgttagcatcatactttataatgattttaatcataattagtgttaggaaaagtaatttctcttgcttcttttctttttagattctgaatttcactggccctttatttctacctccaggctgttggaatatattttctttgaaacttgctgttaaagacattgccataaatctattcaccaatgtatttttgactacaaacataggtgccatttttgcaatacctctacagatttattcagcaccaaccaaggtattttctacaatactatatgtgtgttacagttttcttaattactgttgctttttattaacctttagtgcttgagttttattaactgggttaagctcacgttctttaaggctaagaaactgaaggatattaccaggccagtcttggatgataaattgttcagacataaaaatctttatttggaaagagttttcttttttataaagtaatttgaagttcttgaatgaaataaggcatgaccaatagattaatagatgtcattttcatttatttccaaaatttgtagagcaaccagtatgtgtttgctatagaaaacacaggttggcttttagtacatacttgcaatgacttaataaattaaattgttaaatgctttatttggatctcttctaagtgactcttagttgctcgtaatccttgaatttgcttagtgggccaagtataaagcctgaaaagattcacagttaagaaaatgctttctaaaatctgggtaaattatatttaatttagaccgtcttaaatatgtctctttctttaatatttatttcttttcatttggttattatttttgcttctttttgctccaagctattttgtataactctgggttctggtttttctatgcaacattcatgcaaccatctttattttttttctcacttatagtgtggatctttcatagttagaaatgcctcatgcttaactagctgtaagcgtacagataggaattctaaaattaaacaatgtaaggttaattccatttatccatattttgagcaggggtggtttcttagaaattttttttctattcaagagatgcatgtcagcagagtgtgggaggagcaggcaggtttcaggtatacctgtaggaaatgggaaattaaatgtcctgaatagctaggagttgttatagattggcatactgtttcccagaggattagagttcaattaaaaaaaaacaaaacttctgaccactgagaatgtcctgagactaatctaatcttttttttttaatttttaattttttttacagttagggtctcactctgttgcccaggcttcagtgcagccatgtgatcataatctttatttaattcagatggcagtttggtgtcttgtgggcccaagggtcattattgtcattgattattgtgcctgcagaagccactcagtgaccctcctagggagagacagttcagatttctctgaaaattccttaacaattagaaagtaatttttggctcgtggttaaagggaagttcactgaggtgcagaccaatgtctgctttgaattttagtgcattagaatttttatgtttagtgctgtgttttaagttattcatatattacttttcaatctaggaagggagtctgggttttgaagtgatagcacattgtggcatgcattatttcatgggaaaatcaaaagcaggtaagtattttgcccttaggctttctgtagatctctagtttgggggatgggaaatagtgaggaaaattagcatttgtcaatggaataattagttctgtaaaggcatcatattctatagagaggatgatcattaacagaatgacttaaaattgttaagaaccctccagaaacacctggggtactgtaaataatgcccctttattatctagtagcttgtacttccgcaagggtttttttttttttttttcaaataacattgttcgatcatcacagcacccataggaaaaattggaagattctgattcttttatgaaagaactgactagaagttagtaaaaataacttggaattgtatttgaggacttaagttataggagtgtaaacatcttgcagatggtgctagttgtgatttgagactgaagggccttagtgttgatgtacaagctgtttcttgttttgagtttttttttttgttttttttgtcttttgatttatagagatatttagggagagttttaaagtatagtttttttttttttttttaaagattcccacctctccttcctgataccctccttagcaagacagaacaaatctgttggtagaatgaggtgaacaatagaccagttataaacatgcatcttctctaggatcggctcctggtctgtgccccctttcaagaactactgttttccctcggcactctagatagtgacctggaagactcgttgatgattagcatgtgtgtggaaggagtttcgcattttagatttaaagctgttaaaaatgttccaagtataattttgtttcaggctgtattcatgagccatgtgtcttttacgttattacctttacataattcgatttagttttgttttatgacatgtttgtttaatttgatatcatttgccattgagttagagggacttttaataaataagcagcagagacagaggtggcatttattaactctacagtcctctcagtttaagaagtttaatattaagcccttggcattatttactaattgaattatgttttctgtaaatctaaatatggaatctgatctaacttttaggaaatcctaattggaatgggagcctttctctggatcaatctacctggaatgtggattctgaacttgcaaataaattgtatgaaagatggaagaaatataaaaatggtgacgtctgcaagtacgtctccactgtcttcttttttgttcggtggtggggagacactgttacagtagtccctccttacctgcggggacacattctaagacccccctctcaccccaccgtagatgcctgaaactgtagcagaccctatatactatgcatgaatttatttttccttcatcataatttcacaaatagaagattcattcttactgtaaatcttagcagtctcagcatacaatttttttctattaagtcgacaactttcacctttttgggtaaaaggaagcactttatggcttctctttggcatatctgaattgtcagcatcactcttcttgcactttaaagccattattaagtcaaataagggctacttgaacaaaagcactgtgacgccaggacagttgacctgatgactgagatggctactaagtgactagcaggcaggtaggggatccatgtggatatgctgggcagagggatgatttgcatgtcccagacaagatggagtggggcggcttgaactttcatcatgctactcagtactgtgtgtaatataaaagttatgaattatttctggaatttttcacttaatattttcagaccccagttgaccacaggtaactgaaactttggaaagcaaaactgcataagggccaacgactgcacacagtattttattgacattacagtccgtagtttctagtgatcgatacttctctccagcttttaattttgacaaatttcaaacctcagaagttgagggtagtgcagtgaattctcaaatattcctcatctagattttgttcaccagatgttcacattttatcacttttgctttatttctctatgtgtacacacacacatagaaacacatacacgcacagacttttggccgagtcatcaaaagtgagctgtagatgtcatacttcaactctcaatactttattaggaaattctttatttcctaaagagaatattttcttatgtataactatactaccattgcatacccaacaaacttgacattcatgtaattatattgtttaatatacagtctatgttaaaattttccctagttgatccagtagtgttcattatagctgcttttttatcttttcttttaacccagaatccatttaaaggccatgcattgcatttggttgtcttgttttcttagttttctttagactagtgttcctacctttcatcatctttcatcatgttgatactttttaaaagttcaggccagttgttttataaaacattccacactctggatttttctgattgtttcctcaagttcatgttctggttaaatgtttctggcaagaatatgagttatctggttgaacttgtgtctgtattatttcatctcatcaggaagtacgtaaatgtcagtttgttccattattggcattgctgagttgagtcgcttggtttaggtgatgagtgacagaactctccattgtacatacctttttccttgtgtaattaataaatctgtgctgtgataatttgataaattacggtataaacgccctgttccctaaggatgttttatcccatggttttagtatctattgataatccttgccagaatcaattgttagactaatggctgcaaaatgatgtttctgattattttgttcattctacatttattggcagattttttttttctaaaagagtgtttctcttgcttttaagcatcactctgattctttagttgcagtgttgtactctcttaccatcactattatttttgatgataaattgttccaaatttggctggtaggagcccttcggctggcttgtgtggccctttgacatgttctgttgtttgagtgcttccttgctttctagtaaaacagggccttctaggatcaatcttgtactttcccatccccagacctagaataaaccatttccccaagagcccttttcctttaagtgggaatagtatttagtgatttccctaaataacaaaattattaaatattaaatttttaaatatcaaaatatttttcataatagtttctttatcaattaaacaggaggaatgttttgggaacaactcgatttgctcacttgaagaaatccaaggagtcagagtcctttgttttctttttgcctcgtttgatcgcagagcctggcctcatgttaaacttcagcgcaactgcccttaggagcaggatggtgaggacagtgtgtcttttcatttctttgtcagtgactccccagtgcttgggttttcaaagtaccagattgtgtccacctttagctaccatttcaaagccaaaattaaggcgatgtcaaaagaactagatgagcagtaaaactctaaacagactgaaaatgcaggaaacaaatagactttgaattgagtgtaccctccataaatgtgtcagttaagaaagtactcaactgcaaacagcagagaaaatcttgactagcttaactaggagtcattttataacaagaagctcaaaggggagaagtccagagcgagtcaggttgtgctctctgtgatgccatcagggactgaggctcccctccctgtctactgtccatccttagcgtgttgacttcggtgcttgtctgtgcctctctcgtccagctccggtggcgggaagactgggcaaagggaaggacgtgcctccagcagacttccatttatgtctcataagtctcatggctaagaactctataccacacgtgacatgaattataatgtatgacttatcaggtgctcatagattttcttagggatgacatccttaggctgttttttaactttttatttttaaatgatttcaacttagagaaaagtttcaagagtagtatatcaggagctcccaaaaagaaaatcaggagcttgcaaaaagaaaagaatctttttgcaaagattcatcaatttttaatgtttgccacacttgcttgaacattctctttctgcatacatgtatctttgtgagccatctgagtgtcagacgttacgccctcttacctctaactttcagtgtgaattatttaagaacgagggcttttttctgaaccatagtataatgatcaaaatcagaaaatgcaacaatcatgatgctgttatttaatctacagtaaatatatacagcatatatgtatatatactacatatatacagtatatgtagatcaagtgttttcagagatcccactgtcatactttccagcatttttttttttctggttcagaatccagtccaggatttctcatttcattggcaggtctttttagtctcctttaatcttccccagctgttctttgccttttatgacatagacatttttgaagcgtgctggccatttatttcctatgatgtttcttgattggagttacatgatatttcctcatgattaggttatgctttttggccagaatatctcaggagggatgctgtgtccctctcggggttttaacttttctttcctcacacctagatcaagtactttgtggtgcagaacccgtcctcttggccggtctccttgcagctcctgcctctctccttgtaccctaaacccgaagccctagtgcacctgctccacagatggtatgaagactttttttctgagaggcagtttgggaagtacttgggaagacttagaattacttaatgtcctacactttttcaaccaggacctgtgtgtggatgtggacacagtattaacccattagctcatggaccttgggcatcctgccccttggtgcatgtgatttgatggaactacctggctctgtgtgttatgtggcatcttcagtgttactatgcgaagtccactaaccaacagatccttttctttagctagggaacctttatcatgtttttttcacatatactcctaatatttagactcacaatcatggtgatttctaggcagcataaataagtttagtgttttagtccaattggccctccatatctgcaggggaattggtcgcaggaccccctcggatactaaaatctcaaggatgttcaagtcctttaaaaccattgatggaaaaattggccctccttatttgagggttctccacctgcggttggttgaacctgcaggtttggaacctgcagatgcagagggctgaatgtatattcttgtctagcattaaacaggaagagatgataattagttcatgtctgttatatcttattttcacacaatcacagttttacttagaatgtttccagcttctcgtttagtaagatcgacccttatcccagggtttctcagctttcgcagtattggtattttggaccagatggttctaccattctgtttggtgggggtgggaggagccatcttgtgtgttgaaggatgtttagcagcattcctggcttctcccactagatgccagtaggaactccccagctgtgacaaccaaaaatgtctccagacgtagcccagtgtttcccgtgggataaaattgcctttggttgagagtcactttttttttcaaaaaagttgctttatatttagagcttctgtcaccatatgcttccttacatcctgtgatgccaaagtcattcatttagcaatatttattgatcattgacaatatggcagatatgggtgtgggaatgtggggtggagctgggtgggaatgtggggtggaatgtcgggtggacaggatgggatgaattttgtgtgtatgtgtgtgcaaatgtactcacctatgtataaatgtatatatgtgcacacacttattaaatctttctttactggcagatgtgagtgctgttttaaacatttgcttttttccttataggtttggcactgatatgcagatgattaatttcacaactggtgaattccagctcaccgaagcttgcccttacctggtaggatgttatcctaaaacagaaaaaagaatgccgacaaactagacacatgagcatacgggcctcattgatttatgtttaaaatgtcttttatttactatatatggctcttttattttgattctctgggcattaacgatacatagcagatttttccagttaactagtgcggtaggagctgggtttatgttagctctaaatcattttaatttgattatttagaatcatgtgagtaaagaaataacagttgaacagagctttgtagaaaaccatgaaacttgagaccccagaatttataattctcttaagattccttggccctcaaattcttttttagggcaagataaggaaaaacaaatacattaaaaaaaatcttctcttactaaactgtgttcctgtttttagcaagtcacccaatttctgtgatgtttaccttatctataaaaaaggactactctaaaattcttaagcctgtgggcagtcatgaggtcttgcccaaatacttaggagtaggagtaaacatgtcatgtggtgaagatgctatttgcctggggacttggcagccttacttctcagtttccactcagtcattccgtggctatttatatacagctgagtgttggccttacaggtattctgtgtttgagatcaattcaaaagtggagcatctgttgacaaaaaatacatacatacacatgtaaactcacatatgcggataactctatttttactacactatatttaagcgccttgggtattttcttctttctttatctttatccctccaaaaatatactgttggctctagattactttcaataacagaaggaggaagaccacagataacccattaccacagactctcctttcttttcttaagtgttgaggcagcactgggcgagttggggggagtggtgaagccgtgcacccaggtgtggttttattcttgttagtgagtctgcccctctctctccttctcattttctccaccaggaggtcttcaaggctattcaggataatt

SEQ ID NO: 147 - DNA, 1028 bp, Homo sapiens
gcaacggagaggagcgcgagcagcagcatggcggggctccgacgcccgcagcccggctgctactgccgcaccgcggcggccgtgaacctcctgctgggcgtcttccaggtcctgctgccctgctgtcgcccgggaggggctcagggacaagcgattgagccgttgccgaacgtggtggagctgtggcaggcagaagaaggggaactcctgctgcccactcagggtgattctgaagagggtctggaggagccttctcaagaacagagcttctcggacaaactatttagtggaaaaggcttacattttcagccatcagttttagattttggaatacagttcctgggacatcctgtagcaaagattctccatgcttacaaccctagtagggacagcgaggttgtggtgaattcagtgtttgcagctgctggacatttccatgtaccgccagttccctgcagggtatctggaattggcactcgtagaatctctacagaagggtctgcaaagcagctaccaaatgcttattttctgcttccaaaggtccagagcattcagctgtctcaaatgcaggcagaaaccactaatactagcctcttgcaggtgcaactggaatgcagtttacataataaagtgtgtcagcaattaaagggttgttatctggaatctgatgatgttttgcgtctacaaatgagcataatggtaacaatggaaaacttttcaaaagaatttgaagaaaacacacaacatttgttagatcatctctctattgtttacgtagctacagatgaatctgagacctcagatgattcagcagtaaatatgtatatattacattcaggaaacagccttatatggatacaggatatacgccatttctcacagagagatgctctgtctctgcagtttgaaccagtactactacctacttctacaacaaactttacaaaaattgcttcttttacctgcaaagcagctacatcatgtgacagtggaattatagaagatgtgaagaaaacaacacacactcc

SEQ ID NO: 148 - protein, 343 aa, Homo sapiens
  VARIANT (1)...(343): Xaa = Any Amino Acid
ATERSASSSMAGLRRPQPGCYCRTAAAVNLLLGVFQVLLPCCRPGGAQGQAIEPLPNVVELWQAEEGELLLPTQGDSEEGLEEPSQEQSFSDKLFSGKGLHFQPSVLDFGIQFLGHPVAKILHAYNPSRDSEVVVNSVFAAAGHFHVPPVPCRVSGIGTRRISTEGSAKQLPNAYFLLPKVQSIQLSQMQAETTNTSLLQVQLECSLHNKVCQQLKGCYLESDDVLRLQMSIMVTMENFSKEFEENTQHLLDHLSIVYVATDESETSDDSAVNMYILHSGNSLIWIQDIRHFSQRDALSLQFEPVLLPTSTTNFTKIASFTCKAATSCDSGIIEDVKKTTHTX

SEQ ID NO: 149 - DNA, 34683 bp, Mus musculus
  misc_feature (1)...(34683): n = A,T,C or G
caaaagcctagagccaggctagcccctcacccccagctatatagccagggtggttgtaaatacgttttgagtctgattcttatttttgggagtatggggctggagtgaagaacaggatttaacttctttcaatttttgtgagtttgaggctagcctggtctacaaagcaagctccaggatagccagggctgttgtataagagaaaccttaactcaacaaaccaaaaaaaaaaaaaaaaaaaaaaggtagactttaagggaattcaaacctagaactctatccccagctcagagggtatcagctccctaataccagtccaaaggtagaagtcaaggcgaggggatttcagatcccaacccaattcgtggcaggagtacctgggaaggaatgtagaagatgaggtgctattctgtggtccctctcaccctggtctggatgatcaattgggagaatttagaaactagacaaagcagaggaaactttctttgcaagggctgctcctcagaatcccacaggacaggaaattgctgctgctgctgctatttggtttggggcaagccccttttctctggtctctccactctcaggtaattagcgggtgcttgctgagatcgtaaacccagaaacaggagccaggactactacagaagacccctctttcagtttttcttttggggagggtctgggagttttcagacaggctcatatggtccagtctggttttgaagttgatgtgtagtcaagatcgctgtgaactcctgatactcctgcctctttctggtgctgaaaacacaggtgtgtgccaccaagggccacttattccttactcatcaacatccattgaatgtttataaaaggtttccttttttttttggattaggtctcatgtagcctacactgactggcctggaatttgatgtgtatctgaggatgactacgaacttctgttgctcctgcctctacctcacaagtgttgggatttgtgacatgtaccactaagcccagattctgctacactgggcactgaacccagcattttgtgcatactagacaagcactctaccaacagctacatttctaacctaaagtgtgtgtgtggtatgtttgtgaatgtgtacccttgtatgtgtgtgtgcagctgcatgcgtacatacatttggagaccagaggtcgatgctaggtgtccttttcagtcactttccatgtttctttatttttttttacatttatttatttgtgtgtgtgtatgtgtgtgcacgcacaaatatatggaagtcaatgtacaaatggaaggagtcagttttctccttctagcatgtgggtcctggggattggactctaatcatcaggcttgctggcaagtgccttccctcagtggaccaatctcacagattctccacttcagttttgagaaaggagttctcactgaacttggagttcaccaactgggttggactggttggctcctttccatgcctctcagcattggcaataaaggagcatgcccagatttttccatgagggcctgggatctcagattcttctgtgtgtgatgcgagctctttagcgactgagctatatccccagtccacatattggtttggatgttctgttgttgttttgtggcagggtttcactatgctgccctgactgtgcctggaattcaatagataaaccaggctgaatcatggagattcttctgccgctgcttcccaagttctggggttaaaacttggtgccctccctgatacctgcctcagatttttgttccctccaagacagagtttctctttgtggccctggctgtccttggtttgtagacgagtctgtctataccagctcagatcttttttttagattctctattattaagaattgatggggctggagagatggcacagcggctgagaacactgtctgctcttctagaggtcctgagttcagttctcaccaaccacatggcggctcacaaccatctgtaatgggatctgatgccctcttctggtgtggctgaagagagtgactgtgtactcatataaataaaacagataatttttttttttttgagacagggtttctctgtgtagccaggctggcctcgaactcagagatccgcctgcctctgcctcccaagtgctgggattaaaggcatgtaccaccactgcacacaataattctttttttttaaaatcacactttacatttttctttaaaattatctgttttggggctggtgagatggctcagtgggtaagggtacccgactgctcttctaaaggtccggagttcaaatcccagcaaccacatggtggctcacaaccatccataacgagatctgacaccctcttctggtgtgtctgaagacagctacagtgtacttacatataataaataaataaatcttaaaaaaaaaagaaaaaaattatctgttttgtcgggcgtggtggcacatgcctttagttccagcacttgggaggcagaggcaggcagatctctgtgtttgaggccagcctggtctacagagtgagttccaggacagccagggctacacagagaaaccctgtctcagaaaggcaaaaaagaaaaaagaaaagttgaactagagggactgaaatgctgctgctgtcacctgggaagatgggatgggcgtctgatgacaatgagcaacagtccctgtcacccagctcagcctccaaactctctgcctgggaagcctcccattgtatattcatgagatgagaggaaccaatgatgtcattcctcagagttctccccagggctctcttctgcctatggggcaagactgagaagactccttccgtgggagcttcacaccaccaattttcatatcagcaagatcccaggcagcacaagttgctcaccgactccacgatctttgatctcatcatgcctccgtcccaggtgtttgctttatctcacaaacccttcctctcttatcctacagtgctcacatctatcattacctcctctgcaaagcctttcaagactttaatccctcaaacagagaatctggtgttctcaattctgggcactcagacagggttctacaggttatattctgtggtcatactctgcctgtatttccctccacaactagacgcgatctgttcaaaagacaagattattcagaccttgttcatctctattggtccaaagaaagctttatgactgcactcacaaggccaccttgatccccacccccctttttaaagatttatgtatttattttatgtatgtgagtacaccgtagctgtaggttgtgagcctttatgtggttattaggaattggatttttaggatctctgctcgctctggtcaaccctgctcactccggtccaaagatttattattatacacaagtacactgtagctgacttcagacgcaccagaagagggcatcagatctcattatgagtggttgtgagccaccatgtggttgctgggatttgaactcaggacctctggaagagcagttagtgctcttacctgctgagtcatctcaccagcccccttgattccttcaagtattcttttgtggactcgagctctctcttctcccagctctacccacccacccatagtacaaggccaccatgtattaagttttacatttcaaaacatgttaagaaatttactctcccagtggtatgtacgtatgtatgtatgtatgtatgtatgtatgtatgtattttagacagggtttcactgtgtatctctaactgtccagaactttgaagtccttgaactcatggaaatccatctgcctcctccttctgaatgctatccttaaaggcatgtgccaccacctccacccagctctcccagtgtttattaaccaaaggcatatatcctgccaatcgggagcaggatgaaggaaagaaagtatcatgagttgtgagcttgtgacgtttgttttgaacatatacatcatctcactagatcctcaggacaatacccaatgaagcataagtacagatcagataagtgagagaagttgcaatctgctccaaatcatagatgtaaccagaaacagggccctggtgaatctagctaggtcccagctatgctgttatctcttgactttaatcaatatgaataagttcaaacattatcataagatcatggcatgccacactgaagatggaaaacagctttctcccagggttgggttgtccaatatgctgtctgttgagatggctaaaaaggaagagcaaagtcggggcaggactccagggacaagatgatccctgttccaagtcaattaacttgagtcaaagctcttccagctctgaatgggtcaaggccattgaagcagggcagggcctccttgcagaaccgtggtgtgatcatgacgagggtctgattagccaggaagggagaggtattgctcaggcactcatcctacgatgtcttctgacgatatcacagctcttgctcaagaaggttttcacttgagcgcatgagccctaagggcacctgctagcttggcccaaacactgaagtttcccttgcactgtgtcatggtcttagcatggccttagtgtaaggtaaggctgacattttccagctcctgtcattccttcatttttacatctcctcaggtgtgggagtagggctgtctcttttgtctgggattgaggaccttgcactggtgagactatagaataagaagaacccgagttggaagcagggaatctctgtatattcccatgttcctcagttcctcctgaactgggggttagaatcacccattggtcagctcaggtttgcctgtggagtggtccatggtctcatgagatccgatgcatcggtcttgagacctctcttgatccataactgcgcaaccaatattccaggaactagcagcctcaagtgacttcaagggctctcagacatttcctctccaaggaacctctcttgggatcctcaaagttctcaccttctaaatctgccccacctcttcttcacagggcaaacaaagggacaagatcagaaacaggcctagacatccctatcccagcatctaccgtaggaagaagtccttgcttgcttcaggacctgcccagcccctatctcttgaccttagttagcggttccctacccaggatgtaaatttgccagtgatttgttgagccaagtatgggtttgacccttttctctagaagtttgggtcacaggtctggcaggtcaggactatagatcaatcttatcaccaagagatagattgcagttactccatctggcagcagtagtattcagcaacactttccctcaacagtaatgtgcgattcccaattcccaagtgcttctttctgataatctgccccaggagattctagtctgtgtcccactgggccagaagtatcattttgagttatcatatgttatttagcttcccaaagatttacaacaacaacaataacaacaacaatttttttttttttaatttctgttgttgagacaaagttactctctagacctggcagtcctggaattctctatgtaaactagggtggcctcaaactggcagagatctccctgcctctgcttctccagtgctggaattagagacaggcagctagttacaagaaaaactttatctcctctggcaataagagctttacttggtgaggttttgcctagtctagaagtaataataacaataacaacagtgaaacaatttacagtgaacagtgaaacagttcttacagcagtggttcccaaccttcctaattttttttttttttttttgatttttcaagacagggtttctctgtgtagccctggctgtcctggaactcactctgtagaccaagctggcctcgaactcagaaatctgcctgcctctgcctcctgagtgctgggattaaaggcgtgcgccaccacgcccagcattcaaccttcctaattctggcaactctttaatacagttcctcgtgttgtggtgaccccaaaccataaaattaattggttgatccttcgtaactgtaattttcctactgttatgaattataatgtaagtatgcaggatatctgatatatgaccctcaaaggggtcatggcctacaggttgagaaccactggcttacagtgtgtcaagtgattattttaagcatttcatttaatcttcatgtaattatgccaacttagtgagataaggagagatagaggtaggaatagagatggagagagagagagagagagagagaaagagaaagagagaggagagtgtatatggcacacacatgtggaaggggaatgtacgttcacccatgtacacatgtgtggaggccagagtcaacatcttgtgtttctctatggctttctaccttattttttgggatagactctctcttcgaacttggagcttactatttcaactagattggctggccagcaagtccctgggatctgcctccctctgcctgcctgtccatcctccagtgcagatgttacagacatgagccaccttgccttgcttttatatgggttatgggcatacaaacttgagccctgtgttgcacagcaagctctttacctactgagccatctcaccagcctctatttttttttttttttaaattttagtcaggatcttaccaggtagcctaagttactagtcttttatttgcttgttcgtttgagacaagatttctcaatgtaaactgggcatggtggcgcacacctttactcccagtactcaagaggcagaggcagagacagaggcagaggcagagacagaggcagaggcagaggcaggcggcaggnnnnnnnnnnnnnnnnnnnnnnnnnnnnnnnnnnnnnnnnnnnnnnnnnnnnnnnnnggctatatagagaaactcaagatttctcagtgtaataatcctggctgctctggaacttactttgtagaccaggctggcctcccactcacagagatccacctgcctctgcctctgttctcctaagtgctgggactaaaggcctacaccaccacaacttgctaggccagctagtcttgaacaatccttctgcctcagtttcctaagcgcttggatagcaggtatgcatgactatgccagttcctggtaaatcaaacctgggactttatgcatgctagaccagtactctagcaactgaacagtattcctatcctctctgggacctttgtgtacactccacttctctacttccagaaaggtcaggggacccagttgttctctggggagggcctagcagcagccttgcttgaatgcagggatgtgcagagcaacacagaggacgcacacacatttgcccttagctgaaatcttgagctagacccagaaaggggactggtggctagaaggacagacctactcctggatgaatagctgcgtgccattagggagaagttcttcctctcatgagaagatgggggctatgaagaaggggcccatgtttctcctccaggcttctgaggccaatagagctggctaggtttccagagcttcaacctagttacctgggctttgagcctgatggtatggataggaggaggtagaaaggagaactttcaaagggactaatggagttacctggtcaggactgtaggtacctgaatagatagcaatcaagtttgtcatcaagcttataaaatcaaacccttgtctctcttcttttagttttgggtttaaacatctgtagaacggggtaacaaaaacaccctctgtcatcagtgttggaataagtaaattagatggtatacacaaagcaaaagcactgagcaccatgcttgctcaggaaacagtgagaatttggtgactggggactgttgggtttatgatgctctgatttgctcatgatgatttactgtctctcgggttgcgttacagagctctgtcctgaccagtagggctagaagttagaacaagctgggcctgaattcagagtggaagaaaatcgtgggcaatagagctaggattcaaaacaatgtccacaggcggaagtaagccagatgtcattattctgctgagcgcttggggacactacacagaatagaggatggtgaagaaacctgacttgaccccaagctctggtgctaagaatctgaataatttagctaaccacaacctgatgggaactaatcacgggagagaaaggctctgaaacccagcagtcttaggctgcattaacaatgtgtcgtgtccagactgggggaaataataggtctattgtactggcttggtcaggccatatctggaatcttgcgttgctacactgacagactggaatcgggccaggaggggaactagcccagcctcagctcctgagtccttgtgcgcgaaatgtttcctgtacaacttcttgtcttatcccccagacaacgctattaggtaggtccctattttgtacacaaggaggttaataaagttgttcaggaacaactagatagcccgtccatggaggtgcctggggtttttctgaatgggctggctcctctggtgcttcagctcacactcactgtgatttagtgggatatgggagtgaaagagatagagttcttattttcaaggagggcataatctggctcggttattcagatcacttctggaatgctgccattcaaaggagtgaagaatttagggctggaagagactgtacaggactccatagcttccctcctatagtatggaagagagagagggcagtgtgacagtggggacaacaggccttcttacagtcttcactatttcccttggcttgtttctggacagtgatgtgccagggcacacaagggtgctgtggccattgtggaggagtcagatctcaatagctcttccctgcaatctgaactaagaggaggggaaaaaaaaaaaagcttgacactgagaaacacaggtcctgtgtgagcggtctctgagagtctaagcagtaacttcactgaagagggagagctggacttgacccaggctcctggggatctgggaaggctggagtgccattagcagaggtggaaggaaaggcagcaaagaccgttctctgctggcacctatgcctggcctctgtttagatgatgacggtcctcccttctttcaaggaccacattcctctgcatgctctttctcaaagcttttcttttctcttctctcttttcttttcttttcttttcttttcttttcttttcttttcttttcttttcttttcttttcttttcttttcgacacagagggctgctggcgtcttgtatctcccagggcttcctgtctgggagcacagacatagctcagccttctgtaatttatgctgaggggcagagcaggagagttatgagtaaagactttggaactggacaaaacctttctggcctgtctgtgtcgcaacagctgttcttcttgtgtccccctttcctgggttgtaaaatggggataataatagtaccaccctcagatggcgttcataagcacccagtgaggtcatgttaagcctgttagaaagctacccataaacggctgctgtggccatggctccttcttagaacttgcgagttcccctgcctggaagcggtagccactggacttggtaatttttctgtcccattgaaaaaggcccctacttttcaaagggaggaagaggaaattgtcgatcttgagacacgagggacattgataatgaaagttacagcccatggcctcaggtttgggggaggggagaagccacctgactccggattttaaaaggagctgatggggattcagaagtcaagggccacaggctctactcagggaaaactcactctgggggacctcggacaggtcactttcagcctgggacttcagtttcctcgggcgagtcaggtgggtttctcagctttgcttaggtagttaggagcacgcggtgtgggttgccggctttgagaacgtggctgagcagcgaggctccgccagccgagatgggcaggcgcgtgcagggattggctggaggcgcaggcccgaacctttaagaggcgcggaggggacgtgctagggagttttcatcgccggcgttcctggtttgctaagtgctagcgaacgtagtagtggctggggctgcgcctaggatcggagccacaggcgagtgccggccggcagaacacaagagcatcccggcgtcccggtcccacgcggcgtggcccgcgggtcatggccaaaggagaaggcgccgagagcggttccgcggcggggctgctccccaccagcatcctccaagccagtgaacggccggtccaggtgaaggtgaggtcccgagaggagggcaaggggtggtgggccggccgggatgtgggtataggggcgtcggagactaggtctggccttgggacacttggcggtaacagggtacagcgaagcttgaaaaaagcaaggagtgctctgggaccgggagtgatggagaaagtctgaagcccctttgcacacccctacaatgggtttgcgccaagagaggcgccggcaactctacgcggcgtggggctctccccagcgctctaggttctactgtgctgagccacactagtttctctccctagacctgaagagaccccagaagtctgagagtccctttggttctccatctctcaccaccccccactctcgtgctttaactctgaggagggccactcaagttcattcataagaacaagggctttgctcttaaaggagccgcataccgaaagcgtttgtgtgactgagggttcacatgcacagagctccgcgtgtctcgacatcctctctctccgatccgttctaactctttggatctatttaaccacaccatgaaaccatgcggccccaggaaagggatctctcacaatatagctaattgggaggtgcttaacttttccttttaattttattaactgttcttggaagaaacgagtaagcaattatgctgttaccatgtatgagtaatctctactttccctgggcaacctcagcctcccctagtgctccacccggagagggctgagccctgcacctggagccctttttacccctctccaaggtcccctaggagctggaaagggtgcgtgttaggcagatggatggtaggactgctcaagggtttgcctggagctgaagactccctacaggggcccgggaactttgggacagattgaaagaacagctgaggatgcagcgggctgggcgccccccccccttctggtgcactcatccaggacgcaggtggatcctagctgctgcggggcgtcagggagggagcctgggctgggctcagggaacttttggcagcaagaggattttcaggttgtggcagctagtgccaggtagggacaggcccattgctaccgcatgctctttctgggtaacttggaaaggagctgagggcctgggagaagattttatttatttatttatttatttattcatttattttcttacttatttgagacaggtttctctttgtatccctggctgacctggaattagctctgtagaccaggttggcctcagactttacagatctgctgggctctgcctcccaagtgttggtgccactacacctgatctgggagatctttaaagatggaaggtgatagatttcctcagagtctgggggtggagggataagtctgggtttaagggcaacttcctgtggggttggggaagtgagatttccctaggtgggaactgggcaaggtagaactgtgcctcttggccgagttggctggagaaataaatgtctgtgcctctggcacgttctaggttggtggccagaatcctgggcttattttcattctttccttctcttcccagaaggaaccaaaaaagaagcagcaactgtccatttgcaacaagctttgctatgcagttggaggggccccgtaccagttgaccggctgcgcactgggattcttcctgcagatctacctattggatgtggctaaggtgagtaacaggagctcctcgggctcctttggtagccagagggaactgatgggctcttggtagggtcattcagttttccccagtggtaaaacaagaccaggacacattccttggctgccactcagggtcacagtggatgggaagtaaggctttaggaagtgtgcgggagggggggggcagtctacctgccccaggaaccacagctggcaactcttccttgcctggcaggagcaatagagagcctggcggaatagggcagtggctgagggagaatgggacccgctagtgacgctgttcttagaagagactggcacaccatgtccctggctggaagacagtcagctggcttggctcagggtttagtgggtgttgctgttgctaggttgatggaagaactgtatctcaccttcacctgaggagcagcagcttgctgctgatggctaggggaaacctgaaggtgcaggcagatgttagtgtcctgggactagggggtctctgatggaaagggctagtttgggtgaagcagggctactgtgtgtactttgagaagccttggctggcagcctggcatccaaagaattcgccctgtctggatgagagagtgggagactgggtaaccatggctccggggtgccctcactggctcttttctgtgtagcatctctgggcaagcgaggcatattagtttccatttgcaggtgtggaacactaagccccagaaaagacagaagactcattcagtagctaggtttccaacagttcccatggctgggtcccaagcgggttataaataagaggaacctgcagttgactataaaatggggttacaataagtggggagagtacagagtggggatacagtgtggggaaggctgccagctttccagagcagggttgtgacaactggatatgggggcacacaccagttatcccagcacttaagaggccaagacaggattaagattcaaaaccagcctgagactctgtctcaaaaacaaagttaaaaagaaatcaaggttttatggatgatattaaagctagaccctaaagtgtttgggaagtatgagacggtttgagtaaagggttataggacattctctaaaagtcatctatagagcaggcataaagtcacacatctgtaatcccagcacttgcaagttagaccagctgggtctacttgccaagttctaggccagtcaggactacagatgagtctccctctacatacatacacacacacacacacacacgcacacgcacacgcacacgcacacacacagtgtgtgtgtgtgtatgtggggggcgttgtcactggagagattgttccatggttaggagctcactgctttcttagaagacctgagttgtgagtacccaggccaggccactcacaaccacaacagcctataactccagctctagaggatccaatatctctagcttccaaggctcctgtacttgttcaaacaaatcccaacacacgatcacgtaatttaaaagtaacatgaattctaagaaaaaaaaaagataaaagaaaacctctccgcattcccctttccatatgcaggctaaagcttgacctcataaaaacacactgtagctgatacgtcttttacagatagggaaactgaggctcactgaggggtgcagggaacaaacacgagctctcttatcaggtggccaggggctcggaactgtcagggggaaggaaggaagtgacctatgttcagtgtttgatgagatgtttctaagtgcagcagagggaaggaaagatctagagaagcttcacacatagccccactgcaaaaatgccgttattggagatacgacgttgtcgccaccatcatcaccacgatgttgttggggtgtttttgtttttgttttgagactgggcctttctatgtagtcttgactgtcctggaactcactatgtagaccaggctggccttgaactcagagatcttgcttctacctccagagtgttggattaaaggcatgtgccaccacatcaagccactgttgtcataattgtttatcataatgtgggagaactaaacccaacagcccatccattctagacaagcatactactactgcgataaaccccggaacctgctagtgtcactattaagacagtgagtgaaaccaagtggtggcgcacacctttaatcccagcactcaggaggcagaggcaggcggatttctgagttcgagactagcctggtttacagagcgacttccaggacagccagggctgcagggaaaccttgacacggaaaaagaacttcatgaaaatgtttaagatccaggtgggaggtggtgtaaggtcttggtggttcagctgtgccagggagggatgctccgctaaggcaatgaatgaaggacaccttttgcttcttccccatggcaggtggaaccacttcctgcttccattatcctttttgtgggccgagcctgggatgccttcactgaccctctggtgggcttctgcattagcaagtcctcctggacccgcctgggccgcctcatgccctggtaagtagagacgctccttcgaagtgcagaaaggcaggcttctggtgtttctccccccccccgccccccagtcctcctccatctcttgtcacaggttggaggttaatgggaaagcatgacacaatagctcaatggtgtcgaaacctctcaacctgtggcttcagctgccccaggcacgagcattgggacacctagacagttcatttcggggctggccagagtgctgagttagtttcctcccccagctcaggcctcagggctccccaaggtccgctcactcaccttggtgagactggaatccctacttctgccattctgtggcagcagaggtagataggtctttgaaacaattgagaggttacctgggtttgaatggcagcttcaccacttacagctgtgcagcctcaagcaagttattaaacatctctgatccttaggtaaagccgaggtacggtgaggacgttaatatgtaaaacgttcagaacagctcctggcaggtagtgatacacaatctgacattcgttcaaggtagttaatggtaggacatgggtaggggcgatactaagaaataccaagaatggccttgtgtacccatcccaaagcactgagtgatgggactattttttcccttggtgttattcagcttcagcttgtggggcaaggttgggggaaggcagttgccatagatcagacagtgatggagacatacaagacaggccaagcagagctctggttccctccaggacatcctgcttcaggaggtgggggggtgtacccctttcatctccagcccatccaagcttaagtgggcgccttcctgccccaggggcgcccatacctggtctccggccttcaaagctcttccagcagcctctgcacctccgcagtttcctttcccacgaggccccccacccaccccagtcctgccagcccctggcagaaacccagtttggagcctttgatccaggcttcatggccaaagggggtgaaggagggggtaggagagcctcctttacctgggcaagctgctcagggagtcctgagagccagcctgcgagacttggccctgtgccggcctcttggcagctggtggagggcggggccccgctcccacatcgcctcatgaggcccagccaatgggaggccgctgcctgacgcgatgccggcacagggttactcccagtcacatcgggttcctgttcactgttcaagctgcctgtctctgaggatggagtgtttgaggaaggctaaggaggagccctgttctctgaggcgacaacgtggaggggtggaaggaggaggaggaggaggagggcaagcaaggcctccttgtgggagggagatctgaagactcttgctaggtcagtgtgactgctattccaggaaagttgctaggtccccttaggttgctttctagatggcaagtgcctgggtatgcgtcagaatacacatgggatgactcataggccgaggggccattgtgttcatgacatcccaggttgcacctctaggcttggagaccaaaaagaggttgggtctgtcagggttggctagtgttagccttgctctcctctccttccaggtgttaggagagttcctacttcaagcccctcctacaaactacaaagaaagtgacattctctcacctgggaactcctaaggccaactgtgagaccctgtcagcagagtcacacagagagattgagatgcaggggggcctgaggttggtggattaccaggcactgtccacttgcagccctggcctgtagtagttcccgaaggccacttctccagttgagcccttctgctgtgatcacagcaaacacttaatgtcccaagtactgttcaacatttttctgtcaacttatttaagactcaagcctacttcaacacacaaagtggaagtccttacacttgcctgtgaggtgtgccattttctccacatgttatctcctaattccatctcccttgctcactgtcctccggcccacaggccctgctgttccatcctcctgcctcaggacctttgcaccgactctccccctgactggggccacactctcagagatctgcagtcttgactccctgaccccatcgtcctctcagccagctgagaactgtgccctcagtctcctgtctacttactctcttcttttctccatagcatgtgtcaccttttaatatgctatatgactgttgcaaagactgtgacaaaatatctatagcatagcatttgccttattcatgtatttatttgtggtagaactcaaacccagggccttgcacatgccaagcaagtgttctatagccttgatttttgttcaattttgttctttgaaggcaaggttttatgcagcccaagctagcctccacctcctgattctccatttcttaagtgcccagattagagtcgtgcacctccagcgaaacccttgtttgttttattatttggtcagggtctcactgtgcagccctggctaccctgcaatttcttatgtagagagcagtgtggtcttaagctcacagaaatcaacctgtatctgcctcttaagtagaggcaggggggtccctgagttggaggccagcctgggctatgtagaaagatactgtctcaaacaaaacaaaacacacaaacaaacaaaaaccaaaacaaaccaatagtgaatctagtgtgtaaatgttttgcttgcatgtatatctgtgcctggggaggttagaagagggcgttagatcttttgaaactggagttatgaatagttacccaatgccatgtgggtactgagaattgaaccctaggtcttatgcaagaacaagtgctcttaactgctgaaccatccctccagcccctgtgctcttcgtttaaaaaacaaaatcagatctcaatatgtagctcaggttgactctgaactcaggcctttttgcctttgtttcttgaatgtggggttacagggcacaccaccatgcccagctcattataaacttttaaggtgtccaataaagtagcattaagtatagtcacatccttgtgtgaccatcactaccttctatcccaaacctttttgttgttgctgttgttttgagacagagtgtctctgtgtagccctggaactccctctgtagaccaggctggacttgaactcagggactctgcctgggttggcctgctgaatgcaggagattaaaagcatgtgcttctactgcctagctcatcccaataatttttttttatcttttccaacccaaactttgagttcattaaaagataatccctactccttcttccctgtcaaccactatttcttgggactgagggtgggattctgggaggatagattgtgatgtgtatgtgtaggtcaggggacaacttgtaggagttgattctttttctcttacccgtctgtgaatttgaactcatgtcatcgggtttagggcttgacaaatcttgctgggtcatgtctaaaactggatttggttaccccctgtaaattaagctgtacaatatttctctctcaggaacagttatattccaggtggccattccttaaagttctgtgttgtcgcatgtgtcgagatttttattttgggggctgaataacatgcaatttttgttgcttaccaactagaattcaagttttacaagagcgatggtgtcttcttcactgttatatctgcaacagttagaatagttcctcgcccataattacacctcataaatatttaggtaaacgttgaatgtaggcagtgcacgcttttttattttcattttacatatgagtctcagagaagttaaataacttaaccaagacttttatagttagtgacagactcagaaagtgtaactcaaagcttccttcttttttgaatatttgttttatgggtgtatgcgcacacatgcatacatacatgtgggcatgccgcagcacaatatgtggaggccagaggacagcgtgtgggagttggttcccgccttcctcagctgtgttctagggataaatctcaggttatctgcggcctcgcagcaaacgattttcccactgggccatcttgctggcctgaggccttccttttaacctttgcactctgcttcctatgcaaatgctgggaagttgatccgcctggagggatccatatttctcacgatggtttggccagacatttgtcccctaccttccttagacttctgtgactgagcccggtcctcttccgtgacccctttctccattacctggagttggcctcttctacccactccagcttccttgtgtgtgtgtgtgtgtacaagagatgcatggaaggttaaggatgatgctgggaccacccccttcacggggagtcttgctccaggaaagatatgcttgagactcagagtctgacctcatgctccttgctctatgttcccttcaagctccttgctcaagattttggtccaggaacttgccctagtcggtccttcaggcatgggcatcaatctttctccgaggctctgggttgggagggctcatacttcttcccccgttgatgggcacttgtggagcagttctgggctcttagactcctctagcctccactcagacccctctcctttcctcaggatcatcttctccactcccctggccatcattgcttacttcctcatctggtttgtgcctgacttcccatcagggacggaaagttcacacggcttcctttggtacctgcttttctattgcctctttgagacactggtcacggtgagtgtgggcccctccccttggtaccttggtgaggggcaggggcaagggtgggccctggggggggggtcctttgcgtgcctcatgcatctaaccagctgagaacttctcttccacaacagtgctttcatgttccctactcagcgctcaccatgttcatcagcacggagcagagtgagcgtgactcagccacggcatacagtaagtccctccccagcatcctggccccgcctgcaggggaccctggacctttctggtcctgttgccccaatccctcttatgctctgtggggtctagttcttggctctattacagagagagagagagagactggggtgaacccctcttcctagagccttgtgtctgtcaagcagtcacttaaccattgagttatatccctagctcatgaaagcacattaaaaagaactcacttcctttatcactcaagtgagacccagagaggtatggtgactaacctgaaggtcacacagagaaaggccatgaaagtaggctgaaatgtcaactgccccaccccctagcccaactaacctggagctaagagtgccttccagtcatcttaccttcctccctgggcctctgggccatgagggcccatctgaaaagacctcttccctgcctaggaatgactgtggaggtgctgggcacagtgataggcacagcgattcaaggacaaattgtgggccaagccaaggcaccttgtctccaggaccagaatggctctgtggtggtctcagaagttgccaatcgcacccagagtactgcctccctcaaagacacggtgagggccctggtagggcaggggtttgggaagagaacaaatggggtaccttgtgtttattctacaagcagtaatagtagctggtaagtttatcagttagtgggcatttggtaaatgtaaatataaggatgtacatatacccacttcacagataagcaaagtgaagcctgggaggccaagccacttgcccagggtcccagtgagttgcagcaattccggaagacttgggctgtggggtcacacactacgtagtctggctgtgtaacattttgtatacttgggattggcccagccttgagaagcagcagcaggtccaggatgaccctcctggatcacagatggagacagtgaggcccccacgggagaaaggcctggcctgagatcgtggcatggggctgctgggatgagatcagactgaccctgtctctgtatgtcatagcaaaatgcttacctgctggcagcagggatcatcgcctccatctacgtcctctgtgccttcattctgatcctaggcgtgcgggagcagagaggtgagaagaagcgttctgggaagggttttgcccacagctctggggagcagttgtccctttctgcctgcccaccaggctttggaagggacttctgccacctcctcattatcctctctgatccctagaactctacgagtcccagcaggctgagtcaatgcccttctttcagggcctccggctggtcatgggtcatggcccctatgtcaagctcattgccggcttcctttttacctccctggctttcatggtgagtgagggcctgagatgtgcatcccaagagtacatcctataggggtggggtgagagaagatttgcactgtggtgaagctgaggggcgggcaggatggagtggggggcaagtaggggtctctgggctccccaagtcacctgttttcttcatttccttcacctgtcccatgcctcagctggtggagggtaactttgccttgttctgcacctataccttggacttccgaaatgagttccagaacctcctcctggccatcatggtgagtacagggcgtaaggttagccgatgatgtatgtctggatggttccttgagcatcagaggatacgttcagggtgctccttagtcatgaagggatgagggaggtttccctggatctcacctatgattgcttagggagggttaggaaagaagaagatttgaggctggatggctagaaagcacagaccattaaaaacaaggataccaacaactgtggtcagctttgcattcagagttatgaaaagatgggaggactacttactctacgctcccctgggaagccatcagacatgcctggcggcttctcaaggtcagtggctggcccaggagcatctcttggggcctgcaattggcaggaagctctctgcaatacaataacacccccccttcacctttcttgttttttttgctttttgttaagttttttgagacaggggttctctctatagccctggctgtcctggaactcactttgtagaccaggctggccttgagctcagaaatctgcctgcctctgcctcccgagtgctgggattaaaggtgtgtgccaccacacccggccccccttcacctttcttgttgcccacagctctcggccacattcaccatccctatctggcagtggttcctaacccggtttggcaagaagacagctgtatacatcgggatctctgtgagtgtggctcaaagggcagagttggagttgagttggggtgtatgtgggggagggtttgcagacaggagcctcctgggtgacctatctctgttccagtctgcagttccttttctcatcttggtggccctcatggagcgtaatctaatcgtcacttacgtggtggccgtagcagctggcgtcagtgtagcagctgccttcctactaccatggtaggttacacagaggctcaccaagtgcattccccagccaacatgcaacgctttggtggcttctcctcctgcttttctatgggcctgggatgaggtgggtctgcctgatacggtgatagaggttgtgaactatgaaacacctagcctgccctctctttgccaagcagaatgtctaaggtgggacccatcttaatagatggggcctgtagagctatccccttacaagctcccagaggacagttgctgctcattgacatggataccatatgggctggtagctaggcgagggtcattcatggctgccgccatccactctgcataggtccatgctgcctgacgttatcgatgacttccacctgaaacaccctcactcccctggcaccgagcccatattcttctccttctatgtcttcttcaccaagtttgcctctggagtctcactgggtgtctctaccctcagtctcgagtgagtggcctgtgagtcttgggcaaggaggggagcaggggtagggttccggtatcccatcctcaccattccttgcccacttggttctacagctttgccaactaccagaggcagggatgctcccagccagaacaggtcaagtttacactgaagatgctggtgaccatggctcctatcatcctcatcttgctgggcctgctgctcttcaagctctaccccattgatgaggagaagcggcgacagaataagaaagctctgcaggctctacggtgagagctctctctctctctctctctctctctctctctctctctctgtatgtgtgtgtagtcagtcagtctaagctctcaactagcactgctgctggacagagctagataactcttagctacatgctaggtaccatactgcctttgtctttatatgtatttactcaacaggcaacaaaacaggctggttttcttgtttgtttgttttgttttgtttgattggttttgggggttttccagactgagtatctctgtgtagtcttgactgtcctggaactctgtagaccaggctggcctcaaactcacagaaatctggctgcctctgcctcccaagtgctgggattaaaggtgtgtgccatcactgccctgccaaagaaacactttctgggtaccagcattgtgataggaaaaagcaagcaaacaannnnnnnnnnnnnnnnnnnnnnnnnnnnnnnnnnnnnnnnnnnnnnnnnnnnnnnnnnnnnnnnnnnnnnnnnnnnnnctacatacacagtgagttccaggacagccaagggttatgtagaaagaccctgtctctaaaagcaaaaccaaactctctgtcttgaaggagcttgtgtttagaaggatgcttccggatcccctccgtattccaacagtcgatcctacggcagctgagctgttctgttgttttgtttttttttgaggcagggtctcatttagctcaggctggtatcaggctagctgtttgataccaacacaatggacttggctctgcttcctgagtgcggggatgacagccactcacatggcaagattcttatgattcctatcctacagatatagaaagccaaagtttagccagtatggtatggcttagttagagtcctgccctgtgttctagccacaacctgtattctgatgccctgctggcatacaggccctctggcatggctagagatgatagggcagggtggaattactcatgccactatgtcagccagccagagccagtggctctctgaggtttgtgatataccctttgttcagcgggaacagcaaccaacagtttctgggcagacagtgggagtgagtaaactgtcctgtggtttagacaagactgacagctgccttggactccagggccaagattcctcaggcaggtggcagcagaggggggcgaagatgcttcttctgacccatcttctcttactcttgcagagaagaagccagcagctcaggttgctcggatacagactccacagagctggccagtattctctaggacttgccagggtgcctgaagccaccacacaaaggacctggggcaccaggtagcattaagcacgggatctctttgcccttgcactgagcagctgttcttcctatgtcaagacagggaccaaggagtggagggtgagcggaccaggacatctgtgctcactgcaaggctgaccgctctgtcacctcctcactgcctgcccactgggccaagccttagggctgctactgtgaatatgccaaggactgactgggcctagctcggaacactaatgtagaaacgttttatacagagactaattaataacttaatgactatgtatatagtgatgtgtgtatgtatatgtctatgaggtattaatgttattaattttcataaaaactggaaacacaaagctgcctgcttctatttgtgttcttagccatccatggagcactttgtgataagacccagatagtcagtgggcacacaaagccacaggtgccagtgagtgggacagtgttagccttggctaacatctactctgtaccaagtgccttttgctggcgtggcacacatttcatgatgttcttattgaacctgtagaacccctgtgtcatggcaggactggccctgtcttaaagataaaaaaatgcaaacccaggctagcagctgcctttaatcccagtccttagaaggtagaggcaggcagatttctaagttcacggccagcctggtctacagagtgagctccaggacagccagggctacacagagaaaccctgtctctgaaaactaaaaaaagaaaaaagaaaaggaaaagaaaacccaagctacagaggatgtgtctaaagttacatggcgaagaatgatgtatgtgaaactccatcatccctgtgagatgttagcactttaaccactgctctccatggctctgtgagtgagaaaggctaagaaaacagcgagagccacagtggttctgccagtcactgcatgtatacctgagtcagtggggctgggtgtgctggttgggggtctgtagtgtccctggagccccgtcattctctttccacaactgttgtcattaatgttgaaggcagagactgtttctgtctaggggtgggtgtcaggtagtggcgagtcccatctctggtgggagaaagcccagttaaagtacttgtcccattaccgcagtgtaaatgtttccactgtggccaattcaagtcactcttgcttatatcatcttacacaccctgagaactttatagttggctcttagaagttcagaagggtcaccctaccaaaccactgcattgcacacacccaagtcaggctccaaaaccacagggaaggaaagcaggaaggaccaggagtgactagtccaactatctaggtttgtgtacagaaaaacaagagcccaagagaagggctgggactatttgggattactttgcccttgaatttgggcctgattgttatggataaacttcttttggtaattttcacgaagtgtttctaacgggcactgttacatgtattcataaatactaactcatttcgtcctgagctccctacaaggaaggtactgttattattccggctctacagataaggaaatcaaggcatggggaagttaaatgactagacaaaggtcattagtaagtggatgggttgatgtaagtctaagctgtttggctataggcccagaccctctaatcactactttaatgatgaatagttagatcctaccaggccagttccatggcctttataactgccatcttcagtcagaggtcgcctgacaagacaggagccgcagtctaggctggctcctgcatctagagtactcagggattttgataatgtttatagaggtccactcctgttttatggtccttcagttctaagtggtagccaccaagacttgtctttattttccatttttgttttcttcctttggcagccatagggatcaaacccggaactttgtttcagctaagcaaatgatttgccactgaaccacacccctagtctaaggcgtatctttaaagtcataacaataatagttgttgttgttgttgttgttagtagtagcagtgtagttattatggctgtgcatgtagttaaatggtggagcgcttgcctaccacatatgaggcactgcgtttaatccccagcaccgcaaaaacaaaacccacaaaaattagacttgcaagtttgctcgttttctatggttacaattatttcacacctgggtcttcatgcaaatgctctcgggggtctctatggccctacaaccttccaggcttgagatccaggtacagcattttctttagcccacctcttgatctcttgcttcagcgctacctgcaagtgctcacccagaaggtctttgtccgagcaagtgtctgggaggtagctctggcccctctgctccttaagctagttccagagccttgccccgcttatcctggtctcttacatatagcctgtggcttagcatttcctttccctccatcacacttccctatctgttggaagaaatgctacttccacccatctggatccagatctggcaatactgcagccacctggtttgacaggacctggccctggtcctcaactaagtacagatctcccctcaacgcccaccacagcagaggaccaggtgtgcttttagcgccacctactgggagtaaggacaagacacccacattgttaaaaaaaaattattccatagttacaatgattctatcatatgccatgcacctgctaggctctaaggacattggtggacaacacagagcttgagattttggtggagacccacggtgaatagataggatgtaagaaaaagaatttcaaaatgtgccgggcagctttggtgcctgcctttaatctcagcactttggaggcagaggcaggcagatctctgagtttgaggccaaccttatatacagaatgattttcaggacagccatgactacacagagaaaccttgtctcaaaaaaacaaaaacaaaaacaaacaaaaatctcagaatgtaaggcctgcaagatggctcattgggtaaagactcttgcttacaagcctgaggtcttgtaagcaagacccactcgatgggctgagagacctaatggccacaaggtgtcctctgacttccacatgtggccgtagtatgtgtccttcacaatacacattagcaaacaaataaagcaattaagtataaaattaaaaaaaaccaaactatgtttgaggcctagagagatggctcagcagttaagagcacttgctgctcttccagaggacacaagtttgttcccatccccacagttacttccatcttgtggacccttcaggtgcctgcatgcacacatgtggcattcactcatagtcatacacacacacacacacacacacacacacacacacacacacacgggttaataaaaatacatcttcagctgggtgtggtggtgcacacctttaatctcagcattcagggggcagtggcaggtagatctgtgagcttaaggccaggctggtcaacacaactagttcaaggtcagtcaggggaccttgtgtcaacaaatatcttaaaacaaaaaagaaaaaaagaaaaaaaaagaattttagattgtgataagcacataaaaaaatggagtgatttgatggagggagatcagtatagaatgtcctaaagacattcgctcacatttaactcaggaaggagaaatgaccagatggtcaaagatcttggagtgacatagtgtggggacaagaaacagctactgcaggccctgtttttacaaaaagcctgatgtatttgaaggacagaaaacccaatgcttcagtgtggagggaaccagaagaggggtagcctaagctagagggtgtcaagggcccagaacccccagattcttgagactttgaatttaatttcgagagcaatcaaaataccatcgaaaacatttaagtctggagaacaatttacgtttgaaaatgaagtctgttgggctctgactattgcattataaatgagcaaactttgctaggcaaggttgccctgcatgtactggcttccaggatgctgagtttgaagccagcctgatctatatggtgagcccaaggcagctaggttatgtagagaaactctgacaccaccccccatcccttccacaccccccaaaaaaaagaaagaaagaaaagaaaaaaagaggaagaaaccttgaggggagaggacacatggatggctgtggatatgtaacatatatcccaaatcatcaagaagaaaccttgaggggagaggatacatggatggctgtgggtatgtaacatatatcccaaatcatcaagaagaacttcctaagtaagggtggtacaaaatcatcaaatcagatgaaaacatgataaaagctgtttgcgccccaggactacaagggctgacatgctgtttattggattcagtgttgtatgagcctccttttgccgggccctgttctatgacgagggactgcagctcaatccccccggcctttgtgggcttttcctatgcttggaaaaactgatattgagtggacatgtatgccatgagtgttaccaggaagaggaaggagctatggaagtgacagaatgagattaggtagaagaaaagtgaagagaagaggggagaacaatgtgttgaagctcagagggcagagacatcgcatgaaggaatgagccggaagaagctggaaggagccagaatgagccgggtgtaattggaacaccaagatggagtaggagccgaaagatgaggctgaggatgaagatggaggaggattggcgcccatcctattcgaagaagagcacagaaccattcattttaagcaggtgagtcatatggcagattaaggacttagaagaaccacaccaactgctatgaggggatgatataagaatgttttaatctctctcacccctaaggcttctactgcactctgggaatttgagggcctggagcagtgactgctttctcttcagagcactaaatctttttccttcctccttcatttctggttcttttcagactagccaattggataagactgtgaggtggatgacagtcaatggggaaaagatatggttcccatctgagtcagactaaaaacccagtgctcttctgagtttgtcttgttcagacccttcagtaggagttgtggtctttttcatttcgaccccaaacttatgtccaacaaaaatctcaagaaagcaggagtagaatagaaagcaggaaaacaaaaccaaccaaccaaccaaacaaacaaacaacaaaaaccaaaaacctaaactaaattaaattaaaaaaataaaaattattttttaaaaatggcaatgatgataatgatgtgcatgcatgtgtatgacgtgagaaagcatagcatgtgtgtgaaggtcagaggacaacttggtgttgtctattctttccttctgcctttatccaacccagcaagtacctttacctgctcatctgtctcacccgtctaggaagccttttcttcttcttcttcttcttcttcttcttcttcttcttcttcttcttcttcttcttcttcttcttcttcttcttcttcttcttcttcttcttcttcttcttcttctnnnnnnnnnnnnnnnnnnnnnnnnnnnnnnnntcctccctcctcctccccctcctccttcttctcctcctccccccctcctccttcttctttcttttccttcttcaaatgaagatgctgtttgtgtaatggtcctagaacgaatgaagttctcgacgtggcacctgggtgctggcaatagagaactgagtggatgatgggttggcagcaagtcaacctggaacagaccaggagagtggggagcatgattaaggaatgagtggctaaggatagggaaaagctgctattcggcagcgcagaagtcatagaagagcaagcaagcatggaaggaagaattcacccaccgtttctttccatcactttcatataactgagaaagaaatcacatttaggtactctactgtctatagctacaatgcatgtggctctgggttcaattcctagcactgaaggtggggttgagagggaaggaaggaactcactggtgagaacagcataaatattataatcagtactgtctattaccatgtagatgtgtgagttacattagacaaagcttggtgaacgacgagcaatcccaggacagaggaagctgaggctcgacgatcataaggtaaagccagcttgggctacgcagtaagaccaagatgatggatggagctcattagagttcttacttaacatagacaaagctatgggcttgatcttcagaaccacaaagacaagcaagtaaataaatgtactggccaatgtaattggataagaaagtaaaataaaagtgaactagaataggtaaaattacttttgtttgtcaaagacatgtttattccaagagaatccaagtaaatcaactgggaaacaagaaaactcagttaaaaaaaaagtgtgtgtgtgtgtgtgtgtgtgtgtgtgtgtgtataaaatgaatatacttgggttcctgggctccatcattaccactgcaaaagcaaatagattttaaaaaaataatgtagcagggcagtggtggcgcacacctttaatcccagtacttgggaggcagaggcaggcggatttctgagttcaaggccagcctggtctacagagtgagttccaggacagccagggctatacagagaaaccctgtctcgaaaacaaacaaacaaaaaaagtgcaaagccatactctttccatatataaaatacaataagttgcaactacattgtggattataataaccattaccacatgtggctattacatttattatgattaaaatatattcaacaagattaaaaattagaattcatttcttcagtcacaccatacttaccttccgagttgacatacgtgaggctgtggactgtgttgtcagagaacattgctaccattgcagaaggttttattgttctgagtcaagtgagaaggaatggtaaaacagaagactttatttctggggggaaaatgtaaacaaaggcatctcctaggaacagcaaagaaacagttctttgatgaaccacataacttaggttttggtcatggacttcttgcatggacctctttgagtgttaggaagcagacaaagtaccacccttttgagaatcttctctgattccttcaacctaggagagagcttcctccaggcctcctgtatttgtcttgttatcattgacacaaaatacccgacacaaacaacttgtgagagaaaggctttcttttggctcattgtaaagtttctatctatctatctatctatctgtctgtctgtctgtctgtctgtctgtctgtctatctatctgtctatctatctatctggttttcctttccagccccagctcccttcaaactattctgtctaccacttggtaagttatctctccttcagtcccggcctgcttcttccttcctgtcttcctaaatggctcacttgaatctctaatctattctgagttcaggcacctgctggtttatgtccatctccctgtggcttgcttgaatctctcttttatattatcactatttcccagaatcctctctcttcctgccagtgtcccacctcctattcctttctcagctcattggccataggctttttttttttttttttttttttttttgagattttctctacagctcatggttttggtccatggctgcttgcctctgtttatgctggccctgtgatgtggcagaacacaaaggcagtgggaaagcatgtgggaaactgattatctcttagggaacaggaagcagcaggagagaaccgggtacaccttttgacaaaggcatataccccaattcacctacttcctccaactaagcacatctcagaaagtttccacagcctcccaaacagcatcatatagccaacacatgcattccacatttgagtcatgacacccctctggggagatacacagtgatcttcactactcacagaccgcatctttgtgaaattgcctacttccaaaaattaacagcaactccaaaaaaacccctctaatatttgggtttttttttttggggggggttcaagacagggtttctctgtgtagaccaaaatcaaaacttatggtcactcatgaacagacacagagtcacaaaacttttgcatgccagatgagtacatctcagctgcaacaatggccattcctttctgaggtgtcttttgcaaggttgtatccactccttttgcctagagttgtaacttccaaagagaagctgcactcaagagattagaacgttcactactttgtgatctttcttcagctctgcagactctagacaaaagacttcagccagctcccggaatgcataacagttctccttatacttcaattctgtacaccatccgagagaaaggatttaaaatgctgtgagatttaacatgaagaaaatgaatgtgcttgttacaggaagcagcaccaaaaggccaagggtgattgaagtgttttagccccctagttctcaacctgtggatctcgacccctttggggtcacatatcagataacttgcatatcagatatttacattatggttaataataataacaagattaaagttatgaagtagcaacaaagtaattttatagttggggtcatcacaccatgaggaactgtattaaagggtcacagcattagttgagacccgctgctctaaccagacaagtcctgaataagtatcttactaaacatgtagtcttctgttcctggttccctttatttctttctctcttatgtttctttttccctccctccctccctccctccctccnnnnnnnnnnnnnnnnnnnnnnnnnnnnnnnnnnnnnnnnnnnnnnnnnnnnnnnnnnnnnnnnnnnnnnnnnnnnnnnnnnnnnnnnnnnnnnnnnnnnnnnnnnnnnnnnnnnnnnnnnnnnnnnnnnnnnnnnnnnnnnnnnnnnncctccctccctccctccctccttccttcctttctctctttctttctcccaccactgttcttcaggatggagtggtgggaatgatactcccttgtcttagacactattgctgtgatgaaacaccataaccaaaagcaatatggggaagaaagtttattcagcttacacttccacatcactgttcatcatcaaaggaagtcagtacaggaactcaaacagggcaggaatctggaggcagaagctgttgcagaggccatggagggggtgctgcttactggcttgctcagtctcctttttatataacctgtgaccaccagccagggatgacatcacccacaatgggctgggccctccaccatcaataactaattaagaaaacgtcccataggcatgcctacagcctgatcttatggaggcatcttctcaactgagactccctcctttccaatgactctagcttttgtcaagttaacacaaaaccagccagcacatctttcccacttgcagaattctgactcttgaaaactgctttcctgtgaagctctttcttctctagtgttggcttttaaaacatttttaaaaattagcatatattgtatcaactctctttctgatattgtcaagcaaaaattgttttgttgggctgggaagatgactcagtgactaagagcacttgctgctttgccagagaacaggggttggctcacaaccaaccatccttaactccagtcctgggagagccaattccctcttctgattttcctgaggaccaggcacacatgtggtctgtgagtgtgtgtgtgtgtgtgtgtgtgtgtgtgtgtgnnnnnnnnnnnnnnnnnnnnnnnnnnnnnnnnnnnnnnnnnnnnnnnnnnnnnnnnnnnnnnnnnnnnnnnnnnnnnnnnnnnnnnnnnnnnnnnnnnnnnnnnnnnnnnnnnnnnnnnnnnnnnnnnnnnnnnnnnnnnnnnnnnnnnnnnnnnnnnnnnnnnnnnnnnnnnnnnnnnnnnnnnnnnnnnnnnnnnnnnnnnnnnnnnnnnnnnnnnnnnnnnnnnnnnnnnnnnnnnnnnnnctgttgtgaggaagtcaagtgaggagcttcaaacagtcacatcacatcgacagttacaagcaaaaagaaagaactgaatgtatgtttgtttgcttgcttgagctcagtctgatttctccacttttaaatggctcaggaccacctgcctagggaatggtgccaaccacagtgggctatgttgtcccacatcacttcatttaattaagataatcctgtacagacatgcccataggccatcccaaagtagatcaccccacactgagtctcttctcaggtgactctagtttgggctagtttgacagtaaagtgaactgccgcgcccccttcttccttgctagtttcatagtctgaccctccctcaccctcatttctatacatacatacatacatacatacatacatgcctttgtaagccaggatctgcattattaggaacactggacaaacgactccctgtggtacctgtttgcatcctaaagaacatgttggccccaggctttctcagtattacagctacctgtgggtcttctcagctcctctcatctgtccacctgtcccctgccctaaacttctccacacccccccacccgcttctcatacttacgttcctgcaccctcttggtcttctgccacctgttttcctctgtcttttatctttctctcctctcttcctcttttgccctctac

SEQ ID NO: 150 - DNA, 2537 bp, Mus musculus
gctagggagttttcatcgccggcgttcctggtttgctaagtgctagcgaacgtagtagtggctggggctgcgcctaggatcggagccacaggcgagtgccggccggcagaacacaagagcatcccggcgtcccggtcccacgcggcgtggcccgcgggtcatggccaaaggagaaggcgccgagagcggttccgcggcggggctgctccccaccagcatcctccaagccagtgaacggccggtccaggtgaagaaggaaccaaaaaagaagcagcaactgtccatttgcaacaagctttgctatgcagttggaggggccccgtaccagttgaccggctgcgcactgggattcttcctgcagatctacctattggatgtggctaaggtggaaccacttcctgcttccattatcctttttgtgggccgagcctgggatgccttcactgaccctctggtgggcttctgcattagcaagtcctcctggacccgcctgggccgcctcatgccctggatcatcttctccactcccctggccatcattgcttacttcctcatctggtttgtgcctgacttcccatcagggacggaaagttcacacggcttcctttggtacctgcttttctattgcctctttgagacactggtcacgtgctttcatgttccctactcagcgctcaccatgttcatcagcacggagcagagtgagcgtgactcagccacggcatacagaatgactgtggaggtgctgggcacagtgataggcacagcgattcaaggacaaattgtgggccaagccaaggcaccttgtctccaggaccagaatggctctgtggtggtctcagaagttgccaatcgcacccagagtactgcctccctcaaagacacgcaaaatgcttacctgctggcagcagggatcatcgcctccatctacgtcctctgtgccttcattctgatcctaggcgtgcgggagcagagagaactctacgagtcccagcaggctgagtcaatgcccttctttcagggcctccggctggtcatgggtcatggcccctatgtcaagctcattgccggcttcctttttacctccctggctttcatgctggtggagggtaactttgccttgttctgcacctataccttggacttccgaaatgagttccagaacctcctcctggccatcatgctctcggccacattcaccatccctatctggcagtggttcctaacccggtttggcaagaagacagctgtatacatcgggatctcttctgcagttccttttctcatcttggtggccctcatggagcgtaatctaatcgtcacttacgtggtggccgtagcagctggcgtcagtgtagcagctgccttcctactaccatggtccatgctgcctgacgttatcgatgacttccacctgaaacaccctcactcccctggcaccgagcccatattcttctccttctatgtcttcttcaccaagtttgcctctggagtctcactgggtgtctctaccctcagtctcgactttgccaactaccagaggcagggatgctcccagccagaacaggtcaagtttacactgaagatgctggtgaccatggctcctatcatcctcatcttgctgggcctgctgctcttcaagctctaccccattgatgaggagaagcggcgacagaataagaaagctctgcaggctctacgagaagaagccagcagctcaggttgctcggatacagactccacagagctggccagtattctctaggacttgccagggtgcctgaagccaccacacaaaggacctggggcaccaggtagcattaagcacgggatctctttgcccttgcactgagcagctgttcttcctatgtcaagacagggaccaaggagtggagggtgagcggaccaggacatctgtgctcactgcaaggctgaccgctctgtcacctcctcactgcctgcccactgggccaagccttagggctgctactgtgaatatgccaaggactgactgggcctagctcggaacactaatgtagaaacgttttatacagagactaattaataacttaatgactatgtatatagtgatgtgtgtatgtatatgtctatgaggtattaatgttattaattttcataaaaactggaaacacaaagctgcctgcttctatttgtgttcttagccatccatggagcactttgtgataagacccagatagtcagtgggcacacaaagccacaggtgccagtgagtgggacagtgttagccttggctaacatctactctgtaccaagtgccttttgctggcgtggcacacatttcatgatgttcttattgaacctgtagaacccctgtgtcatggcaggactggccctgtcttaaagataaaaaaatgcaaacccaggctagcagctgcctttaatcccagtccttagaaggtagaggcaggcagatttctaagttcacggccagcctggtctacagagtgagctccaggacagccagggctacacagagaaaccctgtctctgaaaac

SEQ ID NO: 151 - protein, 562 aa, Mus musculus
WLGLRLGSEPQASAGRQNTRASRRPGPTRRGPRVMAKGEGAESGSAAGLLPTSILQASPVQVKKEPKKKQQLSICNKLCYAVGGAPYQLTGCALGFFLQIYLLDVAKVEPLPASIILFVGRAWDAFTDPLVGFCISKSSWTRLGRLMPWIIFSTPLAIIAYFLIWFVPDFPSGTESSHGFLWYLLFYCLFETLVTCFHVPYSALTMFISTEQSDSATAYRMTVEVLGTVIGTAIQGQIVGQAKAPCLQDQNGSVVVSEVANRTQSTASLKDTQNAYLLAAGIIASIYVLCAFILILGVREQRELYESQQAESMPFFQGLRLVMGHGPYVKLIAGFLFTSLAFMLVEGNFALFCTYTLDFRNEFQNLLLAIMLSATFTIPIWQWFLTRFGKKTAVYIGISSAVPFLILVMERNLIVTYVVAVAAGVSVAAAFLLPWSMLPDVIDDFHLKHPHSPGTEPIFFSFYVFFTKFASGVSLGVSTLSLDFANYQRQGCSQPEQVKFTLKMLVTMAPIILILLGLLLFKLYPIDEEKRRQNKKALQALREEASSSGCSDTDSTELASIL

SEQ ID NO: 152 - DNA, 35360 bp, Homo sapiens
  misc_feature (1)...(35360): n = A,T,C or G
atagtcataccagcatcctcccacctcctcctccccacatcaaccagaaaaacaaaaatgtaatgaggaccctcctcgcttttatctccccctgttttacataaccatatgtttcaattgcctgttctatttctctctcaaactattactctaaggaggatatctccctctgtccattgttggacattatgggcggtacagtgtgttctttggtctgataaaatgacagttgggcatccaaatccgtgcaatatcttctgttctggtttcatttttaaattttatttatttagttttttaagactagtcaagtgcagtagtaagaagcagggaaagggtagaacaaggagttccatctgtaactgactgtgcacaattgagataactcagtaccttcagaccagcctgtgtgttttttttttaatggcactctgagcgtttttatctttcactgtgtaagcaaagcccacctcagagtcagtgtttatttctgtcaagactcttttttttttttgagacggagtcttacttagtcgcccaggctggagtgcagtggtacgatctcggctcactgcaacctctgcctggtgggtttaagcagttctcctgcctcaggctcctgagtagctggaactacagacacatgccaccatgcccagctaatttttgtatttttgttgagacagggtttcgccatgttcgccaggctggtctcaaactcttgacctcaagtgatccacccgccttggcctcccaaagtgctgggattacaggtgtgagccactctgcccggcatgtcaagaccccccctttttttttgagacggagtctcgatctgtcacccaggctggagtgcaatggtgcaatctcggctcactgcaactcctgcctccagggttcaagtgattctcctgcctcaacctcctgagtagctgggattacaggtgcatgccgccacgcctggctaatttttctattttcagtagagacgcggtttcaccatgttggtcaggctggtctcgaactcctgacctcgtgatctgcctgcctcggtctcccaaagtgctgggattacaggcgtgagccaccgcgcctggcatgacccattttcaatccccacactttcagaggtgggaggataccttgaggtcaggagtttaagaccagcctgggcaacatagcaagaccctgtatctgtttaaacaaaaatttttaaagacccatttttagcccttcccgggtttccaacatcagtctcacttgccagttgtgtttagggccttcccatcaggaaatctgttccatagccattggcagtctctgtctctcttaccgaccaacagagcagtttttactggcattatgtgcctgagaggaagcaaaaggaacatgtctagattcagcccatctctatactgctgcaatacccccatatccactcatttcatggacacaggtggccacctctagggagtacacagagatatctgcttgtcaactctagtcaccttctgaatgcgaaagggagttctgacaggtgttaacttattctactgtaatacacccctcaaatttccatagagccatgctccgtatgggcatcctttaataagccaggtttccattgcccttttacctgagtgtatggccaagccattggtcactgcccataagtcagtagaaacccaaacacaagggcttccatcactgttcaattcttccattactgttagaaaaacagcatgcagctcagcccaccaagttgatctatttttaccatccaaacaggatgttgttcattcacttcggaactgcagtctgtaaaccaagcaccttgggctggccactgtggctcacacctgtaatctcagtgttttgggaggctaaggcaagcggatcacctgagcccaggagttcaaggccagcctgggcaacatagcgagaccttgtcttaaaaaacagaaacaaaaataagccaggcatggtggcttgtacctgtagtcccagttactcgggaggctgaagtggatggatcgcttgaacccaggaggtcaaggctgcagtgagccatgattgagccactgcagtacagcctgagtgacaaaacaagaccccatctcaaaccactccctacccagcccaggcacagtgcctcacacctataatcctagcactctgagaggttgaggcaggcggattgcctgagctcaggagttcgagaccagcctgggcaacacagtgacaacccgtctctactaaaacacaaaaaattagccaggcgtggcagcatgtgcttgtagtcccagctacttgggaggctgaggcaggagaattgcttgccgggaggtggaggttgcagtgagccaatatcacgccactacactccagcctgggcgacacagcgagactctgtctccaaaaaaaataaaataaaataaaacataaaaataaaaaatacccgcccccctccctcaaaaaaaagcacctcacaacaaaaccaagcagctccttgttggtcaattgagagctgttcatactggactgtccaagtgtcaatggaatccagcagctcctcacacagtttcagtgtctgtcttggggtaaagaggctctctgcttgagtgtctcctccttgcactcttcaggtagcacgatcctgtataaaccattttgattttattatgaaacacttctgggcactgccatccccattagagtatttctctgatatcactgaaaacatcatgggtatttcaggtttcaagattattttatgcccttcggtcatagggacagctttagtttatgttccataacaaggtagtaaatacccttcaagtggaaattctctagtccaaagtcccaggagtcgttgctgggaagtgctcacagccttttgccaaaaggccaggaaatgttcaacatagggctatcgaatgaagaatttgaacctactggtattctatcttctactctgcaccatgtgggcttggcagacttataggttaccgtttagcatgttcaattaataatgcttgaagggcagatttacatgccttctgttttacaaaaccaggtaggggaaacattctccaataagatacagtgttcattcccatgctacaatcaggtaaaagagatgcaaccacttcacatgaggtgtattcaaatataccaactttcaaaatcctatcaactcttacatttttatgtcctagtttcaggaacttctccatccctagaccattttacccactcttgtgcaaaaagctttgggttcccagccaggggttgagccaaaggaccctggcccttttgcttttggctatctttatcttttttttttttagacagggtctcgtcctgtcgcccaggctggagtgcagtggtacaaccatggcccactgcagcctcaaactcctgggctcaagtgtacctcctatctcagcctcctgagtagctgggactacgggcacgtgacaccatgtctggctaattttttgaattttttttttttaatatggggtctccttacgttgcccaggctgatcttgaactcctggcctcaagtgatcctcctgcctcagtctcccaaagggctgagattacagacataggccaccacacagggcctcaatttacatctttttttttttttgagatggagtcttactctgttgtccaggctggagtgcagtggtgcaatctcggctcactgcaacctctgtctcccgggttcaagccattctcctgcctcagcctccctagtagctgggatacatttttgtattttttagtagaggcggcgtttcaccatgctggccgggctggtcttgaactcctgacttcaagtaatctgcccacctcggcctcccaaagtgctgggattacaggcgtgaaccaccacaccctgccttgatctacatcttgattaatctgtttgaccgtttccctaggcaatttcagatcagatttctcattgtaatctctgccttccagatttttcaatttctcccagctgggggaaatataggaaactggtttggggccctttaacattggggaccagtaagggttccctttggtccacccaggcttcaaaagtgttgtattaagatctttgttttaaagccatcaattttcattttattcattcagttttgaaaataaccatttaaagattttcaccccatggggatgagtcccataacttctccctttcttttttttctttttttttttttttgagacggagtctcgctctgtcgcccaggctggagtgcagtggcgcaatcttggctcactgcaagctccgcctccggggttcacgccattctcctgcctcagcctcctgagtagttgggactacaggtgcccgccagcacacccagctaattttttttgtatttttagtagagacggggtttcactgtgttagccaggatggtctcgatctcctgacctcgtgatccgcccacctcggcctcccaaggtgatgggattacaggcgtgagccaacgcgcgcggccaactctccctttctttttcctcttagtttcatcccatcaaccctatcaatgttttctttctttttttttttgagatagggtctcactctgtcacctgggctacagtgcagttgtgtgatcacagctcactgtaaccttgacttcccaggctcaggtgattctcccacctcagcctcctgagtagctgggactacaggcacgtgccaccatgcacggctaatttttaatatttttttggagagacaggtttcgccatgttgcccaggctggcctcaaactcctgggctcaagcgatctgcttgccttggcctcccgaagtgctgggatgacaggcctgaaccacaacgtctggctaaatgttttctttattcatcttatttcttaataaccgtttaaaaatttcagtcttcttaggatgagtcttttgactctaccttttgccttttctcattctcttgttaactaaccttatgctttcattagcatctctaagacccatgaatggaagctgagacagcaaatttgaactgctgtttgattctgcaggagtaagcttacatggggtgccagtgtagaagaggctcctttaaccacagcacttagcatgacttgggtaatgggcatcttcagtgggtgaatgtccctgccatcataaagccagtcccatatggcttgcatatgaagcatatgggctgcttcatctggggtggtccccttggcatttctaggtggagttggacagtccccgcttctcagggtaaatagatattatagtggcttttatccagtccactggataaaaccagtccaaggctggtcattccctcagaaatacatcttttgtgtgtctgaatcacatatacccatctgccattgttcagtagtgagctgtgggtcctgcatcaacccaaacaggctcttccactccgcagcaattaaaaccaaagatcctgctcctaaactacttactcacagaattcattttcgtaaaagttcctcaggaagctgatgataaggatctacaaaatggaataattccttcacactatgccctctggtttcaatagttacttggttttgccctcctcccacagtgattactttcttggtaaacacaagtcttagaagtactttctgttgtctctgcataattctgccctgtgggggcagctttgaggctggtggcctaaattcagactgattgaggtctaagctggtctagcaccaaggtctcacccagcattctcttttaatttcacgttagccattacagataataaccaaggaactgaatatttagcttttttttcttattaatttgcatttccttatgcatgtagtcaatcaactccctgggagttggagccatctctaaatttccctggtatctttgacttttagtacctaatctaggtacatactacgtgtgtccctgtggcttcatactatgggtgagcacatggccacccaggaatcaaaggttcctcatctttcatctttttgtactttcttttcccaaaccacatgtttccttgagcctggatcagcccagaatatcccactcctgacaccagttgtttaggaaaaacctctcaaactgtgtttttcctctactgtcacaccaccatcaccacaatcaccaacatagaagaatgatctgaccacgggtatgggttttcttttttccccccacacactaaacagtggacaccagctgggtgtcctctcattcaattccaacactacctacctggagatagtatcagatctcataggtggagggctcagttcccaagactgtctcctgaaccctagacaccagtcacaacgccaggcctctggaacttctgacaagctggcttcaaattgaggttcccatgatcccctctttgggttggattaatttgctggagttatttacagaaatcaaggaaacacccatgttgactggtttgggatactacaaaggataaagatgaagagatgcataaggtgagatacggaggaaggcttgtggagcttccatgccttggctgggacattaccctcaggaagctctgtgtattcatgctagccagaagctctctgaatccagtcttctcagaagttttttttggctgatctcagctcactgcaacctctgcctcctgggttctcctgccttgggctcctgactagctgggactataggcacacaccaccacgcccagctaatttttgtatttttagtagagatggggtttcaccatgttggtcatggctggtctcgatctcctgaccttgtgatccgcctgcctcggcctcctgaagtgccgggattataggcgtgagccaccgcacccagccaatttttttaaaacttaaaaattagacaggcatggtggcacatgcctgtagtcccagctactcaggaagctaaggcaggaggactgcttaatatactagtctgttttcatactgctataaataactgcctgagactgggtaatttataaaggaaagaggtttaattggctcacaattcagcatggctggggaggcctcaagaaactccaatcatggcagaagacaaagggaatgcaaggcatcttcttctttttttttttttatttgagacagtctcgctctgttgcccaggccggagtgcagtggtgtgatctcggctcactgcaacctccgcctcctgggttcaagtgatacgcctgcctcaccctcccaagtagctgggactgcaagcgcgcaccaccacacccagctaatttttgtatttttagtagagacaggtttcaccatgttgactaccctggtctcaaactcctgacctcaagtgatccacctgtcttggcctcctaaagtgttgggattataggcgtgagccactgcacacagctggcatctttttcacaaagcagcaggaaggaaaaatgctgagcaaagggggaagagccccttatataaccatcagatcttgtaacaactcactcactgtcatgagaacagcatggaggaaaccactcccacgattcagtcacctccacctggtctctcccttggcatgtggggattgtgggggtatggggattattaggatataattcaagatgagatctgggtggggacacaaagcctaatcatatcacttgagctgaggaattcaaggctgcagtgagctatgatcgtgtgtgccactgcactccagcctggaggagagagcaagaccctatctctaagaaaataaaataaaaataaataaaatgagggtaataaaaacaactctctccagtggtgttgttgggactaaatgagatataaagaaaaaaaaacagaagtaaatgagatagtatatttaaagcacttatggggcacgctgcccagcataccagtggctgcttggtatttgggagctgttgtattggcggtgccgtgattcagttagtggtgacagtgagtgtctctagtgctgtgttatggggccctgtcctgaccaacaacatggctggtggagttgaagttgcaagggacagccagatctaaatttagagtgagagaaaacagtgagccatagaaccagcatccacaacaatttcgacaggctggaataagcaagatgacattgttctgttgtgagcctcaagacattacagaaagcagaggatcggggagagacctgacttgaccccaactccggtgaaaaggatctgaatgatttagttgaccacaacctgatgggaactaatcatgggagagaaaggctctgaagcccagcagtcttaggctgcattaacaatgtgtcgcgtccagactggaaaaaataataggcctattgtgctggcttggtcaggccatatctggaatcttgcgttgctacactgacagactggaatcaggccaggagggggaccagcccagcttcagctcccaggcacttgtgctaaatgcttcctgtgcattttcttgtttcatccccaaaacaaatctattaggtagctactattaattttttttttttttttgagacaagagtctttgtctgtcacccaggctggagtgcagtggcacgatctcggctcactgcaacctccgcctcctgggttcaagcgattcttctgcctcagcctcctgagtacctgggactacaggtgtgccccaccacacccggcttatttttgtatttttagttgagacagggtttcaccatattggccaggctggtccggaactcctgacttcgtgatccacccacctcagcctcccaaagtgctgggattacaggcgtgagccagggtgcctggccagtagctactattaatatcaccattttacacagggaggttaactgagttgttcagagtcagccgcacagctagtaaatggagacacttagggcttttcctaatgggtttctgtgtgcttgtaccttagcaggggaagactgaacattcattcactgaacacaataattcaggccctaagctagttggtggggacacagaagtgaaaaagatgcggttcctacctgaggagctcattgtcaaccgggggatacagatcacttgtggtatggtgtgactgtgggagagaagatttgggggctgcaagggagcttagctaaccaagcctggagaggggaaaagagacagaacagtgtcacacagcttggagtaatggggccagccattccctttccacagtattcagtgcctcactttggctctcttctgctcagcaatggccaagagctgtgtgcccagatgggatctgctggcgtatgagggagcatggtgtgaccatcctggggcagatagaccttatctctcctccctgcaatcagagatttaaagaaaggaagaaggaggctgacattaaggagcacaggaaccgggtgggtggcctttgagagttccagcagccccttcactaatcagagaactggaaagaccggggtgacattgacataagggactcagaggtggaactaaagactgttcttttctggcatccgtgcctgccttctgttccaaactaatgccctcccatcttcttttgaggaccacatttctgggcattctctttttcaaaactttccctgtttcaaccctcagtgcctctggagccatgtatctcccagggcttcttgttgggagacacatacaccccattctgccgtctgtaatttatgctaagagggatagagcagggctgttgagagcaactgctttggtatcggacaaaacctttcaggcctggctctgctacataacagttgcttcacttctccaagtttccccttcctgtgctgtaaaatggggataataatagtaccaccctcacttggtggtttttgagggccgaaagagatcatattaagcatggaggaagctatccataaaaaggccactgttgtcatagtgtactagcgggcgtagccccggcttctctccacgacttgggagctcccttctggcaggggcagccactggattgcctcatctttctccccattgcccggatgccaagggcaggacgggggaatggtgtgtcttcggggatgagagagaggcatcaggagggaaagtgtcagcgtacgtcctctaggcttgaagaaggagagaggccctgactccagattttaaagtgggcttcagagcccctacctttcctaggcctggggctcagaagtcatgggtggtaggcccgactcggggagagtcggaccttggggacctcggggacctcgggcagatcggggaccccgggcagatcactttcagcctggggcctcggtttcctcgcgcgtgtctgggaggtctcgcggcctgcttctcggattgctaggagccagcgcaggcagatgccggttccggggcttggagaacgtggctcggtggcacagagccgccgggcgaggcgggggcagggaggcgggcgacgggattggctggaggcggggcagcggggctcggggattggccgcaaccgagagggctgggcagaactataagaggcgcggagggggcgtgcagcagagtgcgttcctcgtctgccagccggcttggctagcgcgcggcggccgtggctaaggctgctacgaagcgagcttgggaggagcagcggcctgcggggcagaggagcatcccgtctaccaggtcccaagcggcgtggcccgcgggtcatggccaaaggagaaggcgccgagagcggctccgcggcggggctgctacccaccagcatcctccaaagcactgaacgcccggcccaggtgaaggtgagggcccggcaccccgcgtggagggcgaggggagggaggaggcggaaatgggggatcaggggcgtcccggggtcggcctggtcaggggaccattgggatagccagggacaggaagcctacgagccagagaggacctgggggtgccctgggacagggggtgacggagaaaagctgtgggcgccctcgcccccctttgctcacccgcactccacgctctgcggagaggctctgccggcagccccatgtgattccccgctctgcctagccggtttccattcttccgtgttgagcggctggggcttgccgccccaaaccccagagatgaccccagaaatctgggaaactccccttggttccccatctctcatcccctacctcccactccacccacctactcttgcgcctcaactctgctgttagggccgctcaagttcattcataagaacaagagctctgctcttaaaggagccgcgtccctcaggcatttgtctgaatgtggatgttcgcgcgggaacggtgctttgcgcatcgagaccatcgaccacatccccagccctggggacttattgaaggaccaaataaaatgaggcggccccctaggaaaggatctcaggcaatagataccttcgtgggaggtgactgccttttccttttaattttattaactgatctttggaaggagctgggtgagcaattatgctgttactatgtatgagtaatatctactttccctgggcaacccaacctccctagtgccccacccggagagggatcaggcctgaacctggaggcctttcctcccgtctccaaggtcctctaggagctcaggggtggagggcgatgggtcgggaagctggagagtaggacagttcctgggtccgcctgaagctctggctgcctatagtggtcagggatgctctgggataggtggaacagctgcgcctgcagccagctgggccgggcccccgtagctctctagagctctcaccaggagtaggcaggtggatcctgtctctgaggcagggtgggagcctgggctgggctcaggcagctcttggcagcaagcggattttcaggttgtggcagctggtgccgggtggggacaggtcggctgctggagcatgctccccctgaaacctggaaaggagcagtgcctgaggccttgggaggagttctttagggatggtgggctgataagtttccttagaatctccaggagggaggtggcttaggggctactttcacacaagtatggattccccttttccatgttcctaagaatggagaacacctttcttttgtataaagtgggatctcggagatcgagaccatgctggctaacatggtgaaaccccgtctctacttaaaatacaaaaaattagctgggtgtggtagtgggtgcctgtagtcccagctacttgggaggctgaggcaggagaatggcgtgaacccaggaggcggagcttgcagtgagccgagatggcaccactgcactccagcctgggcaacagagcaagactctgtctcaaaaaaaaaaaaaaaaaaaaaaaaaaaaaaggtgggatctcctggataggaacaggtcaaagcagagttgtttgttctggtagagctggccagagggatggtccttcctgtggaaccttcttggatggaggccagaaccttgggcctttcatcttttcctcctcttcccagaaagaaccgaaaaagaagaaacaacagttgtctgtttgcaacaagctttgctatgcacttgggggagccccctaccaggtgacgggctgtgccctgggtttcttccttcagatctacctattggatgtggctcaggtgagtggtctaagccttcgagggctccttcagcatcctgaggtgggaaagactatgcacccctgggtcagttcgctcagttttccccatctgtgaaatgggaccccaaatcactactttgctgcctctgagtcagtgagcaagaaatgagaagaccctggaaagtatccagtaaaggagtgtctccactccaggagtctttgctggaaaggtctggcaactcctccttgcctggcatgagcaacagagcctgaaggggtaggcggtagaatgagggagaatggggcctgctggggatgctgttcttagaagagactggcacactgtgttcctggctgggagatagtcagctggcttgactcaggggttggtggctgttgccaggcttgtggatgagatgcatcccacctttacctgaggagcagaagggcacttaggtgccaggctaagttagaatgccccagtacacagggtctttgactgggaggggtacttagggtgaaacaggactattctgtgcattgagaagccttggccagaagcctggcatcctgagaattcaccctgtctggatgggagagtgggaggcagaatagccatgactaccggggctcctgcaccagctgtcttctctgtgtagcatctaacttggcaagcatcgcatcttagttgtatccatttacagagggggaacactgaactccagaaggaacaaaaaacttcagcagctaatttttgagtaactcccatgggctgggccttgggtggggtgtaaatatgaggaacctgcagtcaaagtgtaaacctgttgtagtgggtgttagagctggggttggggggttagactagggagactatggtatggggaagaatacccactccccagagaaatagcaatagcagggctttgatggataaggaggagtctggagagtctgtatttagggcctggggggttttggggcggggagggggataacttgagtgggtagtgacaagtccctttttaaaaagcatctataggctcctttttccacatccaagatagagcttgaacctgtaaggtagagctcataactcccattatacagatgggaacactgaagcacactgtgttcaccccgtgaatgctcattctgatatcaggtggtcaggagctcagggctgagagagggagggaaggaaatgtttgtggattcatttgaattgatgggaatgttttcaagggcagtggagggaagcaattaaggagacagagctgggaaagcttctaaggaggcacccagtgctactgttattggagaaatgctattgtcattattaacaaggcaagtgaagatgtgtaaggtccatgtgggagcagctcagggtcacaagatcctggctgagatagggagggagcctctgcttctgcctaccagtgagagttgaggcgagtagaaggatgaggaagttgtcttttgcttctcctcattccaggtgggccctttctctgcctccatcatcctgtttgtgggccgagcctgggatgccatcacagaccccctggtgggcctctgcatcagcaaatccccctggacctgcctgggtcgccttatgccctggtgagtagaatatgccccttcgaggtggcacaaggcaggacttccagcatatctgctccttggtccttctctctgtcttgtcacaggcagaagggtgaggagaaggaaggagttaaaagcccaagggtgttgaaaccccatccgaggcatcagctaccctgagcacgggcactggcatgctcagccagttcatttccaggacagccaaagtgctaggctgggcagctcaggcctcattcctccccagggtccactcattccccttggtgaagctggaattctgaattctcccactctatcacttcctgcagtggccgaggtagtacttaagagtggttaagcagttgtactctggagccagcctgcctgggcttattttattatttttatctttctttctctttctttctttctatctttctttcttttttttttttttagagacagggtctcgctctgtcacccaggctggagtgcagtggtgtgatcataactcactgcagcctagaactcctgggctcaagtgatcttcccacctcagcctctcgagtagctgcgactacaggcacgtgccaccacacctggctaatcttttaaaattattatttgtagagacagcgtctcactatattgcctaggctggccttgaactcctgggctcaaggtgtcctcccgcctcagcctcccaaagtgttaggattacaggtgtgagccaccatgcccggcccctgtctgggttgaaatcccaatttccctacttagagctgagtcacttcacatctctgagtctcaagtttcttcatctaaaatggggataatagttatacctatctcacactcacagagttgtggtggattaattttttttttttgacgttcttagaacagtgcctgacttaattctacttcataaggttgatgtaattttgagacttaaataagttgatactaaaataccaagcagtgtctgggacactaagtgctatgatgaccacttcagggaagctcagcaggagagctggcatgtggtccctagtacaggccacaccaggggaactgcagaatcctgggctgggaattagacttcaggcccagcctgctgcatctctacctccatgtgggaccctccaacagcacagtgataaataatttggcaccccttcagggtggctcctggcagagcaggggatggggtaatacccggaatggggtagcaaacccataacctttggcaccttggatgacgtaaattaccttctcccttggtacaaagcctgtgctactcagcttcaggggcaaagtaggcggaggtggtgccacggatcggatcagacggcaggggagacgcacaggataggctgtcaggcgggggctctggttccctccaggacatcctgcttcagggtgtgggggggcatacccctttcatctccagcccatccaggcttaagtgggcgccttcctgccccaggggcgcccatacctggcctccggccttcaaagctcttcccgcaaccccttcccccactacagcttcctttcccacgaggccccccacccaccccaatcctgccagcccctggctaaggcccaggttggagcctttgatccagtcttcagggccgggggcaggacagcctgccttacctgtgcaggctgctcagggctcccccggcgccagcccgtgagacttggccctgtgcccgcctccctggcagccagtagaaggggaggctctgctgccacgtcgcctcatgaggcccagccaatgggaggcagccgctcccagggatggtggctgcaggccgggttactcccagttacactgggttcctcagcagcagctgctcagctgcttatgagcagaggatggagtgtttgacaaaggctgatgaggagctcttgttccctgaggagacagagtcaagagaggtggaggtgggcaggccttccctgtggcatgtaggaactgagcaacttcctgggcaggcgtggcagccagtttggggaagttgctgggggcccttcaggctggtttctgatctagcaggtgcctgtgtgcacatgcttctgtggctggtggtgcctgtgtatgcctgcacgcgggatggctcgtgggctgaaggctggtgtgcatatgacctccctgtccaaactttttttcctttttgtggtgaatggggtctggctatgttgctcaggctggtctcaaactcctgggctggagctattctcctgcctctgcctccctaagtgctgggattaaaggcatgaacatcaccatgcctggccagacctctccatccataccacctgacccctcctcaggccaggcctggagacctggaaccccctttcctttcagtgtaggaagaaactgggtctgtcagggtttgtgaaccctgtagctctctctcctcctgggcctcagggcaacccctgctttaagcctacatttaaatcctcttcttgaaaccaggaagacttttcttcccgcccccgcccccccccccccccgctttttttgtttgtttgtttgagacagagtctcgctctgtcgcccagactggagtgcactggcgtgatctcagttcacagcaagctccacctcctgggttcacgccattctcctgcctcagcctcctgagtagctgggactacaggcgcccgccaccattcccagctaatttttgtatttttagtagagacgaggtttcaccgtgttagccaagatggtctcgatctcctgaccttgtgatctgcccgcctcggcctcccaaagtgctgggattacaggcgtgagccactgcacctggcccttttccttttttctgattaaaaacaaaaaacaaaaaaacacatatatagagatggggtcttgttatgttgcccaggctgttcttaaactcccagcctcaagcaatactcctgcctcggcctcccaaagtgctgggattacaggcgtgagccaccattcctggccaaaccagaaagactttgatagtcactttgcctggagttctcaaggccagtgtgtgagagaccagatgtcaagcagggtcccatggggaggctgcaacagctggacctgaggtctccttcccagcccagggctttctacagctcccctggtgtggcctgcattagttacgcatgccaactctcctgctgagcttccctgatgtgatcattatagcacttagtgtcccaaacactgtttgacattttagtatcaaccaagtctcaaagttacttcaatcctgtgaactagagccaaggcacctccagtggcctttcagaagttccatttccactcccgcctcatctcctaattctatctccccgttctctttactcgagccctcctggccttgcccttccttaggcctgatacgcacctatctgaagacctttgcactgactattccctttgcccggtccactcttgcctcagatgtctaaaaggccaactccctcctctcattcaggcctttggcatggatgccaccttctcagtaaggcctaccctgtccacccatttgtgaattgcacccttattctaaccttctggagccagctttatttcttttcttcacagcactcatctcccaacatgttatataacccttttgtaaaactacggtaaagtatatgtaacataaaatttaccataacctttaaaaaatgtttacgagcttcttctccgagaaaacaccaaatggcggatgacactggtgcagcgggggggcctggaggccctggtggccctgggatggggaactctggtgccttccgcggaggtttcggcagtggcatccggggccgggttcatggccgtggacggggcccgggccgaagctgcggagcttgctgaggcaaggccgaggataaggagtggatgcctgtcaccaagctgggccgcttggtgaaggacatgaagatcaagtccctgcaggagatctatctcttctctctgcccattaagggatctgagatcattgactttttcctgggggcctctctcaaggatgaggttttgaagattatgccagtgcagaagcagacccgtgccggccagcgcaccagtttcaaggcgtttgttgctatcggagactacaatggccatgtcggtctgggtgttaagtgctccaaggaggtggccaccgccatccgtggggccatcatcctggccaagctctccattgtccccgtgcgcagaggctactgggggaacaagatcagcaagccccacaccgtcccttgcaaggtgacaggccgctgcggctctgtgctggtgcgtctcatccctgcacccaggagcactggcatcgtctccacacctgtgcccaagaagctgctcatgatggctggtatcgatgactgctacacctcagcccggggctgcactgccaccctgggcagctttgccaagggcacctttgatgccatctctaagacctacagctacctgacccccgacctctggaaggagactgtattcaccaagtctcccgatcaggaattcactgaccacctcatcaagacccaccaggctccagctgtggctacaacatagggtttttatacaagagaagtaaagtgaattaagcctgttaaaaaaaaaatgtttacgagacagagtcttgctatgttgcacaggctggactcaaactcctggggaaaagcaatcctcttgcctcagtttcccaagtagctgggataacaggcatgtgccactgccattacagccatttttaagtgtacagttcagtggcattaaatacattcactttggtttttttgtttttgtttttggtacagtagggatacaaacctgtcggttctctaatatttcttttttgggcagtgcagttttaacattccacattaaggatgtaataatcaaggagtttgtttgtttgtttgagacagggcctcactccgtcaccaggctggagtgcagtggtgcgatctcggctcactgcaacctctgcctcccgggttcaagtgattctcccgcttcagcctcccgaggagctgggactacaggtgtgcgccaccatgcctggttaatttttgtatttttagtagagacggaggtttcgccatgttgggcaggctggtcttgaactcctgacctcaggtgatccacttgactcagtctcccaaagtgctgggattacaggcatgagccactgcgcctagcctaagtacattcactttgtcgccaccatcaccaccatccatccattacatccttccaaagcgaaattatgcaatatttatctttttgtgtcttgctgattttccttggcttaatgtctacaaggttcatctatgttgtagcatgtgtcagaattttattccttatgaaggttgaatggtatatataacttttaaattatgtcaacttttctgtttgccaactagtatgtaagttccacaagggcaatgattttttatctgttctctagttatcctaagtaattagaatagcgcccagcccatagctggaacttatgaggaaatgaggaaacgagcttcagataatttaaataacttcccaagactaagttttatagttagttggtggagctagaatggaatccctgaagagtggctcaaaggcctttctctttaccatggcctgtgctgccttgctatactgatgccatgaagttagtccatcctgaggtctaaccccttttgatggtgtggaactcacatggggaaggcggacatttgcccacctgggccttcaactccttcacttggagctggcctctccccatcatgccagcttccctgtgtgtgaatgggtgtgtgtgtgtgtgtgaatggggtgtgtgaagtgtgtatgtgaatgggggtgtgtgtgaatggggtgtgtgtgtgtgaatgatgtgtgtgtgaatgaggtgtgtgtgaatggggtgtgtgtgtgtgaatgaggtgtgtgtgtgaatggggtgtgtgtgtgaatggggtgtgtgtgtgcggttgatgactatccgtgtgagaacacgggagttggggctgctccttctctttgcctccttgcccaggcacctgaggtcttggactcctgtcctaactctcagcccattagaggctgctgcctctggactagactcaggctctgacctcacactccatgcctaggatttcagtctggggtcccagttcccatctgccattccgggcttggtcatcagcctcttcccagaggcccaggatgggtggatttggcaggagtatggggaaggaaggaagagcttagcttccttccctgtggggaccctgtgaggcacagcagactgggctgggcctggtcctgggctccagcctccagcctccactcacaccctcctcttcctcaggatcatcttctccacgcccctggccgtcattgcctacttcctcatctggttcgtgcccgacttcccacacggccagacctattggtacctgcttttctattgcctctttgaaacaatggtcacggtgagtgtgggtacctcccttgggtgtctctaggggccgggaggagggcggtccttggggcccccagggttggtactggaagctacatcagtgtgtccacccgcctgaccagccaatgacctgtcttctatgccagtgtttccatgttccctactcggctctcaccatgttcatcagcaccgagcagactgagcgggattctgccaccgcctatcgtgagtctccccagcccacctgaccccaccctccagggaccctccagccatacttcttcccttgcgggtccagctctttgctctgctctagagtgtgggtgtgaaaccatcttaaaaataactcaatccccttattgctcagatgagacctggagaggtgcatatgcgttcaaaccaaggtgtcacctaccccactacctctacccaccctgcctggagctaccgctgggctcccacccatttgaccttcctccctgggcccacaatccatgaggcccctccaaaacacctccttttctcctgccagggatgactgtggaagtgctgggcacagtgctgggcacggcgatccagggacaaatcgtgggccaagcagacacgccttgtttccaggacctcaatagctctacagtagcttcacaaagtgccaaccatacacatggcaccacctcacacagggaaacggtgaggccctgggcagggcagggatttggggagataaggaacagtgaggtggtttgtagtcatcctaaagatagtaacagctagtgtttattaaataaatgttgggcatttgatatacataacaattaatgcacccaatatacctactttgcagaaaaagaaactgaagcttagagaggctgaataagttgcccagagtcataaagttagtgaattgcagagatttgggaagatttgaattctgggctgtcagactctgcagcctggtttctgtttttttccttttattattatttgtagagacggggtcttgccaagttgcccaggctggtttcaaactcctgggattacaggtgtgagggctgcactcaaccagcctggtttctgagcatgttgtgaatcttaactgtccagccttgggaagcaacagcaggcccaggatgatcctcccatttcacacatggagacagtacgctcccagaggggaggggactggcccaagatcattgagtggggctgctggaactggggtgctgggatgagctcaaactgaccatccttgtatgtcgccttcacctccttatagcaaaaggcatacctgctggcagcgggggtcattgtctgtatctatataatctgtgctgtcatcctgatcctgggcgtgcgggagcagagaggtaagggggtgcctgggaaggggtgcaggcctcagcatggacagctgtatctttctgcctggccctcaggctttgggaggggtctctgctccttcctcactgtccgctctggcccccagaaccctatgaagcccagcagtctgagccaatcgcctacttccggggcctacggctggtcatgagccacggcccatacatcaaacttattactggcttcctcttcacctccttggctttcatggtgagtgggttctgacatgctcagcctgagaaggaggtgtaatgggagcggggtgagcagaggtctctggggcttgggggatgtcttggggaggctcagccccaacatcacctccttccttgcatttccttccctaccttgctccatgcccagctggtggaggggaactttgtcttgttttgcacctacaccttgggcttccgcaatgaattccagaatctactcctggccatcatggtgagtgggacctgagcaggggcgggcagcctgggctgaggtgacataggctgtggaatggttcttggaataggcagaggatgtttctcaggctggcccaaggtcatgaaaggatgagggaggcttctcagggtatttggttggaccttgcgaaggtaggactgtgaaagaaagagtttgaggttagatgtttgagtagtgagcacagcaaaagcaagggcgaggacaccaggaacttggctcagaggtttgagagggcagcagacaaggtgggcctggaccagctctgagctcccctggggagccgtcaaaggtgcctgtcatcttcgttgctgcccacatgatgtcatctggctgctcttgggcagggctgggagccactttggggttctgggaagggcaggaggggctctgtggctctaaagcacctccctttaaccccctttgtccatccacagctctcggccactttaaccattcccatctggcagtggttcttgacccggtttggcaagaagacagctgtatatgttgggatctcagtgagtggggttgaagagcagagcctgggttgagttgggatgtctggtgggaacctcccagctgattcatcttcctgcacccccttccctagtcagcagtgccatttctcatcttggtggccctcatggagagtaacctcatcattacatatgcggtagctgtggcagctggcatcagtgtggcagctgccttcttactaccctggtaggtatatacaggcccccctcctcgggtatctccagcccctagtccccagttttgaagctccttagggagagttctatgcagtgttctcccacaggccattctgtgggtccaggttaggagtgggggaggtctgtcctgtacagttgtacaggtagtgagctttgcaagaacacctagtcggagtgaaaaatgggggctgtaatctggcctgggctccacttgccacgctgagcacctccaggcagggttacttcctcttagagcaagaggccttttcttattcatgtgaaggtcccatatcctcactgagctgtgtacccatggtactgcaagcttccagagggccacctcttctcattaacacagaggcccgttaggtgggtcagtcctcatggctgtcactactctgcgcaggtccatgctgcctgatgtcattgacgacttccatctgaagcagccccacttccatggaaccgagcccatcttcttctccttctatgtcttcttcaccaagtttgcctctggagtgtcactgggcatttctaccctcagtctggagtgagtggggtggggacctggggcaggactgggcagggccaggccccaggtgccccatcttcaccgttctcctaccccctgggtcccatagctttgcagggtaccagacccgtggctgctcgcagccggaacgtgtcaagtttacactgaacatgctcgtgaccatggctcccatagttctcatcctgctgggcctgctgctcttcaaaatgtaccccattgatgaggagaggcggcggcagaataagaaggccctgcaggcactgaggtgagtggggaggggacaggatgctggaggaggggacgtcactgtgtctaaaccctcaatttgtgtctcctgtggccaagtccagactcaccccccacacatcttctctggacagctgtaacacttaagtacgcaccaggcactgtgttaagtggtcttacctttattcaacaaatacatactggctgcctactatgtgctaggcattgactgctctagtgaacaagacaaaaatctctgtccttaaggagcctgttataggacgtgtgtatccatcacctcccatacccctccaacaaccctaagtatcaggttcttagggttccccctctgcaggtgaagaagttgaggtttcagcaggaagagtacctggcccagctgaaaggggcggagctggggtttgagcctcagcattccggctccagagactgcactcttcatcagcctcctggcatataggacctcgagtgtggcctgaccctgcatctggggaaaccagtgggcaggctggagtgagtcatgccagcccgtcagccagcccaggcgagagtgtagatctagggtttgcagtaccctgtgtgcagcaaggacagtaaacagaccaaccaacagttgaaagtgggagtgagcaaactctgtgtcccgcggttcactttagtccgacagcagggccaagatcacgtgaggaaggaggcaggtggggctgaggaggggtaaggatggatgcttcctccaacccatctcctctctctcttgcagggacgaggccagcagctctggctgctcagaaacagactccacagagctggctagcatcctctagggcccgccacgttgcccgaagccaccatgcagaaggccacagaagggatcaggacctgtctgccggcttgctgagcagctggactgcaggtgctaggaagggaactgaagactcaaggaggtggcccaggacacttgctgtgctcactgtggggccggctgctctgtggcctcctgcctcccctctgcctgcctgtggggccaagccctggggctgccactgtgaatatgccaaggactgatcgggcctagcccggaacactaatgtagaaaccttttttttacagagcctaattaataacttaatgactgtgtacatagcaatgtgtgtgtatgtatatgtctgtgagctattaatgttattaattttcataaaagctggaaagcagctgcctgtttctgtctgtgtcctcagccactcactgagcccttctgccttaagactccgttagagaacacactgagccccaggtgctactgggtgggggcgaacatgtctggagttgtggctggagtgcagtggcgcaatctcggctcaggcaatccttccttctgcttcaccctctcgagtagctgggactacaggcatgcaccaccacgcctggctgatttttaaatttttttgtagagatggaggtttcactatgttgcccaggccaatccttctcactggactcaagcaatcctcctgcattagcctcccaaagtagtgggattacaggtgtgaaccactacacctggcctcttgctaagtcaaggctgttcttatttgaaagataagaacaccctagtgtagagagggatttagctaaagtcacgcagcctttagtgacctaactggaattttatcccaactctgtaagactccaataccgtaatcgccactgtctacttccttgtgtctgagaatgaccaggggaccggcagacagatgcttgctctgggtgtgcctgtacactgtgcttcctgcctggtgcatgcctgagcctgcagggctggtggggctggaggcctgtggggtccctggagactggtggttctttctccacaactgttactgatggtattgaaaggtgagaatgtacctgctggatgtgtgtatcagatgagggaggattttaccacagacgcactggtgacaaaaaaaaaccaaacacctccggtagggaacagggtggtggggaaggcctagttgggagcacttggctaacttccatggtatgaataactcccaccatagccaatttcaagttatccatggttgttcatttgaacatttcctaaacatttagtagttggcttttacaagctggtaggagcttgcctaacacaccactgggtctcacacttaggccaagcccccaaaatcacaagaaggcaaagctggcaggatcaggagctactagtcaaatctcctgattttataaatagataaatgaggcccagacaagagaggctcttaggctattctggcttggttcttaccttgagtgtggggctccgttttgggtgggagggaggtccaccatttttactgatgaagttctgccaggttactttgataaattacattaagcgttactaacaggcatggttacatgtgtgtaataagtatgaattcagttagtcttcagatagttgtcagaacttccctatgaggaaggtattattgtcatcctcacgttaagagataaggaaactgacgcagggaaaagttaagtaacctgctcaaggtcattggacagtcactggaagagctgatacttgaatcgaggttggctatagtgcctgggctcttaaccactacttaaggctgttaggtgaaccaatggttttgtcaacaccaaggcaagtcacacactgtctttgtatcagccatctcatgtcaggctgtctgggcaaggcaggagcctagagtctgttatggcctctggagctggcctgctcagagactctgagataatgtttatagaagcccacttatacctcctctctccctccactctaaccagtaaccaccaagtcctgtctttaaaaaaaaaaaaaaattaaagttttcagctgggcgcagtggctcacgcctgtaatcccagcactttgggaggccgaggcgggcagatcacctgaggtcaggagttcgagaccagcctggccaacatggtgaaaccccgtctctactaaaaatacaaaaattagccaggtgtggtggtgcatgcctgtaatctcagctactcaggaggcggaggcaggagaatcgcttgaacccaggaggcagcagttgcagtgagctgagatcgcgccattgcactccagcctgggggacagagagaaccagtctcaaaacagaaacaaaccaaaaaccaacaaacaaaaacaaaactagccaggcgtggtagcacatgcctgtaatcccagctacttgggaggctgagggcaggagaatggcttgaacctgggaggcggaggttgcaaagagctgagaccatgccattgcactacagcctgggcaacagagcaagactctgcctgaaaaaaaaaaaaaaaaaaaaattaaagttttccaaaccactcaagcttgtttctttcttagccccacaattacttctcaggcattatgctctcttacctgggtgaatagacaagcatcctgtcttgtctccttgactttaatttgatctcctcaccttctttctgcaaactatccaagataactcagtagctctcctgtttagaaacatttctgtaaactgggtgtagtggctctgcctgtaatcccagctactggggaggctgaggtgtgaggattacgaggccaggagttcaagaccagcctgggcaacataataagaccccgattctataaaacaaaaaacaattagccaggtgtggtggcttgcaccttgtagttccagctacccaggcagctgaagcaggagggtctcttgagcccaggaatctgaggctgcagtgacctatgattgtgccactgcactccagcctggggaacagagggacaccctgtctcaaacaaaacaaaaagtttcctagaaatccttctgtgagttcctgtctgagtaccctactgacctccccaggcccagatctagatgcagctctttttgcaggccacctgcgtgaccctggtcttgcagctcctgctgcagctctacctggcagacacccatccaatgtgtcttgactccagcaagcccctctgaagcagtccctacccctctgcctttgggacatctcagagggatcgtctctttcatcgtggtctcccacactgagccgagggccaggcatggtggggtgcggcaggcacgtggagctgagtgaatgggagctgtgaccagagcaggctttggctgggcatcagacccaactcccactgacccactgtgacacctctctccaggtcacaatttccccaaacttcctatggggatttagacttttcattttttctttctttttcttttttttttttttttttgagacggagtctcgctctgtggcccaggctggagtgcagtggcgccatctcggctcactgcaagctccgcctcccgggttcacgccattctcctgcctccgcctccggagtagctgggactacaggcgcccgccacgcgcccggctaatttattgtatttttagtagagacggggtttcaccgtgttagccaggatggtctcgatctcctgacctcgtgatccgcccgcctcggcctcccaaagtgctgggattacaggcgtgagcccccgcgcccggccaggggatttacacttgaacacccttgnnnnnnnnnnnnnnnnnnnncccttgcttctctccagtttcacactcacagaaaattgctctcctcttccaagatcccctgttgaattcttggggacttctttcggggtgggacgggtgaagaggggaagcaatgtctgttgggtcattggctactctaggtcccttctggacagatcatacctacttattcttgggagaagagccatattgacttcctctatgcttggatccagcattactacaacaaaccctgtctctccctcttcactcggccctgctgccctgtcttgccaacctcacagcccatccacacctctggtaaggaccaggtgcagctttggcgccacctgctggaagaaaggagcagcacctccacgtttcaaagaggaaattccagatctgacattgttttggaatatcgattccattgatccgaacagatatttacaatgagtctactatatgccacacaccaactaggctctgaggacaaagtggtgaacaaaatagagcttacattctcagtggagatcaatgacaaataaataatttcagatcgtaataagcatcatgaaagaagcaaagtgatgtgatggaggaaactggtacggaactactttaagtcaagtgctcaggaaagaatgtcctgagaaagtaacatttggctggacacagtggctcatgcctgtaatcctagcactttgggaggctgaggtggaaggatcacttgagctcaggagttcgagaccagcctaggcaatagagtgagacctcatctctactaaagataaaaaattaaaaaaatttaaaaaaagaaagaaaaagaaagtgatcctcatgaaggatgagaattagctaaatgtgaagagagcttagagggaaagcattgcaagtagaggagacaacgcagaccccaaggccccaaagagcttggaatatcggaaggacagaaaggagaccagtgtggccagagtgtagtgaatgaggccaggcacaattgctcaagcctgtaatcccagcactttgggaggccgaggcaggtggattacctgaggtcaggagttcgagaccagcctgaccaacatggtgaaactccatcctacaaaaaatacaaaattagccaggcgtggtggtgcatgcttgtaatcccagctacttgggcaggagaattgcttgaacctgggaggcggaggttgcggcgagccgagatcgtgccattgcaccccagcctgggcaacaagagtgaaattctgtttcaaagaaaaaaagagagtatctcagggagaaggaacagcatgtgctaaagcccagaggccagggagatcatggtggagtcaaggaacagaaaggccagtgtgcctggagcacaaagattgagggaatgggatgcaagatgaggctgaggatgaaggcagaggcagatggtccacaacatggcttcgtgggttgtgttaagcattttggtccttatcctaagagcagagggaggccattgaagaattttaagcagggaagccatatgatagatgaagagtttggaaagacctatcagctgctctgaggagaaagaattgaagaaggtgagaagggaagctggaagacgaatgaagaggcttctcatgtaatgttccaaggatgagtggtattgatgagtacaagacgagtggaggcagtggagatagaaaaggactgatttggcagctggtaggactggatataattgagatggagagggagagggggagagagtatgaaagtgatgtctatatttctttttcttttcttcttttcttttcttttctgagctggagtctcactctgtcgccaggctggagtgcagtggcacaatcttggcccactgcaacctccgcctcctgggttcaagtgattctcctgcctcagcctcccaagtagctgggattacaagcgagtgccactacgctcagctaatttttgtatttttagtagagacgaggtttcaccatcttggccaagatggtcttgatctcttgaccttgtaatccacccgccttggcctcccaaagtgctgggattacaggcatgaaccactgcacctggcctatatttcttttttgtttgttcgtttttaagagaacatctcactgtcgcccaggcaggagtgcagtggcacgatcatggctcactgcagcctccacctcccaagcttcagcgatcctcctgtctcattttttgattttttgtagagataaggtcttgctatgtggcgaagcctggtctcgaactcctgggctcaagcgatccttcctcctcagcctcccaaaatgttgggattacaggtgtgagccatggagcccggcaatgcctagatttctatcttgggaaacaatgagtaggacttctaaacacagcaaacatgagcaagtttggaggccaaaaaaattcatttgccacttgtttgcaacattttcatataaatagggaagaaatcacacttaggaattccactgtcagggacaagcctacaaactatcaccactactactatacaacatttcttttttttttttttgagatggagtttcgctcttgttgcccaggctggagggcagtggcgagcgatctctgctcactgcaacctacacctcctgggttcaaacgagtctcctgcctcagcctcccaagtagctgggattataggcatgcgccaccatgcctggctaattttgtatttttaatagagacggggtttctccatgttggtcaggctggtcttgaactcctgacctcaggtgatctgctcaccttggcctcccaaagtgctgggattacaagtatgagccaccacgcccagccactatacatttcattggccaatataaacaagcaatataaattgcattagataatgtaattagacaagaaaaagaaataaaaattggaaagatatatgtaaaatgtttaatttaattttatttatttttgtttttatacattttttaaaaatagggtttcaccatgttgcccaggttggccttgaactcctggactcaagggatccacctgcctttagcctccccaaatgggattacaagagtaagccactgcacccggcctggtaaaattatctttatttgtcaatgacatgtttgtattccaagagaacccaagtgaatcaactgaaaaactactataaacgatgagaagtctcagtaaggaaaaagggtataaaattattacacaaaaatcaatccccttcatatatacaaactgcattaagctaaattgcattgttcaatgtaataaccacaccacattgcctatttaattttaaatttaaaacgaattgttgggaataatgttcaaaatcctaaggaaattgaacactcaaacacaggattcttagcaaagcaattttacttctgcgcagaggggtgcttctccttggccagtcgccatgagagcacacctgaacaatggagcacaagagcctttattcctgacgcaagtcctgcccctgtacccttttcccattggctgggatcgggtcgtacaccctaaactaatcctggttggctaaacatttgaactttttttacataaggtgggcatgtaagggagagaggggaaagggagaggggtatctgcaataagcgagagagctagtcttctttccaaataaggaaaggaatgtgagctggtactgataacgcctggtactgtggcgtgtctgggcatgtaacaaaagcagaaaggaagaaaaaaaaagaaaaagaaaaaaggggtgggtaggggggtactataaattaaagaataaaggattgatcaggctatttgaagagaaacctcatcatatcccacataattgaaatcaaataaatttaaaaatcaattcctcaatcacgctaatcacattttaaggtctcattaccacatgtgactgttggttactgtattatagaatatgctgtatcagaacatttcaatcattgcagaaagttctattgttcagtgttgacttagaagatacagtgaaagaggtgacctcatttatgagaacaacaaaatgcttctgaataagaatgaaataattctttgtcaaaccacataacttagtttttggtcatgggccacctgcatggacctccctgtatttcaggacatagctaaagtattatctctttgggagtctttcttgatgcttccaacctgagtcaaagattcctccaggatctcctagagcagaacacagttaaccttcattattcacagattccatatttatgaatttgtctacttgctaacatttatttgtgacccccatatttttttcattgctagtgtatagaaatacaattaatttttttattatgaacttttttttttttttttttgagatggagtcttgctctgtcacccaggctggagtgcagtggcgtgatctcagctcactgcagcctccacctgccgggttcaagcgattcttctgcctcagtctcccgagtagctgggattacaggcacctgccaccatgcctggataatttttgtgtttttagtagagacggggtttcactgtattggccaggctggtcttgaactcctgacctcaagttatccacccacctcagcctcccaaagtgctgggactataggcatgagccaccatgcctggcctgaacttttattttaatttattttattttattttatttatttcagtaggtttttggggaacagatggtgtttgattgcatgaataatttctttagtggtgatttctgagatttttgtgcacccatcatccaagcagtgtacacagtatccaatgtgtagcttttatccctcactcctctcccaccctttcccatgagtctccaaagtccattggattattcttatgcctttgtgtactcatagcttaactcccaactcccatattaatactcacggtcattcatggatatgcacagagtggcaaaaatttcaagttgtctaatgtgcatgttcccagctgaggctgagcaaagtgatgcccttcttttttttcacttggtgttgtttatttagtgccatgttttttcattttcatactttttcttgccccaaacagagtgctgaagtgttgtctagtgtttctaagcacaagaaggctgtcgctgtggtttgaatgtgtcccccaaatttcacatgttggaaatttaatctccaaatttgtatgttgattggagatggggcctttaggaggtaattgggattagataagataatcaggatgggacctctatgatgggactggtggttttacaaggaggggaagagcgacctgacctaacacttttgcatgtgttgtcctccaccatgttatgatgtagcaagaaggccctcactagatgctgacaccatgctcctggacttcgcagcctctagaactgtaagaaagaaatttcttttcttgataaattatccagtctcaggtattctgttattgcaacagaaaatagactaagacagccgtgatgtgccttacagagaaaatacatatgttagacaagcttcattcaggcatgagttgtaatgagttcaatgtcaatgaatcaacaataccaattaaataaggtgtctttaaatagaagcacatgtaaaacatggttatgtattgatcatttaataaaagtgttgtgatcagaccaggtgcgatggctcatgcctgtaatcccagcactttgggaggccaaggcgggcagatcaattgaggtcacaggcttgagactagcccggccaacatggcgaaaccccatatctactaaaaatacaaaatttaagccaggcgcggtggcatgcacctgtaataacaactactcaggaggctgaggcaggagtatcgcttgaacctgggaggtggaggttgcagtaagccaagattgcatcactgtggtaggagttattaagaagttattttaggccgggtgcgatggctcacgcctgtaatcccagcattttgggaggccgaggtaggcggatcacctgaggtcgggagtttgagaccagcctgacccacatggagaaaccccatctctactaaaaatacaaaattagccagacttggtggcacatgcctgtaatcccagctacttgggaaggctgaggcaggagaatcgcttgaacctgggaggtggaggttgcggtgagccaagatagtgctatagcactccagcctgggcaagagcaaaactctgtctcaaaaaaaaaaaaaaaaaagctattttaggcagatagagtggaaaaggggtcctgggagagttttcattttcaaagcagctccaaaaacatttcttgtctagcatgaaagccctggctcttagacctgggcagcaacctttcatacgcaaatgcaggccattagaagttgggtccacccaaacatggggattcctgccctcttcttcttgcccttgccccatatatgcctggcaaaatagccacccccacatatctccatgtgtgtagaacatcatggtgccctgtatttgcatattaaaaggctagggtgggagggccagttttttttgtgggctacatgaatgacatgcctggtcaaactaat

SEQ ID NO: 153 - DNA, 2682 bp, Homo sapiens
agccactggattgcctcatctttctccccattgcccggatgccaagggcaggacgggggaatggtgtgtcttcggggatgagagagaggcatcaggagggaaagtgtcagcgtacgtcctctaggcttgaagaaggagagaggccctgactccagattttaaagtgggcttcagagcccctacctttcctaggcctggggctcagaagtcatgggtggtaggcccgactcggggagagtcggaccttggggacctcggggacctcgggcagatcggggaccccgggcagatcactttcagcctggggcctcggtttcctcgcgcgtgtctgggaggtctcgcggcctgcttctcggattgctaggagccagcgcaggcagatgccggttccggggcttggagaacgtggctcggtggcacagagccgccgggcgaggcgggggcagggaggcgggcgacgggattggctggaggcggggcagcggggctcggggattggccgcaaccgagagggctgggcagaactataagaggcgcggagggggcgtgcagcagagtgcgttcctcgtctgccagccggcttggctagcgcgcggcggccgtggctaaggctgctacgaagcgagcttgggaggagcagcggcctgcggggcagaggagcatcccgtctaccaggtcccaagcggcgtggcccgcgggtcatggccaaaggagaaggcgccgagagcggctccgcggcggggctgctacccaccagcatcctccaaagcactgaacgcccggcccaggtgaagaaagaaccgaaaaagaagaaacaacagttgtctgtttgcaacaagctttgctatgcacttgggggagccccctaccaggtgacgggctgtgccctgggtttcttccttcagatctacctattggatgtggctcaggtgggccctttctctgcctccatcatcctgtttgtgggccgagcctgggatgccatcacagaccccctggtgggcctctgcatcagcaaatccccctggacctgcctgggtcgccttatgccctggatcatcttctccacgcccctggccgtcattgcctacttcctcatctggttcgtgcccgacttcccacacggccagacctattggtacctgcttttctattgcctctttgaaacaatggtcacgtgtttccatgttccctactcggctctcaccatgttcatcagcaccgagcagactgagcgggattctgccaccgcctatcggatgactgtggaagtgctgggcacagtgctgggcacggcgatccagggacaaatcgtgggccaagcagacacgccttgtttccaggacctcaatagctctacagtagcttcacaaagtgccaaccatacacatggcaccacctcacacagggaaacgcaaaaggcatacctgctggcagcgggggtcattgtctgtatctatataatctgtgctgtcatcctgatcctgggcgtgcgggagcagagagaaccctatgaagcccagcagtctgagccaatcgcctacttccggggcctacggctggtcatgagccacggcccatacatcaaacttattactggcttcctcttcacctccttggctttcatgctggtggaggggaactttgtcttgttttgcacctacaccttgggcttccgcaatgaattccagaatctactcctggccatcatgctctcggccactttaaccattcccatctggcagtggttcttgacccggtttggcaagaagacagctgtatatgttgggatctcatcagcagtgccatttctcatcttggtggccctcatggagagtaacctcatcattacatatgcggtagctgtggcagctggcatcagtgtggcagctgccttcttactaccctggtccatgctgcctgatgtcattgacgacttccatctgaagcagccccacttccatggaaccgagcccatcttcttctccttctatgtcttcttcaccaagtttgcctctggagtgtcactgggcatttctaccctcagtctggactttgcagggtaccagacccgtggctgctcgcagccggaacgtgtcaagtttacactgaacatgctcgtgaccatggctcccatagttctcatcctgctgggcctgctgctcttcaaaatgtaccccattgatgaggagaggcggcggcagaataagaaggccctgcaggcactgagggacgaggccagcagctctggctgctcagaaacagactccacagagctggctagcatcctctagggcccgccacgttgcccgaagccaccatgcagaaggccacagaagggatcaggacctgtctgccggcttgctgagcagctggactgcaggtgctaggaagggaactgaagactcaaggaggtggcccaggacacttgctgtgctcactgtggggccggctgctctgtggcctcctgcctcccctctgcctgcctgtggggccaagccctggggctgccactgtgaatatgccaaggactgatcgggcctagcccggaacactaatgtagaaaccttttttttacagagcctaattaataacttaatgactgtgtacatagcaatgtgtgtgtatgtatatgtctgtgagctattaatgttattaattttcataaaagctggaaagcag

SEQ ID NO: 154 - protein, 528 aa, Homo sapiens
MAKGEGAESGSAAGLLPTSILQSTERPAQVKKEPKKKKQQLSVCNKLCYALGGAPYQVTGCALGFFLQIYLLDVAQVGPFSASIILFVGRAWDAITDPLVGLCISKSPWTCLGRLMPWIIFSTPLAVIAYFLIWFVPDFPHGQTYWYLLFYCLFETMVTCFHVPYSALTMFISTEQTERDSATAYRMTVEVLGTVLGTAIQGQIVGQADTPCFQDLNSSTVASQSANHTHGTTSHRETQKAYLLAAGVIVCIYIICAVILILGVREQREPYEAQQSEPIAYFRGLRLVMSHGPYIKLITGFLFTSLAFMLVEGNFVLFCTYTLGFRNEFQNLLLAIMLSATLTIPIWQWFLTRFGKKTAVYVGISSAVPFLILVMESNLIITYAVAVAAGISVAAAFLLPWSMLPDVIDDFHLKQPHFHGTEPIFFSFYVFFTKFASGVSLGISTLSLDFAGYQTRGCSQPERVKFTLNMLVTMAPIVLILLGLLLFKMYPIDEERRRQNKKALQALRDEASSSGCSETDSTELASIL

SEQ ID NO: 155 - DNA, 107280 bp, Mus musculus
  misc_feature (1)...(107280): n = A,T,C or G
atctaataaaaaataagagagagaaagagagagagaaagagagagagaaagagacagagagagagagagagagagagagagagagagagagaagagggtttcctctgagctgcctgaggatgccagtcttctcctggctgctttcataacgggatgtagaactttcagctcctccaacaaatgtctgccttgatgctgccaagcttcccaccatgatgataatgggctgaacccctgaaactgtaagccagccccaattgaatgtttgcctttatacaagttgtcatggtcctggtatctcctcatagcaatggaaaccccaactaagggaagatatggaacttgtaagatgtggagacttgccagaacaagtacatcactgggggttgactttgagagtttatggccttgatccactttcagtgctgaccccaaaccctggcttcctgtttgtggttgagatgtgatctctcagcctcttaatcctgctgcttgatatcatgcctccttgctactaaggactcttctcatttgtcacattttgctttctattactattaaccatgaccaaaacaacaacaacaacaacaacaacaacaacaacaacaacaacaacaacttgtggaggaaggagtttatttggcttatagcttttgactatagtcccccatgtaggaagccaaggcaggaactcaagcaggcaggaacctgggacaagaactaaagcagaggctatggatgaatgctctttactggcatgctccacatggcttattcaacttgtttttttatatatacatctcaggactaaatgccagcatggcacagtggtctgggccctccgacatcaatcattcataactaaaacacccctcatgcttgtttacatgtcaatctgaaggagacattttctcaagttaagtttccctcttttaagatgaccctgtttgtgttaagttgaccaagacctaactaacacatccttctgcaagcttaaggcaaaataaataccttatataagttgctttggttatgatattttaccacaggaagagaaaagtagctgaggcatattataaccttaaacatttttgtaatgagggctggagagatggcttagcagttaagagtagtttgttggctattttttggtggtcaacttaagtacatttggaattaactaaaacctaaggatatgcgtacacctgtaagggagttatcttatttatttttttttcaaggatggactttatctatttttttaaatctttttaggactacaaattacaaagggaaagcagatcactacacagaatctaatgaatacatttgcccgtgcataaaactttatcaaagtcattcattttacaaattcaccccactcaccaatgcttttgctacagtgctcttaaggttactatacctttatttcaaattatattacatgttattctctcaagataaactttaaataccaaattcttggcttctaagaatggcaccttcaaaatgggcaatttccactgaagtctctggtggcattattctcttactattttcttttaccaattaaaaaaagctttcaaaatgttcacttttagcctttgccaaaaaggtggctacatctttcactaccaactaactttttgctataaattgatagcaaaaaggaaagcaaatagggagttatcttaattaaatcatttgcagtaggaagacccactttttaaattttaatctttttttaaactctatactttatccctttcccagtccaccctctgactgttccacatcccatatctcctcccctccccatcctacccgtgtaggatgtcctcatgcccccacccctaccccaccagacctcctcactccctgggatctccggtctctggagggttaggtgcatcttctctgactgagtccagatccagcaatcttctgcagtatatgtgttgggggcctcatatcagttggtgtatgctgcctggttggtgggaagacccacttttaatttggatattttgaggtgggaagatgcatctttaatgtagaccacacctccttctgggagcctgtacaagccatggaggaatgaagctctccatcttcccctgcttgctctcttgtctttcgtgagagcattccttcattggcagtagagcatacttcttcgggattccagcacatactgaagaccagatgagacgttcagccttgtagactgaacaactactagactcttggactttccactggtagatagtccttgctggattagctggaccacagtttgtaagcctctgtgaaaaatctaatctatatatttcttcacttcaggtgtctcacaaactacctgtaactcactgaagatgatctgatgatcttatctggcttctgtaggcaccttcacgcatgtatattcacgaatacaaacataaaaaaacacacacacaattaaaataagtcttaaaattagaataacaacattcaaaaaggagggatttctatcccgtgtggcccatttataagttagtgtggtggtttgaataggtatggccccatagactcatgtatttgaatgcatggaccatagggaatggcaccattaggaggtgttgccttattgggggaggtgtgaccttattggaggaggtgtggcctttatggaggaggtgtggcattgtcagaaaaagtatgtcactatgagagcgggttttgtgttttcctatgctcaagctacacccaatgacagtccccttctgctgcctgtagatcaagatgtagaactctcagcacatccacctatctgtatgctgccatgcttccaaccatgatgaggatggaataaaacctttgaaaccgtaagtcaaagcaccaattaaaagttttccttcttcttgatttccactcggggatccatcttataatcagccaccaaacccagacactattgcatatgccagcaagattttgctgaagggaccctgatatagctgtctcatatgaggctatgccagtgcctggcaaatacaaaagtggatgctcacagtcatctataggatagaacacagggcccccaatggagaagctagagaaagcacccaaggagctgaagagatctgcaaccctataggtggaacaacaatatgaactagccagtacccccagagctcgtgtctctagctgcatatgtagcagaagatggcctaggggtccatcattgggaagagagtccccttggtattgcaaactttatatgccccagtacatgggaatgccagggccaagaagtgggagtgggtgggtaggggagcagggcagggggagggtatagggaactttcaggatagcatttgaaatgtaaataaacaaaatacctttaaaaaaatgttttccaaagcctgctatggagtgctccctggtacaaagcagactcggtgtttctcttgtatcatttccttgctccctccctccctcatctcatccacttcatttcaaagtccatctcacttgccacaactatttcacaggtgttttctgttcattttcctctgaatcaatttgccttctttttcttggaaagacactgtctgatgcaggattgggactggaactggtgggaagccagtcagtgtggtggtgagtaggtgggtaggcgtggacacacttacaaagttctgaaattccaggtgacaatgtgataaatcctcaggcctccagggaaataaaatggcccatgatgaatgtcttcagctgaaaggactctcaacagatgctaaaagtacattgctggttattctcttccatgggagcctacgtgttcccacttgaccaggaagcagaaagcaagccaacgttcaactgaatgctgcctgttccaagataaatttgttttctgtagacccagggaaagaacaaacaacaaacacattggtgcaatttgcctttgccccctggaggagctggcatcctgaaagccttgttcattctccctgcttacagccaggtgaccaatctcaggcttcttccccagcgctgataggaactggcttgcattcaagccagatggcacatccaaggcacattattaaatttggggggaagaaacggtgagacttaaaaaaaaaatgaacacaaacaaatgatgtctgatctttgcctttaatctcagcttgacaaatgagtctttaaaaaaatccttatcaaaatatagattatgaactgccttttaattgaggtgcaggttgcatagacactgattttaaataccagccatgtaaagcaaatgaaataacagctcgcagcgagcttgtggtcccgatgtcaagctctgagccatggtttgggaagactgttggtttaagaggtttgtgcctgcccagcgtgacattctttgaatgtatctataagagcccagtacaatgtcccctgaagccaatgccagttctcctctgtacctggccttactactctttggcttaaaatacccagagagccaagactggtcacatgtaccttccacaaatcttcaagctcagggaccagctgtctgagcattgccttctgccatgctttgcttttacatcttactactattgtctcttgtatttcaattctggggtagcattagagcccccaactcaggaaacttgtgagtattagataaaaagctacagcaccatgccttgcagacatggaaattctttatacatgtcagctactgtgactggcctcggtgactctcagacactgcagtcactgggactcggtatcagtggtctgggtaacatggctaccatgctgccttcatttctggctatagaaagagggcaatagtggaagtttcttcttaagtagttgcacgttgaacacttcagccttcaccatggatgccagggtgggcccccagacttctcctctcttgtaattttagacctagccaacactttgcaatacttctccctattcagctaaagatagcacagatgatctcacctccaaggttttgaatagcccgtctcctttttaatttggcttttcagaaatggaggccatttgagaaaggaagaggtaaaggttctaaaaggttctgagcttgttccaaatagatgcagtagtcaacctttccagactttgagggttcaattcaccttctcctaagatgtagtaacctggccctgattgcccttagctctgtagggtttcctgatcagcaaattttgttttaggaccagacaggtcctttctatactccagagttagttaaaacttccagccatgagtgtcttcacttctgaactccagagcagctgagtgaatgaaatcagagctattttcagagtccaaagcagttgaaccaagcgaaggaacggcttttctgggacacagtgttttctggaactactaaaacataaaagaagagcacgataaaacagctccctttttgaaagaaaaaaaaaaaaagacccagtaggggaagtagctgtagtcagttctcagggatgcctgggtttgagcacagaacgcccctctttctgggaaaccctcagttttgtatgaattggcacagtagccaactccaatgaaaaggccaaatggctactgacaagactaaaatttcaaggcagagtgcacttagctgatttttagaatcatgcctctttaatgcaggtggaaaaatgtaaatagaaaaggcaggtgacttaagtcctgagttaagaaactgtttgtattgcctggtattgacagacacataaatgaggatgtctgtttgggatgtctggggtgctcccatcatcttaggcacagggcatcctggttagtcttccctgtgtgacagtcatttggtagcacttactccaattgcaaacttaatccctgggaggaaataatttgtccttaccaggttctttttgaaaaaacaaaaaacaaaacaaaagaaaactgtaatatgacactacatacctgagagacccgagaagaagccagcatccaaaggaagtttcccatctcaatgcatattcacaggagaggaaatggtgaagtgccctttgagagggtaaggctgatgatatgataagggtggagatctcggagaggtacaaggtcacatgggtggcagtgaaacttcagcttgggtgcgagtcaaagatctgtcaagatggaggagagtcaaggatgccgaagatggaatacaggaaagatgtgtagggacaggaacattcagctggagtttgtagccagtcttagctagggataagagcacactgttccttcattcaggcaggtattgacagataagtaaatggaagatctttatctgggatgcctagggactcctgtcatctgaggctcatgtctacagcctgactctttccagccctgaaaagactgtgcaccctaaactctaggccaaggctctatgcacgggatgctatcatactcacagagcagctcagtggtgctattatactcaggggctacagtgtcagaggaagaaagacaagttaactaaaaggcctacacttggaaggttttagaaagtctgcggattggatccatgacgttgggtaaggatccaaggcaagagaacttctgataatcagaatctgtgtttgccaaactgagtcagttgtgttaggaaaagggagatgggagaaacctgccatttgcaggatgtgggagtaactatagaggcccatattctacatacctaaatatataaatgtgctagtatgtatgtgtgtatatatgtatatatgtatatgtgtatatgtatatatatatatatgtgcatgcacacacacatatatgtatatatatatatgtatatgtatatatatatgtatatatatatatatatatatatatatatatatacacacacacacagatgtgggttctgcttgtcctaaccttagtttcatacaccagtgagaagccttgtgggcacacagctagtaatgccccttgtacaaccctaaaattgttatgtttatatatatatatatatgtatatatatatatatatatatatatataattacacatgattgattccctttaatgagcacaaggtactacctcatcctatttatgttaatggacttacaaataaaaaccttgatcttggctcactccaggatcaattagcatgtccggattttataatttctgtcaaagcaggacatcagagcggggtgcatgcgggtggaagggtgcaggggagcatatggtggaaaggtgcttgtttcatgccacctggtatgttaaagaggaagtggaaggtatgatgtttcactagtttctttgagagcacaatcccaatgacccaacttcctctggttagggcttatttcatgttttggctacctcccaatagtgacatgctagggactaagacttttgtgtgggggccatggaggaaatcccagtcacaaactacactgctctagatccagattggaggctgccgacacctgaaatctaaggtcatatatagaatgttctagaacgtggagagggcatgtcccttagacacaacagaaaattaaccacttagaattggagcataggctcaggaggtcaggatgggtatccatggcagaagttatttgaacttagttccttccttcnnnnnnnnnnnnnnnnnnnnnnnnnnnnnnnnnnnnnnnnnnnnnnnnnnnnnnnnnnnnnnnnncctttccttccttccttccttttccatttccttccgtcttccttccttccttctcttttccattcccttccttcctttccccttctctccctcccttcccttccccccttcccttcctttccttcactttcttccttcctcacttccttctttcctttcttcctttctcccattacttaaaatattctttctcctgatttaacattttagtttttagtagcctggctttcaaagaactccacgttcttctttgcttgaagaagttaatgttaccatgacctcacactttaaaccctcttgcttcattcagtccctcaggtgctgcagtgacaggcctgcaggaacatgcgtagcttcaggggctcttgtacaggcttctcccaagcttgctcagtatgaactttgctcccagaagtcaccttgcctcttgcctcacatgctggaaaccctgggttcaaactctagaactgaggaaaaaaatcactctagccatagggatctttcaggactttgcaagtagaggattgttccttgcaggcaaactcacctcctttatagccggggtgataaggggcatgcctaaaagctgacaggtcccaggcactactcagctctcttaagcagataaacaaaatgatcgattatctaatgacaaatggagaagagttttctgaagacagttacaatggaaggatagcttgtttgcttgcaaattgagtctaatttgtgttgcccttattatcgtggtatggagccaactgctggagctttggcaagctatcagtgaccacaccctcgatgaaagtgactgtccttttcaaccagtcgttgcctgtcggtgttcctcagataaagtgattaagcaactggaaaggagtggtagaggtgatctctgcggtcttgacaggtttcacggctttgataaattcggagattacttgagtatagatatgatctcaaaccaacttcctctcaatggaaacaaacccacactgaaccctgcaacagcgaaaatgtgtctgataatacggtcatttctttgaatccacagaatacagggaatgtcggattcaagatgtagcatgttgcattcggctgtggcgctaaatgggatagtacagacttaagacatcttgcatggcctccaacccccagccacccacaacaggcctgagatgtgctggctcaaaccaggggagctgaaaactaggcttcggttgacctagtacaaatagtccccaataactaacttatcaaatggattaaaaggttctttgcttttcccccatctgccttttataactaccctcttgttctaagctccttggacacccaggtccttaaattctgccggctctatagaggtgtggatgtatggtgcatgggaaggatgagcaagaaagccagctaaatcctatgcttagggatgaataagaaatccttagaggccaggaccaacaaagaacctgatgcaggagaaaccaacccggagaccccggagtcccacatcagccttgaggaccgcatctggtgcgcctggcgcagggcgaagtccacgtcgccggccccactgtagctggacccccccaaaccccaaagcctgcgcttacttgcaactcccgccccaggggcggtgccgggaacaagcggcgcctccgccggtcacgtgggggccgctccaccgggcggcgctgtagcttcccgatcgcgctctccaagcgccggggacgcggcgctcgcgctcccgcccgagccgcggggaaacggagacaaggagacgccttcacctccggctccccggccctgcgcccgcagcatgcccgccgcggagccgagcgccgccctcctcctgcagctcgcggaggtgacgccgccggcctccggaccgccgctgcgagggtagcggggctggagtcggctaccgaggctcggcgaggcgggcggagctggaggaggagcaggcatcctccgcggcgcggcgggcggcggccctgctgcccggcgcgcccatggcccaggagcacggagaatgcgagccgcgctgcgcggccgcagcccagctccgagccgcttgcccggagcccctcaaacctgcctgcgtcgctgccgccccccagttgcgggctcccggccaccggctgcgctaggacccacgtccgccggccgcgcaggggtggtggcccgggagcagcgggagctagagggcccgggggctgggcgcccgccggagtccagcgcggcatgcagctgcgggctccggtaccggcgtgagggttgtcggcgcggggccccgccatggctggccaggacagtggcaacctgaagacggtgaggctgtggcgggacgccgccctgagagccaggaagctgcggagcaacctgcgccagctcacgctcagctgcccaggggccggaggcgacccactggagtcccccgacgccccccagctggtgctgccggccaacatcggggacattgaggtgctgaacctggggaacaacggcctcgaggatgtgcctgaaggtctggggtcagctctgggcagccttcgcgtcttggtcttgcgcaggaaccgttttgcccggctgccccctgcggtggcggagctaggccaccaccttaccgaactggacgtcagccacaaccggttgaccatcctgggagccgaggtggtgagcgccctgagggagctgcgcaaactcaacctgagccacaaccagttgccagccctgcctgcccagctgggtgccctcgcccacctggaggagctggatgtcagcttcaaccggctggcgcatctgccagattccttctcctgcctcaaccaccttcggacccttgacgtggaccacaaccagctcaccgcctttccccagcagctgctgcagctggctgccctggaggagctcgacgtctccagcaaccggctgcgaggcctacctgaggatatcagtgccctgcgtgccctcaagatcctctggcttagcggggccgagcttggcacgctgcccagaggcttctgcgagctggccagtttggagagcctcatgttagataacaacgggctccaggctctgcccgacgagttcagccgtctgcagaggctcaaaatgctcaacctctcttccaacctcttcgaggagttccctgctgcgctgctgcccctggctggtctggaggagctctatcttagtcgcaatcagctcacctcagtgccctctcttatcgccgggctgggtcggcttctcaccttgtggctggataataaccgcatccggtacctgccagactccattgtggagctgactggcctggaggagctggtgctccagggcaaccagatcgctgtgctgccggacaactttggccagctctcccgggtaggcttgtggaaaatcaaggacaacccactgattcagcccccttacgaagtctgcatgaaggggatcccttacatcgcagcctaccagaaggaactggcgcattcgcagccagccgtgcagccccggctcaagctgctcctgatgggccacaaggctgcaggaaagaccctgcttcgacattgcctcaccgaggacaaagtggagggagggcaaggtggaggggacaaggagaagagctacctacctttccctccccttggtagtaagggcatcgaggtgaccagctggacagcggatgcttcccggggcttgcggttcattgtgtatgacttagccggtgatgaaagctatgaggtgatacagcccttcttcctctcccctggagccctgtatgtgctcgtggtcaacttggccacctatgaacctcgctgcttccctaccaccgtgggctccttcttgcatcgggtgggggcccgggtgcctcacgctgtggtgtgtattgtaggcacgcatgcggacctgtgtggggagcgggagcttgaggagaaatgtctggacattcaccgacagattgccctgcaggagaagaacgatgcagagggcctcagccatctagccaaggtggtggatgaggccctggctcgggacttcgagctgcgctctgccagccctcacgcagcctactacggtgtttcagacaagaaccttcggaggcgcaaggcccattttcaatacttgcttaaccaccggttgcagatcctctctcccgtgttgcccgtaagctgccgggaccccctccaattgcaacgccttcgagacaagctgctctctgtagctgagcaccgagaaatctttcccaacttacaccgagtcctgcctcgatcctggcaggtactggaggaactgcacttccagccacctcaggcacaacgactgtggctgagctggtgggactctgcccgcctgggcctgcaggcaggtctgactgaggaccggctccagagtgctctttcctacctgcacgagagcggcaaactgctctattttgaggatagcccagccctcaaggagcatgtcttccacaacctcacccgcctcattgacatcctcaatgtctttttccagagagatgcttcattgctgctgcataaactgctcttagggaccaatggagagggggagggggagggggaaagtttccccactatagcagtgcccagcccgggtcaggacccactccgggccacccagcttcatcattatgtggaaggctttttgctgcatgggcttctgccagcccacatcattcggttgctgcttaagcctcatgtccaggcccaacaggacttgcagctcctgctggagctgttggagaagatgggactctgttactgcctcaataaacccaaaggcaagcctttgaatggctccgcggcatggtacaagttcccatgctacgtgcagaatgaggtgccccatgcagaggcctggattaatggcaccaacctagccgggcagtcttttgtggctgaacagttacagatcgaatatagttttcccttcacctttccacctggattgttcgcacgttacagtgtccagatcaacagtcacgtggtgcacaggtcggatgggaaatttcagatctttgcatatagagggaaagttcccgtggtggtgagttacagacctgccaagggggttctgcagcccgacaccctgtccattgccagccatgcgtcactaccaaatatatggaccgcatggcaagccatcacccctttggtagaggaactgaatgtcctacttcaggaatggcctggactgcactacactgtgcacatcctctgttctaagtgccttaagagagggtcgccaaatccacacgctttcccaggtaggcagagagggtgtttgggattctctgacgggttgtcttatgttgtgttttggaggcttttgtttctcgtgtggcaggagtgtttctgtagtctcatagactttccaggaaagcctttcaaggtaaatgaagggcggtcggccaggtgaaatgctgccacgagcatcattctcttctaatagagagactcagactgccagattcacacatttccaattcgcctttattgtcctatgcaagcttgccgcatttgcggaaggcaatcttaggtgaccacacagaggtcagaggagtgtgacattagatctgtctgagcctccattctcacaggcattagactcaggtcgatcagagggaggatcctgggtctgtgttgggggtcatattcttttgtttaaagtctgtgtgtaaccagcaagttagagttaggactggcttttcccgagaaattcaaagaatgttctgtaatcagggtgagtgatggctgagtagtcagtctgtaatgcatgcctgcctcttgagagtgcagacttgaccagcgagcaagagagagagagagagagagagagagagagagagagagagagagagagagagaggactcacttgtctgaagggagtttcctctgatgtttcttggcaagtttgagctctgtatacatcgtaagatagcttcttggaaaagggggctttccgaaggtggtttttaagtgagggaagggaaagcaaaaaaagaaaacccaagagcctcctagggtgtgtttcccaatagttttttttttttccttttgtatatagttataggtgaatgagagaatttgaggactaagttgtttaagctttaaaacaaacaagcaagcaaacaaggaaccttcattttcaaacccattttaaaggttcagtaaccctgaagaacagaaagtctgggctttccatctgcccagcctcctccctatcagcatagcctcgccatcctcattcatcattctctgcacgggaccagccaacttgctccatccctccaccctcaggagcgaatcctcgaatccttgcctggaatttctggcttatattagtgatccctctgggtgtttattcttgagggtttgagcaattgcataatgaatgacaagtgcccatcattgtaatgtaatctagggtagtttcaccaccctgtgtgtgtgtgtttgtgtgtgtgtgtgtgcatatgtgtgtgtgtgtgtgtgtgtgtgtgtgtgtgagagagagagagagagagagagagagagagagagagagagagagaggagtcctttgtactccttcatctgtctcttcctaccagtcttgggaactcctggtctttttactgttctgtctgggagctttcccattccccacccttggttaattagtctccagccttttgctaggaactgtttccttgttgattgaggctctttaacagctgatttgtgtgcagtcccctggtcagtagcatcacaagcatccttcgcacagaccctgtaacaatagggtggctgagcccttctcaccttggtcccccatcacccagggtaggttgaggcgtgctgaatgggaagagtgaatgccactctgatctttgtcttagcccgagtggcagcttgtcacagtgccggaaggaataggatacccaacgtttccgaaggcaatgtctgcccattgccctagatctaggcttaattcttcagcgtgaaaaaagccaccatactggattaccagtcactggagccaaccattctgtgtgattatctggtatcttgtcaaccagtcccgacttggaggacgcctcaatgtgtttgccattggattttattcacggaaggtaaacaccttccttactgtgttactaagctgtacaaagggatggggagccctgcactcccaagggtactcaactgagagttctctgaaaccagttcttgctcaatgcagagctggagcgcgaattaaattggtgctgtgcaggccaaagggaaggacataggttattgaatgaggaccagttggggctgaggaattctgctaataagacagtgagcctggtatgatttctaccctcccnnnnnnnnnnnnnnnnnnnnataagaggacccagcttgtttctccatttgcctttttccattgctgccccagctgacaatacagcttataaggaagacgttactttccaaagttgagaaaggaagagaagaattgtaaggacacacatctatattgagaaacaggctggcagtaatgtttttataacatgcatgggaatgtttctaccttatttatgacagaagtgttattttttaaaatttgtttcagcttatatttttacccctaaagtagcaaagagatcagaaatattgagaaggctgacaatattgtatttttctttacactgtgacaacaacaaaaagaacaagatttttttatctttttttttctgggatttccagccttcattagtaactgtcataatcctgaaagatctgctaagaactacaagtaatgaaatctagaatgtcacatgggagaaatgataacatttgctgtttggttatgagaggacatacccttaggtcactaaaacacgtttcactctggcagaggctttagtctcgctgtgtagctttctggctttctatggagtcgttcgctttttagggacagaaaattggagacttccttctacacttaattaaagtatcaagttctcttgttaaactcacaattttacgtacaatggtttaaaaactgatttttttttaagtttctttttttttttgtttttgtctcccttgggacattaagtgccatttcccgtgttgcctggtaccattcaactgaagcatcaatcccattaaaaccttttaaaatgttcttatatggaaaacacactctgaccttgcccaactgcattttctggcaagagctacttagctggccgagtgatgcagagctggagttctcttgctttaattttggagatccttagccagcaaccatgggttcaaaatttctcctggacaaggcccaatcacactgtcaatgagattagagattttatttaagatttatttattatagattttatgtaagacagttgggctgatatacgagcgtgtgttaagtaaagacttatttatttattttatctgtgtggatgtttagtctgcctgtctgcctgtctgtctgtctgtacagaagaggttgtgggatgcccaggaaatggagttacagacagttgttagtggccatgtgggtgttgggaattgaaccctggtactccagaagaggaaccagtgttcttaactgctgggccatcttgccagccctccatagttcttccagaaactgaagacaggtctgtaagatgatgaaatattgctgcagctcaccaggtagaggcacttgtcttgcgatcctagacacctgagtccatccccagaacacatataaaggtaaaagatcaatcaggcctccatacacgtgctgaattgtgtgtgcacaaacacaatcatttttcagactattgatgggcatggactccgcctatatccaccaccctcttccattcctcccctgtaattggtcctgggctctcattcccagagtgcactgttcttcctattgggatgtttattcatgtttttcttctcttctgccagtatcgtttaaaccagaatggtcagcctcctgaggttggctgacctggcgggctcagtggctaccacattggaccgcagcaagactgcagtacattgataacatttcagcactcaaaggacggctttatagatttgagttggaagaatatatcttagtctaagtgactttgaatagaagttttcgctcatattcaaatatttaccctccaaattatgagtggtaattttaaacaaggagaaagcaatccagtaagcttaattatctggttttccttaattctggccatgtgcattcacacagaacctttccatatctcaaaagtaccctttgctctgtcatttcctttttgcacctagtgtgtacctgtctgactgtgtgtaacctgtcttactttgtatgcctgtctgacagtgtgcgcctgtctaactgtacctacaggtctgaatgtgtttgcttggccatcttgctacaatgtgtgcccatatgacactgtgtgtcctactgatagtatgttgccatgtgatggtgtatgtctgtctgatagtgtgtacccatccgactgtgtgtttgtcgggctgtgtgtacctgtctgacagtgtgtgcctatctgttgtacatacccaactgtgtgcgccagtctggctgtgtgctagtctgactgtatgtcctggtttgagtgtgtttaagtgtctgatggtgcatatctggctggtgcttagcctatctctctgttcccaggagtggttgcatatgtcctaattctttcttgattagactggtcacttacttcctctaagcagagacctgcctggggctttgtgctccctggaaacctctctggtgctccttgggtggctggtgctccttggagtggctggtgctccttgggtgactggtgctccttggagtggctggtgctttgtgtgaagaatctctctgttgtactgtcaggttcccaggtagtaccggatggtgatcctgccttggcatgcatcctccactcagatgtcccagctctcctgttgggcctggatcacggcacttgcccttgaatgggcccttcattttgacaactgaagcggagcaaagttcttgccttattatatctaaattttacaattactggaatctgagcatgacctagttgctcggattgaattaagtcattgtttttggactccacaaagcttattcaatatcttttttagcttcactgtattaatattgatgcccccctgggtttttatttttcataaacaggccacattgaattgggtagggctttgcataaaaagaaaaaaaaaccttaataatgtagtaagaaaaaaatgctgtgcagaatgcagttcaaagactggggaggtctacagagggctcgaattaggttaagttataggagtctttgctttcagttctagggtgtaccgtgctcgggtacctgagaacgtcccagagaaagactttttcgtttgtaactcagtttatgtgatgttctgcttcctgctcccctcgatccctggtgcgcctggctcttcctcattctcttcaactgatatctaacgcgtggatgggcgccctcagggatgtttggggaggtctaggcaaggatctagaataatagcgcttgtcctgtggctgggaggaagtgccaggttttgccgttgcacaggaagaggtgtgtgggaagggccagtactggagtggatgtttctggtagtttcccctgatttggctcttaattctcgtctccccatggggaacaccttgatgaaagactcagcagccatcattagtgggcttctgtttgagttgttgaaaaccgtggcaagtgctggccaagtctttacactctcttgtcacctgcagctccgtgccagtctctatggaagcacgcgggaagatctagtgagggcaggctcagccagccaggccttaggtttctcaggctcagactttctgacatgaaaccaattgctgggagtttggggtattatttcatctttctctgggggttggtggcctttccctcacaggaagtgaaagcacactggtacacattctttagtgctgctcaggccttagtgaaaactgccttcttctcttcagaagggctgataggcatctcagacactcacagaacgcacgtgaccacctcatgagacttgagagacttccccccaccacacccctcctctgaggaacagcactgtgtctcagggactcttcttttgccttctgacgtttcatggcagccggctgggcagcaccggaagtggctgagcgggtgggagggactccacggccatcatttctgagggatcaaggtactgtgttatctctaatttcttgcaagtgggttttgggttgtttctggtgtcctctatctgcaagtgtataggtagaggtttaccatgcgacttttgtttcttgtttgtgttcttcccctttgcagacaaactctcacagaaatagatggagaggtgacagatggtcaggatacctcgttgaatatgtaggagctggctgcctaaagccttctgctacctgaccttatgtttagtcccctagagcactggtgactcttcctcccaaagcagagttctcttagctcttcctcccctgattggctcatactttccccttaactttgacgtccattgtgtgtgtatggggggnnnnnnnnnnnnnnnnnnnnnnnnnnnnnnnnnnnnnnnnnnnnnnnnnnnnnnnnnnnnnnnnnnnnnnnnnnnnnnnnnnnnnnnnnnnnnnnnnnnnnnnnatggaggaacatgaagctatgattggtggaagtggaatggatccaggaaggcagatttttttttctccccagtggctttacccttttccaggcaatgttgcttcccagaattccaccctgggttcagcctatggattggagatcaagggaaagaccctggtgaagtggctgactggggtatagacaagcccatgagtggttgactgtggtatagacaagcccatgtgtactgcatacttggcagccgcatcgataacaattcccagatatccttgccagcaggctgacttatttgtagagaatgagaaggaaaattttggagttatttttatttttggcagtaagtgctcaaaaacatttatttcttcagtgtaatgtccttgctggaaacactgaggcctagtttttgtttgtttgtttgttttgtttgtttttgtttttgttggttttttttttaaagtttggtttctttaaagaataaatgagggatgagaccctgagcaacagttttctctctaacaggacacccagaaaggttgagaatacaaacagtgtggaccacagtggggtgtgatggacagggtcgccagaggagccaggcagctttgttggacgccagatgcctacaggctctccctgcttgcttctggaaagttcctactgctccaaaccttggccttgggcacccaggctatccccacttcctctcacagtctgtccaatggcacttgctagcacagaatgttttggggtggggtggcttcatgagtcaagtttttagcgtagatgcctttgctgctctttgcttcttgtgcctcctcctcctcctcctctcccccttctctttctcccctctcttcccctacctccttttgcccctttcctcctcctctgtccctttctttccttctccctcctcttccctccctttctcttcctcacatcaccctccttctctcctcccctcttcctcctcctctcaaggtgaaatttatcaaatgtaagatcaaccatttaaaagtgaacaactcactggtatttcctaccttcactgaactgtgcaagaatgaccttcgagccaagtgcttgtgtgggcaaggagcaccaaggcagggctgggcctcctccctgggatggattgctcgggaattcttccacctggttccggtgccaactttctttgcagggaatggcttaagaataagagtttgggtgcttcctcgttgactggacatctctctcatggccatattgggatcttcttgttagggtagtgagtatggcaggtagtgtgtatgtatgtgtgtgtgtgtgtgtgtgtgtgtgttcacccacatgtgacccacataggatgacaaagatcacctgagagagaatgaggctatggaactgctattttcaacatagagcttttatggtttcttttgtacattttgagtgattggtccttaggccacagatagataagctggtaaaggttgggaatatctcaattttaggatcttaattaccacaccagacaagttaccagcttgagtctgtcacctttgaataccttccatactcagccatctgagctgacctgggagttttaggagaataaaataaaatgcactctgttggccatgggggtaggatcttaaagtgatgatttatggtatctgaccatctagagataaaaatcgttgtatgtttgtgagatgtctggcttctcatttttctaggggaaaaaaaaaatccgggcgtttagagagaaactgactcccggcttgaatttacttgacgaggaagagtaggtagaaaggaacgcccacatctcttgctcctgggtggactgagtctggatactttgttgccgtaaatcccaggcagagcctgagggaacaatggtaccaccagcatcacacagcatcaacaccagcatcatcaccaagtctttccgaaccctttcaaaggtgatcatcccttttgagggaaagaaagtgccctttcttctaaggatcactgcgttcttggttacttatttgctcctcctttggaaggatcaaggccatcggtcattttcagactctgaagacagcgccaattacagtgggtgttgccaagcatgtgcaactgcagcttacaggtttctttgttgagggaggctctgttaggatgcgttcctattattagcctattaaacgttgagagattcaaagagttaaacagctcagatcctccccctcccaggatgctgcatcatctcagatcctcattgttcccaggatgagtcatgtgcccttgacgtggtgttagaactatatgctagctgtagtgaattagggggagtgtggagcgcaaccctttacccctcccttgttggaaaagagagagcttaagaatgggttgtggaagcggtggagaggtggctcagtgggtagtgtgaggacctgggttaggatcctagtgcccacttgtcttagcacgcagctgcaatctcagcagtgaggagtcagagaaaggaagatctctgggacttgctagccagctagtcttgcatacacacacacacacacacacacacacacacacacacacacacgcaatatatacatgcacatgcatgtcatcatatctatgtttttttagtaaaatcgaaatattttaatgcactggtcagtctaccgttgttagggatatggttggaagacaccaggaaactgagcctatgccgagtttaagcacactcagaggcttcaagtgggtgatctcattcagatccctggtagccccatgaggtaaggatctctgggccctcgattttccagtggagattagctttagccagtaagtgaagtccataagagcactctgggtttgctctagccttctgttcatctctcagaggggttagctccttcgctggcagcctgcggagaatgccttccgtacatcactaatagctgggcttgcagtgtggagtcagcagagatcatggtcacgggtgtgagccaccaggagagtgtgccattactactactactactacacatacatacacacaaacgcatcccataataagaaacaaaattaaattaagaagaaaaagcaaggatttttttttttaacaaaagtaaaattgaagcattctaacgcactgtatgcctgcatggcctctccgtagctgagtgttagaggtagttgccaagtgaccacaggaagaaggaagtgggaagtggatctccataggtgaaggggtctgaagacctaggtgggctcaaagcatttgtcatttaggagttatgataaggaaggggattctttgtttgagtgacatttcaagaccagacatctttggtagtgactcctgatagcccttgaattagaccattgaagccctgttccagcatagcctttgccaccaggcaacgctctgctgagccctggaagacatttgcagtggtgacagtgtttcagatgatctgcatgggacacggtgtccaagtgtgacgactttctccaggtcagagtacagggaaaaaagggtcgttggttacccccacagcacgatggctggatgcctcaggaatccataggactgtatgcgaggacattggatttcctcactgtaaatcttaccacaacaacccgtgagaaaagcaatttgaacttaacacaattattgtttagctgtgggccctttacgtctctactctctttatgtattgcttgtaactctagagtaaatgaaagtacaactttaattatttttgcttctcagtaccctagtctatgcatagcatagcattcatctggatgtgactgagttcaggaagccagggcttcttgcattgatctctctgttactactcgagtttttctgtctttgcctctcactttacccaaatagactctgttgccgtttgactgaaatgcttagaagttcaggatattttaaaaaaaaatgctttgcattctttctgctttgatttgaaacataggatttatgttgcttcttaaagtggaatcattctgggctgataagatggctcagtggtagaggtgattgctgtgcaaacctaaagatctgagttcgatccccggaacccaagtaaaagtggaaggggagagtgagctccacaggggacagcctctgatttctgtatttatgctggagtctgtgccccatctactgctgctgctgctgctgctattactactactactactactactactagtacacacacacacacacacacacacacacacacacacacacacacacaaaacgcatcccataataagaaacaaaattaaattaagaagaaaaagcaaggattttttttttttaacaacagtaaaattgaagcattctaacacactggtcagttggttgtggatggctaggctctgccattgcagcacctcagctgtgtgcctttgggagtcataggagtttttgtcctgtggggtggtcccaagggatgacttagtgcacatgtagatgcttcgtacaggattagaactgggaagagttcacctgctgctgggacgaccattttccagaagacccgaattttcagatgtgtgtttgtaaatctgataagcctgtaggtaaaatcctcctctttctctttctcctcctcttcttcctcctcttcttccatctcctcctcctcttccttcacctgctcctcctcctccttatatatagtgggggcatgacatagttcaatattagagaagccaatttcccccatatcataccagacatttggcggggaaaggggaaaaacatcactcatagccggcatgttccataaccagtccgctgtttctcttagctgtttttcttagctgtttctctaacctttaagcttaggttcttaaaataggaattaagctcactgtataaatgatttaaatatggattatttttctaaaaaaactaagctattatccatcacatttcaggggctttctaactgagcagtaagggtgagtgcttacatgatagttaggaaggctgtttttgttgtttatttaacagcattcccttcgctcagccatgtgaacacttcacttgcctttgattgtaattccgtgataaacttttctcttttttgctgggagttttttttttttttttttttttttttttttttccctctgggcttttgagacttttgccaggaggccctgaagcttgtagcaaacctactgtctcagccttcagagcattaggattatagggcctgaggttgtatttctttgtgaaagttttttgtttgtttgtttgttttctgttagggggtcctgagctttcatcatcattcaccgactttatagacaaaagaacatagcagaattgtgtgagaactgaatccagggttgcacgtgtcattgtatttacacacaggagcaactctgtcctcgcatcaggggtacaggcacccctcagatgctcctttgtacagcctcggggacatttggagcagcccatggggcaaggctgcatgtagcattcctgcaggagggcgtctggtctttgtagctgcagcagatgggcaggtgcaggaactgcagtgctgccatagcagttggggggtctgtgtccaatgtaggaaggcatgttgcaatactttgggcatttgggcagccgttcccaaggtaggatcatggagtgacaggcaggaaatgccatggtctcagagcgcgtttgtacagctttcctgctacctgtcagatcccttccccaggcttcccgtcttcaggctgtcgttgtaataaggcactgatatttaatgggaaacagcaccttgccagtgactcagaggtctaattagtgaggatgttcactcgaatgtatgctgcctaattacgtcgccaggtttctgagttttcagatactatctgtttggcaccatcttactggctctcagtgtcgaataactcttcacatgtctttattgcacttacaacctttccccagctcgcttggctttctggttttctaaaaattcttgatttagttttaaaatgtttcactacaattgacttcttaggagacctgaaaatccgtaacgttatcgcagagaaatcacaccatgattctttgctcccgggactttaccaataagaaagtatgcatagtaaattcaatagcaggaaccacgcccaccatcatcaatctcacttcttttgatttgtacagtgtttcttcgggtatatttcagggatgatgtggttgcgtgtattcaaccccaaaggggtcatgtctgcttgttctgcaccttgcatttgagcacttaacaaatattttgggggcagcagggcgggaggggggatttgagggatggctcaaaaggaaagaaccagtacaattctgccagaggtcctgagttcaattcctagcacccatatgaggcagcttacaaccacccgtacctccaactctgggtagatccaacatctctggcctccccagacacgtgaactcaagtgcacatatctgcacatatatactatttaaaaaaaaatctgtgctttggtaatgctgcaacagtagcaatttgtaaacaacccctcacatatacatattacatatatgtcggcgacctatctcatgatactctggtcttttttctactgtttcgtcagcccgtgctgacagacctttggtctctttcatgctgttctccacgctgttctctagattttaagctaaggaaattttccccctttcagaagtttagcaatgagcttcttttaaaaaaacctttcccggtttatcatgctttctttgtgttcagaacactctggaggcgcaattagtgggaatggtggggcaggagagaggcttgggaatgcagaaagctcagctttgtgatttaaaaggaggtaatgtttctaactggctgccttgatgcatgttggaatgctattgctttgagcgtaattactcttttcacggcttaattcatctcttattgtgtgatgcggtatttagacatagccctaattacaaatcttgcatgtttgtaaatacgcgaagattactgatcaaaacaagacctcggcagagagaataatgcttggtccgtgtaagaaatcaatggaaaataattggtcgtaagccatgttccactgattcagaacactgcctctgcctctctgctgggggcagggtggtcagtctgtccctcacgttgcctttcaagttccactccgtcatatttttagacctaagcttgatacagaatagacagagccagtaccggatgtctagtttggaatgggtctaacctagtgcactcaagtgtttgccatgggattaaattgaattaaattctgttcttgttgctcctgtgtttcgaaggccactggaagccaacatcatcagactcagctgcttcaaatcggtcttcaccatatgttctttagaaatctttctcctcgccctgatcagtgcacaaatccctgcagatagtatggatggccagggtggctcacattatctctgaacatgccacgaaaaaatatatatatattcaatgaaacgctctacgtgcatggcatggctgaggtgactttgattcaagtatcactcatgaattgcatgggaagtactaaaaaaagaaaaaagaaatgtgatttttccaaaatacttcagtgccaaaattggttcccctgtctgctgagaacttggctgttttgtgccctggaatacagtggggagggaggggggagctttagagccctcagtagcatacatctgtccctttccctgacatggctggtacccagatggctcctgagtggcatagctgtggtagtctctttcactgtccctctcttggatgaagcaggtgttcttttcaacttatttcaagtcttaaagctcctgcatttcctgaaatacaaacagacagggctcggcttttccctagttactatgttgcttctgtcctctcttcatggtatatgggaaagcaggcaggggtactggttgtctgtttggtcatttcaggaatgtggcttctggccttggctctgtttcagtgtagccagccagcatttctagcaagagtcgtctcctctgcagcctcttctggagctctgtggatgaggctgagcttctccagaacatactgcagtcatgcttagccaaataggagggctggctgcatcttggtgattactagagctgttaaaattctctcacctagccaaaaccaacaaacaaaaccaaaaatccccaacaacaacaataacaacatcccccctccccccgaaaaacccaaaatggaacaggtgacttgtttccaggaccagataaattgctgtgtctccagcctcaggtgttctgcaggcaggaagaagctgcagggtccagatcctcaaaccacccatctttttacagtccataaaccttctgatttacagtgccgtttgtgatgccagccacgcttattcatgggggatctccattgagatcataactcactaagaaccagagagggagaataaggaggtagaatggtgtccattgttctttgttagaaaagaactccattctttagccgtggacaaatatttgcctttgaagaatctggtggtgtgtcggtggctttgttcacagccgggcatggacacatgctctctcgcctctgaggatgctgaagcatgcgctccatggatcattttatgcttggagcctggctgtgtgttagctgtgcattgaatagctctctgcttcacccctccctctggccatcccccgtcctctgacccagatcatttctgtaaaggatctggtctttgtctggagtccacatggtttcctatggaagttgacacagaacaagtgtctcccttactgcagccagagatgagagagaattgctgtatagttttcttgctttgtgcaaatgtagcaccagggaaaagagccattccttgtttcctttctgtttacctgaagtccaaagccacaggctgggacctttaggaaactacttggcatctgaaagtctcagtttcatctgaaaccgataggaaaattctctctgttccaaagccttcacacccgtgtcgttatgtccttagaggtcgtgaggattaaataaatgaataggcacccaggctctagtacagtttctattacatggtaaacactcaatcaatgtaggctatgattactgtgatctttgttcacagataagtaacactgacacttgagagggctaaatatcttgggcgtacggccgtagcagaagccaggctgtcccccagagcctacaatctttgtgatcagaaaaacaatagcttccacctgtcaaaagtgggggattaaccgaaggaagaatgaaatgacgtgagaaatgcatgcggttgtttcagtgtagagactggactatgacatgggctagggctctgtaatgataggcacaggcagcttatgccctgtcagaggagagtaaggcggcagctggggaagacgagcaggcagtaaacagctacagtgctctgcaatcaattccaaggcctttggagacatgagaggcctgaggaaagcatccatctggagccaggtgggcagggcacaaaaagacatccagaaaaatgcctgcctgcagcgtttcacagtgctctatggggaggatgagggttgcaggcatgctaggagctgaaggattcagtcaccaacacccctgcgatgtgaatgtggtatgtacctattttatgtatttggttagaagagaactcttggcagctccatctaatgttaaaataagacctggtgatttttttccccgtgagtggaagtcggtattgaacagtcagctggaactgctgggtttgcatttcgcagacgctctgcgaggaagatggattagaactgagtgagaatgaagtccagtggctactcgtgctcattcagacggaatgaatagaaaaggccccagagcatccctcgggaccaaggatacagagtccaggatgctaagagggcagacctgagctctactgagtcttctgaccctgggcacagtcagggccctctcttcaggcttctctttaactgtccttaactgtcatgtcaaatgccagaccctttgatttgagcgtacagctcaggatcaactttgaccactgtgagatgaaaactgggccatttattttaaaaaacagaaaagcagaagtgatctgataacattggtctccacaggaccgctgacctaattggtttatttagggttattagcctccctgctctgatggatggcgcatacattccagaagatttgtggtcttagctttgtaagtggtcctatttcttacaactggcaggttcctatggaaataagagactttataaatagtatctgctaacttttgcccgatttaagatatggaaaggataaatgatgttgatggctgctctcttagcatcatgaattatgtatggagcaggctgctgaggttctttatggctgcccagagccagtcttttgttctatgtattttgagccatggtgcttgtaaaagaggaggtcagatcaagtgcattgaaggaatctgtttggggtagggtcatccggctgctgtctaagtcactgtgttgtttttgtttttgtttgtttgtttgttttcccatcatcagatttggggtgactgggaggaggggccatgcgctgttcactgctgtgggttgggctaatgatggactccagagctggcatgctccttggtcctcattcccttaggaacttctaactctcccctgtgccctgaccaacctctgtatcctgtatgcaaaaccagggcggattgtaactagtttctcacctaggaaccgaaacaatgtatctagggtcttctggtgcagccattttttctctccatgctgggtgaagttagaaaggattttaagatatgtgaagtacagagccagtctgcttctctttgctttattcttgctctcaaagtgatctgagtcaccaaaggcttaaaaacatctcccacacgacagcggcgatgactgtaaattgaatccacttgtgacttgcggtggagagggagtttcattagttattccctctatatagaggaagctactacccagccggctgtcgcaggtgtcctctgtaattaattggaagagccccacccgtgcatctcatcctgggtgtgtcctcccatcttccataaaatggtctaaatcaaagatccaagttgttgaaagtgacctcaaattgaggggagcccagaacttgtgggccacctctgttttagaagtaccagtctgtcttccagaggctggttctgaggcatttctcaaagcaatactatactcattcagcagtcatttaaaatatcctggggctcctttgaagtgttcattttgggtgtttggttcatactgggtttaaacaaatttttttagaaagactaattaagttaatttcttgatgaagtgatgtagcattctgctcctataatataggaactgggattggacgcagaatttaaatgggcagattgtagctgtccggatattgattctttctggcctgtgctcactcagctagagtttactgtggccttccagccaccggccattagcaggtccatctttggaaccttccctcaaggacttgggttcaggctgatcaagactggcaaggctgtgacacagtgcaggaggtcaatggaccaagtgccagaagagttcagaggaacaagaatccttctgactgagggggcctgagaaaccaacgttctgttgattactggggagagcatgtgggaataatgatcccttttcttctatagaaaccatcgggtccctgggtttttaacctgtcattaacactgtatggtcattgctatttttgagtcatcattgctcatttaactgttgtattacatttgaaatcctgggatcattaataataaaggagtagaaaaactggtgattggaaatgattttctaagggaagccgggtgagtacatgggtcctttaatttttatatcataccagtaatgcttattgtccttatcctagcaatattaaaaagcacactttcaggtgtgtgggattgtatccttaacatgtgctatcaaaatatagcagaatgttgacatggaaaagaatttaccaggtctctgtgcactaagtgtgtgattttaacggccatgggtttgtcgagttggagttgttttctctttgagaccagtcttggagtgctcagtccacttgctttgtcatctcgttttctttcgcttcccttctgtggacagagccgaaatatatactcaaaccagaccataccagatcttctctctgttttcctgtgtcatcttttacgtgtatattatttacaagtgatgagattatgccttacaaactgtcttgtatatcccatcctttatgcaaactgccttgtgtgtctgtagctgtggatgtaatgtccccatcctccaatgttggggacaacctcagtttcttcattcctgaattcatatcatgactatttacaaactgtcccagataattgcttgttaggggagctcataagaacagagcgatccaagtagtgataagacattttccaccctactcctgcagttatggtaagtgaggcagtccctgccatgtgacagtattgctcagtggtcacttgggactgtagaccttcttgccaagtgtaagactacttcttgctaggtagccatcaatatctctgtcagctcccatttcagtattcatgccttacctctgaaacagcagtcactgttagaaagggacagacacagtatctgtggcaggactgacacccaggtggctgtgaccatggaccagtcttacgtaaagggctttgagcctcttagacttcctggactctttttctatgttatggcttggagaaagattaattacacatacatcactttagccacaactaaaccttcccccaaactgcctagctagaccctggggaataagagtttagctttcgttatcattacagtctttctcaagttaatgtggctgggtgattcccccccccccccccagggctcttctgtctggaaagccaactggtagacaggacaaggtgggtgagggacctctgttctggggtaggaattatccctgccctagtttttcctctcttcctgagtcaaataatagaactccaattgtttttatataagcagccttctgacattctggcctgtgaaaattaaaatttcccaagatactgaattatcagatttgggaacccaaagtaggtagactaagtggccaggcagtctaaccgcaatgactagtgttcctaataattcctagaaatttcaaggtcactttcaggtcacttgaataactgagttatttttaaaaaatattatttttattatgtatatgagtacactgtagctatctttagactcgcaacagaagagtgcatcagatctcattacagatggttgtaagccaccatgtggttggtgggaattgaactcaggacctctggaagagcagtcagtgcacttaaccactgagccatctctccagcccacctgagttctattatcaggaacatactataataatgttcctggcagtcattctctaaggcatttccagatagaactaaactaatgccatgtgtaataggtgtgattctacttagggcttttctgggtggcatttcaagtgtggtccttgtgagttagggctagcctagccttcgttctcttttcctcctgtatctgtagatacccatctatttttgtcatatctcaacattttcaacctctgtcttttaagcttgctgtcttaaactaagtgaatctatagtttgtcgacctctcattttgagaacaaaactctctttttataattttagttttttttaaactgagatggaatgctaattaatttgttcagagactagatatcctttttgaatagctagcatgctattcctacataaaatcgcaagagatctgaagtaatcttttagatgagaaaatgtcactgctgttatataactacatatgacaccacctcctctcagtctgtccatctgtctgtatgtctgccctttcttccctctcttttttctatagagtcttctattagttaattttctagttgctgggacaaactacttgaaagacaacaacttaaggggagaagcacatgaacctgtcaggcaagttgtgtcagctcacagagagtgacaagaaagaagtgacctacttcctatagctaggtaccaacttcctcttccctgacccccagccaaggatcatgtatttaagcacagaacctatgggagacagtttacattcagactatagtcagcctatagatgagcttacacaagtgactgtcaggttacaccaagcccaaggacctcagtcctgagatgcagctgttacaaatgtttcaaaactatcctttagctttctggaagctgacataaacacatttgaatattttagaaaaagaaaatttaaaagatgactggtggtttgaatgagaatggcccccataggctcatatatttgaatacttggtggccagggagtggaactatttgaaaggattagaaggatttggaggtatggccttgttggaggaagtatgtcactggggttttggactttgtggtttcaaaagcccacattgggggcctattctctctctctctttctttctcttagccccccctctctcccctctctctctcctcccccctctctctgcctatggataaggaggcagaactctcagtactttcccagcaccatgtctgcctgagtactgccatactccccaccatgataatggactaagcccctaaaattgtaagccagcccccagttaaatgctttcttttatagtgctatctgggtcatggtgtttcttcacaataggacagtgactaagacagggaaagcatcaagagtcagggacaaggcaatattactacttcaggagctgggaagtggggtgctatctaggccacaggctgttttagttgggtttgagtcagaaaggtctttgatcattcatttctttgccagtgggcaaagtggcttgggtgaggcctagctccgagtaacaacacggtctagcttaaggaccagcatgctggggcagtgattctcttaaagtaggtcagaaatgtgtgcttcttatggtcaaaacggagggtaagaacctttcagtgatatcatataaaaaaatccaaagacgagagatcaagtattgaggggtcgggctggagcaaatagagaaacattatagtaagaatatagatcacagctagtgagattaaagaaaaagaatttgctaaaattatacatgatgtcaactagatagtaatttttttatgcctcaggtaagcaagagataggtagaggcccttgaatgcccactggtaggtgtaacataaaaaaaaccatcaatgatggagcaatcgcatctattggaagccatattgaaacacccccactgagagagaatgaccccctggaaatcagtaagtgctttaaagacaagaagtccaagctggagacattatgccctgtttttactacttagtttgaagctatagtcactaagacagtatgcgactaaatcaacagataggcctgaaatatgtagcccattgaatttgggcaatgttacaagtattctgtgagaatgggcattttcagccaataaagctgaagcagagacctgtactcatgaaattgagcctcgactcatagtgaacactcagacaaacttgacatggattgacatagacataggcctacataaagcttccaagataataagtcatcctaagaacacataggaggaactttctgtcatctttgtacaggcaaaacttattgttctgatctttaaaaaaaaaaagaccatagtttttagaatattcgagattcacagcaaaatggagtagatggcacagtcatttcttatgtgctcaaatgcccctgaacatgcagcctctggggtagaacgctactcttaggaacctgcactaaaaggtcattgtcacctccataggcatccgtccaaatgtatttcctacttacaatggaaaaatgtacaataggtatccactgtttacagagtagtttcctgccctggaaaccctatgtattcagcccagtcctcctgcctaacaacaattattgctttttagatatagaaacaaagaaaaaaatgtagttattaaaattgaaagcttttggcccttaaaagaactgttgagaaaatgaacaggcaacctccgctagtgggaatatgcttgaaaacacctgattaaaaaaaaaaaaaaaagaccaaggctctgttataaatagctaaaaagatccgaagagtcttgtccccgagtctggtttagcaatggaaagtgagtgtacaaaaagatgtcattgtgagtcactggagaagtgtggattcaggaggtggcactgcatagcattctgtggctgagatgcagatgaagtgtcaggaagatgtgtaatacctgggacttccccatcgtgatgctggaaatggaaaatactgtagccactttgatggaattcgtcagtttcccacgaagttaaaactacgttcaccacatagcccaggaattcattcctaggtattttccccaaggggaggggatctgtgttcaaagatgacttatataaacatccccgaaagatttgttcattttgttgttgttctttaataatcatataccagaaatggcttgcttgttgagtggtaagacattgtggctatacagccatgaaaagacagacagagctgatgaacagcctgggcaagtctcagaatcatgctccccccagacagaagcacacatggaaaaagcacattctgtgtgctttcactcctagggaattcaagcaggtgagaagctgctgtagcgacagagggcatctcaggggctgatgatgtagggagagaattgtctgctagaggtacaggaaattttggggggagggtccatggatgcactatatgtcatgattgtgttagaaattgcaagattagatagattgtcaaagctcttcaagttctacacttaaaaattgttattattgatttttatcgcacgtaagttatagtctggttacgataatttccttaggcagtctgacatgtgtccctttttcttcccacatccatcccttctgtctctggctatgtagccttcctatgtaaagatcttgccaatggaacattggtattagagacaaaggcagacttcctctctgagattgtgtgactgttctctcaggtttaagcaaatggaactgttgatgtccagttgtttctcaaagagaaaaatgtatacttttatttattatcgttatatgctgatgacatgcactttggagtacatgtagaggtcagtcaatggcttcatggagtcatttttctccttcgcttcatgtgagaatttgcagataggcaatcatgcaggacaaaccctcactacctgttgagccatccctcactacctgataagccatcttgctctcccaaacttgctgacccaatattgcatccagtttgacccataaaagcattaagttcaggactttaaccaatagaagagcagaagagcttttgcatgtttttaaattaattttcatgacttggcaaaatcattacatctcgtgactgtagtaattgttacctgttagaatttattattattattattattattattattattattattattacttggtatgtgtgtgtgtatatatatatacataactgtgtccaggtgctgaagagatcaaaaaagaggttcaaagacaattgtttaaggcatcaaggttatttttttgttccaatttatacattttattttgccttgttacatttaatagacttcagtacattttacacacatgcacacacataaatacacagatgtgcacatacatgtaactttaaaggtattctacttgcccagtagatgaatttgatgttgcctcacccctaaatttagatgattaaaagacttgtatagatttttatcattattaataagccattgcgaaagacaactttcagccattgcgtgtttgctgtgcttgggagggttgtttgggcttcagactgaagcaattagcagtcctggatctgcacgcatgcatctgcatagacatgtgtgcacatgagcctgaagaaatggaaagaagattgatgattcagtttgcatgaaaattaaaacagcctgccgagagctagctctgctctaagccttccagaaaagcctgtgtggtccgtcatcgtcagaggatgacctcaccccactcctcctttagttactggttgaacacattgggtattattattcctgagaaatgattgagatgacgtcatgccatctcacttggagggaaagtgatctcaggaaactggctgtcacttcactctaaaccttattagccatggtgatggcaaaggctgcacttaattggaaatgattggaggcatactctagagagtttggtgtgtccacactggtcagcttggtgcgatgtttccttaggtctctaatagagagccatctggcaaaatggaaatgggtgggatgcaggcttttacctccccaactgtggcggatggccttctctttttctagtaactgcatacaggactgaggacacgcacaggtggtgcttatctgtatgtgtcaccttctagctcaggaatcaggtgacactgtccacacatcgtacacagcaatatgttgtgtttggacatgagccacagaaaagtgtgtatccaggaaacaatgatatgttgacaagattggtttccacgctttgtttgggatgcttcatggactgcctacgtgctcctccatctgttaggaccttgtatggtttgcactttgcaagggagaagccatacctaggttagttctttcgagaggcattttattttagaagggggcactccgaggcagactagttaaatgtggcttcaaaccctagatctgctacctaaggcatataatcctgggcaaattatttaatctcttcgggttgcaccttttttatttgaaaacaggagtaggttgacgaggatatacaaagctgtggttttcacccttggccccacaaaatgaagcaaaatttaccaagggctaggggtgcagctgagaggcagtttgagtccctgggtttgattctaacactgcccaaaccaaaccaaaccaaaccaaaccaaaccaaaccaaaccaaaccaagccaagccaaactagactattatttaaatcatatcatgccacaaactgacccttttttggtatagacttctgaatttcaactcatgtttggagtcatgtcaccatgaccacgtttggagtacacaatgatcttttatctcagagaaattctggcctgctgcccttctgaagtcatatgagccctctctgtcttatatctactcaacaatagtcttggggtacaaattattcattatttatagttcataccatgtaaaaatctttcttagtaaattaagaaaaaacatacacatagcttataaatgaaaatatataggacatatatttgaaatatatatttgaatatatatttgaaatatataatatatatatgaaatatatatatatatgtatatgtatattttaaatctcttttctgtgtgtgacaggaaggtgaggcagcatgtgtcgtttgtctttccccttccctgtcttttgctcaggaaaacttacaccaccctgtgccttccttggaaaagttgaagctgtagaaagtttggtttgaatgtccccccttcacacagttctttctaatgaaatcacatacagtcatgaaattcagcaaaactcttttggggctagggctggggctgcctctcagtcacagaatgcttgtctatcattgataaggccctgagttctgggattcagtgtccagcactataggaaacataacgaccataacaataaaaacactaaaagtcttcagggccacatctaactttagctccaagcaatgtagcaaaacatacaaaagattataaagtagaacaatatgtgaagtaaagttttctatcttttgaggcaaaaatagttttaatgtagttttatcctttttcagctggttaggacctagtttgtgactatagagtccagtaaaatgaatctgtcactgttgtcacttatatagctggaatgtgctatgtaattaattaaattcttatatttaatagagttttaaacattacatctaaatgttctttcatttaatagaattatcaaatagaagtacacaaataataattttgtatatttagatttcaataatacaaggacaaccaagttcactttcttggttttaaaaagccaaaatctacttcatagtgctgttataaggagtaagtaaaatttgtgtaaacatgcatatctcaaatgccatgtactgagtgagcatttaacacattgccttccctcccttcctggcttctccctttattatttttgttttatgcgttctggtgtttggcctgcacatgtctgtccaccacttaaacgtctggtgcccacagggacaagaggaaggcataagattcctttggatgtcacgggttgttgtgagccaccatgtggttgctgggaattgaaccgaggacctctggaagaagcagtcagtgctcttaactgccaagccatctctccaggcctccttcctggtttcttaactgcctgctccccttcccatcctgctgcacctcacttgtgttcaaacactgaatggctgttgctcctgttcggccaagggtgctacaccctcctcatacccactagttcttgtgttggagccttttgttttgtgtttcttgggctgcccagtcatccaggtctttgtcatcatgagttctgggaaatgggtgttggtgaatggggatcacannnnnnnnnnnnnnnnnnnnnnnnnnnnnnnnnnnnnnnnnnnnnnnnnnnnnnnnnnnnnnnnnnnnnnnnnnnnnnnnnnnnnnnnnnnnnnnnnnnnnnnnnnnnnnnnnnnnnnnnnnnnnnnnnnnnnnnnnnnnnnnnnnnnnnnnnnnnnnnnnnnnnnnnnnnnnnnnnnnnnnnnnnnnnnnnnnnnnnnnnnnnnnnnnnnnnnnnnnnnnnnnnnnnnnnnnnnnnnnnnnnnnnnnnnnnnnnnnnnnnnnnnnnnnnnnnnnnnnnnnnnnnnnnnnnnnnnnnnnnnnnnnnnnnnnnnnnnnnnnnnnnnnnnnnnnnnnnnnnnnnnnnnnnnnnnnnnnnnnnnnnnnnnnnnnnnnnnnnnnnnnnnnnnnnnnnnnnnnnnnnnnnnnnnnnnnnnnnnnnnnnnnnnnnnnnnnnnnnnnnnnnnnnnnnnnnnnnnnnnnnnnnnnnnnnnnnnnnnnnnnnnnnnnnnnnnnnnnnnnnnnnnnnnnnnnnnnnnnnnnnnnnnnnnnnnnttcatacaggcagactaatgttgctgaagggatcatatgatttgtggctgaataagagaaagaaagtccctaagtccaggaaactggcttcatttcaaagtagaaaaagctggcatattatgacctggaagatgtctcgttttggagtcagatatctggaattactctcaatctaatctgtgttggtcagccaggcaaaattgcttcgaccttatcacagtaagacaagcgggccacggctgacatttatttgttgatcacttatgagatttttatttaaacttcactcctacaagtttgtgacttttcctcccacccctgcattgttaaaagtgggctggatttgtttgggggctttctaaggtcctcctccgactttttactgctttccaagatgttttcctttgtatcattttccaacaaatttataaaagattcccacacgtacacaagctgagggtgatagggtgtttttttgttttgttttgttttgttttgttttgttttgtttttaataaatctctggtctggagtgaattgtagtgttgggtccctgaaagaggagaactgaagtgtacttttctattagagaacctgactgtatggagggatggggtatagacagaactatgtggctgcagagttttctgtgtgtgataataaactagtctgtgctggtggggactctggctcccagggtcgaaactttgtgcacaccattcactggcatcagtcggatgtttgtggtgtgctcagggtcacggtaatgccatatatggggtgcagactaagctagtatttatatgctcccaagcaagagcctgtaagtaaaatagtatcaagctaattactcagtttaaagtcttcaaatcgaagctgtggtactctgtatttcaagccttgcctgaggaagctcatagctatcctgctatttcctgtgctcctgggaactccagcaagaagcaggtacacactacccctcactctggccccttttcttccctgatgtctgatgagaaaacctgcttttcagagaatgatgtccaaaccgaggtggtgtgatgcggctctttgagaggcccagagccttcctggtcaactctttctgtgttgggtctatgtcactcctgccctggcatcctgacaaagactaatgtggtcatgggggcattatttctgcttgaccttggctgaccagtgtcctctggtgcctggctcaggctctcatgaccactggtgtgaagaatagctagagaactcccatctctggggcacaaatcttccttcggagccatgcacccaagaaatccctttcttcagtggaagtggtgaagactggcttctagaatgtacccgcatcaggcaccgtccagggcatacataccagctctcgcggcaggcaagtggcttactttgcactgtttttgcttgactggtttttagaatttttgaaaggttttagttatttgtatgtctacgtgtctgtgtgaacatcagtgcagttgccatggaggccagaagagtcatcagatctccccactgccctgccctgccccaccctgccctgccccccccagagctagtactataggcagttgtgagctgccgagtgaggatgtggggaactgaactcaggtcctctttaagaggagttggaagcactctaaccactgagccatatgaccagccctatcctaattttttttttttttttttttttttggtctgtttaatggccagtgttctctgactcccttcacatgactttgacagtaactctcttctggctcagatactagcaaaaggcctgctatttaggtttgggggcttgtctgggaagtgtgtgtagcatcagtaaatacctgttttttctggctcagataaccctatagacaaccacagcaggcagaccacggctggcttttttttttttttttaatatgtgtctatgggaagttatctcctggaagcttcagaaacttcaaccttgctttggagcttgtgcctcatgctgtggggtttacccttgagggatggctggggtacagctgtggaggaccatttggaacatttagaaatgttatgaattagaatcctgttaattctctgatgcttatttcacagggatttcataagtgggtgcttcatgtagaacttaatttcttcttcccttcattccatccctctgtggattcggaacagggtgggattagtcacagcctggaaccttccattgtagctcactccctgtggcttcaacctgcagtattctcagggctggttctcacaccagccttgagcttctggggggccagatgcaatgttaattcgcttttgtttcccagatcctagaacagtgtgatccagtacaaatacacagtgcacagataaatatacaggaaggtactaattgtaggtatgtcccttgcttgcatgtactgttaatttggatttcaagtaaatgataatttttttttagtattagtatgtttcatgaaatctatagatttaattggtcagcctacatttttatttgctatactaggcaacgctatatagtgtacatgacttagaaactatatttttaccttccaagtagatataaacttataatgtatctcaactaagatgtatcaaggtctctcaagacttggctgtcctatggaaggcagagtgggaattgcaaatagctaatagccatacttcacaggcattaaaggaagatggcctttggcctatagcaactacatggccttgacatggaatgtgtagtaaggacccccgagttaatgatgttgtctgtgcttcttgtcgtcttcttccaggcacttgtagtacaaaggtttgcagtttacaatgcacagacacctctggccatgctgattaattaatgaaacaggttgtctgggattttggagctctggttagactcaggttctcctattttgcctttgtccctgaggctggggttctcaagtcagtgctcactattttgtttatttttctgtctgcctatctgtctgtctgtctatccacctatcatgtatttacctactactaccatctatctactatttatctacctacctatcatctatctatctatctatctatctatctatctatctatctatctatgtctatttttttttttaaagacagggtttctctatagctctggctgtcctggaactttctctgaagaccaggccaacctcaaatacagagatttgcctgcctctgctgggattaaagaaatgtttcaccatgcctagctgacaatatccactcttattcctccattcccaataaggggacagggcaggcagagcaagagtgtatcaactattttgctagtggaatatagccttgggacacactatggcaacacggggtcttttaagccttgtgttctccctgtatctgttgcatatgcatgtgtgtgggtatgcgggaaggtgtgtggatgtgtgtgctggtacacataaactctgtagctcagctagcatgagtggatgatggtaacctcattttttatactagtaaatggagcaggtggggacataagagacagatctgactcaggcagtagctgctgctgagaatagtcaggacctctatcttctatgtagtctgctcccctcccccactccacagtcaggctgcctcccacacactgaggaagactctgaaatgtgctgggtagaaatgtttttgtggcattgtcaacagttctgaccttcatgtgttggaggatcagaccatgctcctagcatgtaaaattgactcagtagggctaaaaacaatgatagacttgcattagaaagcatctcaatacacctctgtccttgaccacaggggagagcttcaaatggtacatgtgccctgttgcccgttctctagtgaggaaaatagaagcagaaagtttgttttctgggtttcagaactcaaacccagctcatgctcattaaaagcgtcagtgacaaggatcctcagaagttgaaatcttggctttggtgggtgggacagcagctagaaaactcattatttgcacagacatgaatatcttcattggctttgaagtgctgctggaacctgggctccctggaggatgggctgtcaggctgcatggatgtgagtgtcataaagctggaagtcatcttgccttgtagaaactgacctgctaccccctatacttcccaagctggcccatgtgttgctgtgcaagggaccacccagtccttattaatgatctgcttggagatatagagtccattactgaaaccttgctttgcccagagaagatactttagtattaattatgggagtggaagacaccgtggctcttacaagccaggaagccttgatttatggaaggccttgaagcttcccatttccccgtttatcttagtggaataccatcacacatgttgtggtgggattgacttccagtatttgtttaagcacattctctggttaaagctttggtgaatggaaggaaaaaaaataaggcaagagggaggggcgtgccattacagcatggagcattgctttcaggtgcttttcaatggcccacatgaacctttcacttccggttcctgtttaccggatcctgaaaatgcagctttatagtacaatatggttcaatacacttgctttacagtgctgtagggtttgatacatttggttaaacagccagattagttttcacgtttaggtagttattctttatctagactttgaagcgctgtttgtttgtatccatatctcatgttttgtttgtttgtttgtttgtttgggtttttaagacaggacacttactctatagtccagacggacctagatctcacctggtaacccaagtttgcctcaaccttctgtgtgttgaagtttacaggaataaaccaccatagtctctttttctttagtattgttgttacatatgtgcatgtaaccatatacatatatgcatgtaaccatacatatatatatatatatatatatatatatatagttatattatgtataaatacaacctgctaagtctgtgtagtgatcttgaatgtatatgttttcaagactgaccacttgataactgggtaaccaattaggaactgattctcgaggaaggttcattcttcttgtcacaggttgttaattgcctataactctttgtccaggggtgggaccccatgagaattccctcttccaagttagcatccgtattgacattctcattgttcaagtcttctttaggcagccatattattgaggtttcatggttgttaccatctccttcatttctagaggacacaatcccaaagcagactttctggcctttgacattcttttcccccttgagacaggtctcactatatagccctggctgtcctggaacccactatatagacctggctagcccagaacatacagcgaactgggagttagaagcatagatcaccatgcctgccttcaagtaactattaaattaacctttaccaaccattgtagctaatagtttagctaaccagtttcctatcctgtagttctcaccagagctaggcatttatagtctaacttttagctttggtagctttaaacctaatcaagttaaaatagttcaagtaaaacaaaaatgtcttccctgggaaagacatagtggtagctgtcagtgttattagacatgaagatttcagagtgtgggagacttacgtcactcatttcctttatcttcctggaaggtttcaatcatcccaagagaagccctgtagtagtctttgtgaagatctagtcactctctgtctgagtacttcaaggaaagtacgttttttcaaaatggaattttcccagggtcacaccaggcaacgaaggctttgagccatgaggtctcccaagactttggttgcccttgctagaaagtaaagctatctccccttacctgtctgctgccttgccaaaaggtatcgttagacacaaaagcacaatgaagccgccacctaggctgctgctggttactggagtgcggcatcagtgccagactcaggctgaatagcaaggaagctgcagagaactaaatggggccagagaaagaacgttacgataaccctctactgtcttcttatgagcatgaaacgcatgcacacacacgcacacctacgtgtctgggccggtgaaggagagtcagtgaactgtgggcttgcagggttaattactgaagagaactgttcttttgctcggtacctttcccatgatgctgggggatgggggggggggagggtagatccagccacttagtaattaagaggaaataagtattataatggtggttggagttcagagtaaatctctctcctaccctcagtccgggagactggggaccctgatgatgtgattcaacccaccctcttctaagccaggaagcctgcttggccctgtctattgagagctgcgtggtggacagttgtccctttgtgctaagctgcctgcctgctggtgtcttcctaatgggcacgctctgcttttgtttgctttgaaaagaaaagtgctcatgtgaggactgaaagttttatcctttctctgttgaataacttacttattgtttaaataccgccactatttgacatgtcagtaagctaaccttcaccttgtgcaagcattttaatattctcactgaggctaaacggtgatgtgatgttgacgtccccgtgagtcctttttttatatgttaatacagttgtctctgtattaatagtttttgcttttcttccttttcttgcaatggggaaggaaatgatttgggggacttcttttttagggggatcctaattggctcactcactgtgaaacagaaaggagtcactacttcaaaatggctagcatggttcagctgtgtgtgaattaaggtcatgtccctttctttgaagaccggcgggagtgctgttatggtaaatgcggtaggcatgattaaagatgagagttctgcagggaacatgtggcagtttcaggtgcttgggtgccaggtgggacaccctgtgaatggcagtttgaagaaacagaagctggggattagccagtgcagcccagggtggcagtgtgtggcacagtgcctttctcagcagcttgttatcctgtgtctagttttgtgttgctccttcttatatgctggcatggcatggtgaaccagaatctagaatagggtgatatttgtatgtatacatacactgagcatcatgtgttctgtcctatcaggttcactgtgcttactgatgtctgctttctttgacataaatatggcagacaatcgaggtcactcagttccttgggcttctgcatgtatcagttattttacacatacaccactgatcagtagcatggcttggcatgccaatggttcaagcaataggaagtgaaaaaaaatctatctttcagcactgatagtaattcgaacttttagttagtagtgttttttgaaggtgtgtggaatgtgcaagtttactgcaaaccacctcatgcatatgtaagcagacttcatgaagatgttaactgacaagtcccagcatgggtactttatatttctcagcatatacccatgtgctgactcaggtactgtagctcctatgcatttcgtacagtctgagcaaatgctttctacttcagaatctttgtctctccaagcaattctaactcgtttattagaagcaaaaccccaaagtcttgtgttcccttccagggaagctttgtatatttattctttttctgttgctacaataaaaaccccatgaccacagcacgatagaagaaagagatggtctaggtttacccttccagagggtaggaatcgttcacgaatgggagaaggtgtggagacaggagcgggaaactgaggcctcgtaccttgaagagcgagtgcaaagcagagctagtgaactagaaatcatatcaagtgtttaaacgctcaaaacctacttctggcgctatggttcctccaacaaggtctcccttcctttacctcctcaagtatgccaccgactggggatcaagtattcaaacgcccaaggctatggggacatcacatacgcctgtcaaatagcaccaccagctggggagaaaatattcaagactatggggatctcccgttcaactcatcacacctggtggccagcatgcttatgcctgggtcagggtgcattcatttcatggggatttaggggtgagttgcttctgagctcatgtggttgttcctgctggggttcctagagcttcttggggtgtctttataatagaatttaaattgtaaaaatgatgaaaatgcaatatattttagacttatgttttatgaacatttgttccatgtaccatgtgggcgcagtgcttggaaaggtcagaagagggtgttagagcccatgaaactggagtcacagatggctgtgagccaccatgtaggtgctgggaattgaaccgtggtcctctgaaagatcactaagtgtttttaacctctgagccatctctacagcttctaaagcaaagtgtgtttatttccattgcaaagatctggaaataatggagatcctttgtcttctcatcatccacagactgctagttcctgtgagttgcagtctgtaaacctcatcaatacacgcctcttgtaaaacgttattatcaacacctgttcccactgccacactgtgctttgacacttcccaaattgttggtaactgatatcccttctcctttaatttgccactcaaatgacatgctaaaaccatcacactgaaatcttcctctatacccaagactgttttcggagagcacaaatgttcaatgggaattctaaacattatgggacttataagatctggcaaagtgtaccactcactgcccagtgatttatctatgaataattaccactgaaagagttgatgtggggcacactcttttcattctttatagtgaggttaaatttaagtttctgtgctggctagttttatgtcaacctgatacaagttagagtcatctgagatagggaactttagttaagagagttgggttgtactcaaactatgtagggcttatgtttaactggtgatctatgtgggagggctcagcccactgtgagccctagggtggtggttctggttctataagaatccagggtgaggagcaagccagtaagtagcacctgtccatagcatctgtaccacttcctgtcctgacttccttcagtgatggactgtgatgtggaagtataagccagataaagcttgtcctcccaagttgctttttggtggtgtttcatcacggcagtagaaacctgtaaagggttcactgcagatgcatttaaacatgtgtcacaagggagtcttcattcagcttatctgtggtactgtgtgtaccagcactgtgacgagtctgaggtttaaccttactttcatcttgttaagttagtacaccacagtattgtggttgtttgcagagactgggttctccagacaagtagcaagcagctctataccagggcttcctcatcgtatgcacttggtgtttacactggttcctcttgcccccttcccacccttaccccccatgactcaaatggctgatgtgaactccatgtccaccttaaattgtcctgtattgaagaagcctgaatttaaggatgtttttaataatgggtggtaggctctgcttggtgattgtcctggaggaagatatatttttctaaaaataccccacatctggcatccactccggaggaagataattatctccattgtctaaggttgttcactatccaaactttgattaaaatataattccaaatgaaagctgttagtgatttcttttaccagatgtcatggttagcttcacttgtcaacttgacactcctgggcaagacagacccttaactgggggatttcctctgttgaattggctttagcacatgtctgtggggggattttcttgattcctggttgatgtgttaggtagggagagctcagtatgggcagtgcctttataaatctgtgacaccccagcgagcctgagaatattttacatggaatattttaaaggttcctgggttgtgtagggcaagcattcagggcaaaagcagggaggtcgtgtaggaggcctgcaggacccagcaagaagtcatggggcttttggactgattgacagcagaagagtaggtgagaagccatcttctaggctggttgggaagatggagtcaatgtacgtgttcctctattggttctgggtcaggcaagaagacaaacaagagaagctgaagacagctaagtctgggggctgagcaaccagaatgagggagttgcctatactagatggtgttctggggaggagcaggcagagaatcgcacacctgaagttaaatgtgaagcctgtttggtttttgttgaagtatctatggaaagctagttattcccttagtcatctcactgtgtttccatggagataaggtgtgctccattatgtggtcccagggtggcactaaagttaacacagggaacttttaagtcaaggaaagaaaaattcaggctcaagaccagaaaaggcaacgtagggagagcacattcctgcagcctgacagcagcctgctggaaggtacctttgcactgtgggtgtcccttaagcccattcctatacagactcacagatgtcattccctccctttcgttcctgattggggcaggaactgagcatgtaccctagtgtatccatggctacctggagcactgtgtgttggtgctgatgttactaaacaggagtctggactagtgttctgctttatagatggatcaatcactattttatcaacattgattagtcaccatgaaaacactttaagaagctttctaattttgttttgtttagggtactgggaatgaaatccagggtctcatgcgtggttaagtgcacagtccacgatttatctgtaatgctagcttctaagttttcattttttgtgtgtgactattcctgactatgtgtttatgtgaagatgtataagcatggtccacttatgggaaacatggccctgtggatgtaggtatgtccatgtgtgtgtgcacgcacgcacgtgcatgtatacatgtgtgaatgtatacattcttgagtatatctgtgtgtgtccaagtgtgtgtgtgcctgcatgcctgtgtgcatgtgtgtgactgttctcgtgcacgagtgcatctgtgtgtgttcatgtgtacaagtgcatgcaagtgtgtgcacgtgcacacatgtgtgcgcacaagtgtgtatgtgtaggtgcttacaagtgagagatcagagagcaatgttgggcattctactctgtcactacctgttttattctcagatgtcaggatctgtccctcactgaacctgaaactgggcagccagccagccagcctgccccagcagtcctcttatctttgaccctcctggtactgggtgacaggaggtgtgtggccatgccaagctagtcatgtggctgttgggaattcaagctcaggacctatggcttgtatagcgaacactcttacccactactctatctcccaagcctgttttgttgttatttctttgcttgcttttgtgttagtgatctggaaaattctgctgttggttctgctcattcagtctgatcaagaatgtcagttaaatatactttaaagaactccacatggttttctcattgtaggtgacagcaggccagttacgtctatctccacctttcagggaatgagcatctttgtattcaaatgttgagggaagcacatcttagtccattgtatctgatctcatagtttccttcttggtgtaattaaaatgagtacttctgctgctcctcctcctcctcctcctccttcttcatcttcatcttcttcgtgtttgtgtttcgagacagggtttctctgtatagccctggctgtcctggaattcactttgtagaccaggctggccttgaactcagaaatccacctgcctctgcctcccaagtgctgggattaaaggcatacgccaccactgcccggctagtgcttctcttcttgatttcatttttcttgcccttattcatgttttcacttcaaatttgctttgtcgtgcagatcatatttaggctgcctcttaaaatgtaccaataacctgatggggcacagtggcacacacctttaaactcagcactcaggaggcagaggcaggtggatctctctgagttagggaccaacctggtctatagagtgagttcaggatagccagggctttgttatacataaaaactgtgtctcaaaaacaccagccaacattggacttagcgccaggtccccaatggaggacttagagaaaggactgaaggaactaaaggggtttgcaactccataggatgaacaacaatatcaaccaagcagacctcacagacctcccagggactaaaccaccaaccaaggagtacacatggagggactcatggctccagctgcatatgtagcagaggacggccttctcaggcatcaatgggaggagaggcccttggtcctgtgaaagcttgatagattcccccagtgtaggggaattgagagtggggaggcaggagcgggtgggtgggtggagaaacaccctcatagaagcagggggagtggggatgggatgggggggttnnnnnnnnnnnnnnnnnnnncagggggagtggggatgggatgggggggttctgggagcagggacaggggggaaattgggaaaggggataacatttgaaatgtaaataaagaaaatatccatttaaaaacaaaacagaaaacagccaacaaaccaaaccaacaacaacaatcaataacctaaatacctagcatttagcccttaaacttgcttcccagtcaagagcaagcagccttagcgcctggaaggagttgaggctgactcagcgacaaatacagagggatggttctatgctttaggagtggagaatccagggtttcttggaggaaaggctggtgatccagtatcagacatagagtacggcatcaacttgaggatatgcaagggagagtcaaagcatagagagggtgggcagtgtgggaaaagaccagggaaggaggcacccaaagcacacggctgtgtttgaacacacaccccaggtttccatgtaaagggtggcccgaagccagccctgcctcctcagaggtacacatacgaatgctgactagttccagatctcagataagatgtgaatacaaagctaattctaaacaacggtaggcgctgtgcccaggcatattttctttgtgtgtttgtaaggaaacctgcttaagtgtgaagagaatcacattttaagggaggctgtgctatactgaacacatgacatgctcaaagctgtctgctatcatcaactatgagctttcagcttttggtttctttaatttcaaacttgcagtcctcctgcctcagctggataactggaactttccttctggttttaagagaaatagtaataatgaaagagtgactatttatttgacttagagttggacagattttagggctggtagggaaaattctgggggttcccctggctgatctctcccacctctttggatgccaaggttgagactgagagtccctgtcaatgtcccaggaaaggttgtgaaaggacagctgtggtggtggaggctccgtgtccctgtcgttcagcacgagtgtcacccatgctgttagagccccagagagagcagaggtttacttctatgaaaaagactctcccattgcttaggaaatagctttctactctttggcttttgtctcctcgggtctgcagttccgctttggagattgtggaaacggatagttcttgagttctgcccttccattctgatttatcctcactgatcttagtgtgaccgttaaatttagtagatattcctgtatctcatttaagatggggaacgtaggcatgatggagctgatattggggaggggtggggcagcacacaggagaggtgggtgagtaagccttggcctggcccctcccctgcctctgtcttgttctcaccttccacccttggggcacccacactgtgtgtagttctctctttggaacagagcccctctctctcttgcttccttctcttattctttggtgcacatcagacacctgctttctggggttggttggttgttgctttccccccaccccccgccgttagtcaaacctggtaatttttcagtgagaagtacaagggaagaaatggagagatgatgcgcaaggcatcttcttgccccggagcactgggtgggaaaggctgtcagccactgttctgggattgtttagggatgggttaaggggttaccaagcgtggtgagtgcctctcaagcttcactgtgccaggaggaagaggagctaaggagataattcagtgcataagagcgcttgctgcacacacgggaggacctgagttcatgtcgtgtcaaagacaataattaaaaccagctgggtgtagttgcacagggtgtacctgtgacctacagcttgtggagggtggagcttgatagctgctagcctggcttcacagtcagtgagagacctcatcacagaggaatgagtcatggagagatagagcaggacactgggcatcctcctctgacctctccatgtacacacagatgtcatgcatgcttgtaccctactgtgtgtgtgtgtactacccatatatgctacaaacacacacacacacacacatacacatatacacatatatgcacagacacacaagcacacatgcacacacacaccctgcataaaataaccctcaaacttttactgtgttcacctagctccttcagatggaggttctgaagggtgtgtgtcggtgtgtgtcagtgtgtgtcggtgtgtgtcggtgtgtgtcggtgtgtgcgtgcatgagcgcacaggggtgggactcgggggaggggaagctcgggaccacggctgcagttccaagactgagtttctgagcagcttcaggtgaaagtatctcagcctgccattcgaacatttagtaagacttacgtctgcctcccagtcactttgaagctatgattcactgctcgcagaggaagcgatagcatctaaaattagcttcttcgattgtagccactccagaagcaagggtggggtgcacttccccttttggggctccccttgaagactgacactgggcagtcctgtagctcacgtcaggtcactgcaggggcagagcatctttgcactctgccacacatttttttgctctggaggcaaaccctagttatttttaacctcacatcttgatgaggctgggatgaggttaatttttagtagtggtgcagaacacacatccgtcttttttttttttttttttaaagaaatgcataaaacctcatatgtttgttgtcaaaataggatggcatatttcataaaaatatgaagcaggataaggagtggtttataccgggtaagtgtggtgagattgtcttgttttgttcagcacatagggagtcctgggtacagtggaataagtgaggtttcattaggggctgcgaagtgagacctgctttctctgaggtttctgcaacccagaggagttctctaaggcatttagggtcctggcattagcatttctgaacaaacgtcttctgatctatctgaaaaggtgctgcccgttcacacgggctcctaaagttcagtgtgcttgcttcagggttgttttgaccacagaagaaataggatcacagttcatattaaagaaaggttacaaaaacaaaccaaacaacaacaacaacaagcaaagccaacgaaactgacacatgtggtttgggctgagttctttactacataagagaaaaagcatcattgttcagcgcccacccctgagctgtttttccctcttgtctgtgtggtgtgggctggggttggagcccagatacacatgttaagcttgcactgtgtctctgagctgcattgctagcctacttcggtgtttctaacgcatacacgtgaggagatgttgcatatttagcttgctggtccttattggggagatttgctttgtaattgcccaacatccaattgctatctagttatccagggttaaagaagacatttaaaatggcatgtacaatagagcttcttaatatctgagtttgcatgtaaaatcacaggttcagctgtttgtttttcaaatgaagatgtgtatatctatcttgccagcccaaggtatcataaatcttagtgttgtagtttgtcaatattattctcatttcttaatagcattttctccgcaagggctggagacatgattcagtggtaggctgatggtctggtgtgctcaaggtttgattgccaggactgagaaggccagcaacaaaacagctgcatttgcctggattttaatgaattagttaatgaattaatgggcagggcctcattctatagcctaggcttatctggaacatactatgtagctcaggctgacttcttagcttacagccatcctcctgcatcagcttacccagggttgggattacaggcatgagctacccactacactatgctggcacttgtctttataaatagcaacttgtttgtttgcctgtttatttgtttgagacaagctctcactgtgtcttaagtagcaatttgtaattggcttaaagtctgccctaagcttcaaacatgccctgtatgtatcttaaaacaccccattctttagctcagttcgcatttttattacaccagggaacaaggaaggcttctaatgtatggaaatgactggtagtcaggaaggaaagagagaaaatggataatgtatggaattttgtgttagtttttgttacaagatgatttttactcttgatttcaaagccaagaagaataactgaaattgtcactgatatataattgatactatatgataatatattaatataatgtaagataaagatcaaaataatctccaactatatagagagtttgatgctcaactggttacatgagataccatcttagagagagagaactgcacaatgatatagcatttagttaatatatgttaatatgtgtacaacagctcatatttcaaattccaagtaaatacttctattgtgtatatgcctagcttagctattctaagtaattgctggaagccgtggggagtttcatctccacacatggttggttcgtgagctctgcatcatccagtgtttcttctacatgacatcattgggccccaaatattctgagagtgctaaggggccctttaagttctttatgcgaagccttacttggtgtgttctctcccgagggagtatgggagaggaactttattaatagttaaaaatgcttaaaattaaattgccagtgtaaagtattttcataaaatgggtagtataccagaaaatcaaataaccccattaaaaaatggggctcagagctaaacaaagaattctcacctgaggaataccgaatggcagagaagcacctgaaaaaatgttcagcatccttaatcatcagggaaatacaaatcaaaacaaccctgagattccacctcacaccagtcagaatggctaagatcaaaaatgcaggtggcagcagatgctggcgaggatgtggggaaagaggaacactcctccattgttggtgggattgcaagcttgtacaaccactctggaaatcagtcttgtggctcctcagaaaattggacatagtactaccagaggatcctgcaatacctcttctgggcatatatccagaagatgtcccaaccggtaagaaggacacatgctccactatgttcatagcagccttatttataatagccagaagctggaaagaacccagatgcccctcagcagaggaatggatatagaaaatgtggtacatttacacaatgaagtactactcagctattaaaaagaatgaatttatgaaattcctaggccaatggatggacctggagggcatcatcctgagtgaggtaacacattcacaaaggaactcgcacaatatgtactcactgataagtggatattagcctagaaacttagaatacccaagatataagatacaatttgcaaaacacatgaaactcagaaagaacgaagaccaaagtgtggacactttgccccttcttagaattgggaacaaaacacccatggaaggagttacagagacaaaatttggagctgagacgaaaggatggaccatctagagactgccatacccggggatccatcccataatcagcctccaaacactgacaccattgcatacactagcaagattttgctgaaaggaccctgatatagctgtctcttgtgagactaggctggggcctagcaaacacagaagtggatgctcacagtcagctattggatggatcacagggcccccaatggaggagctagagaaagtacccaaggagctgaagggatctgcaaccctataggtggaacaacattatgaactaacagtatccctggagctcgagtctctagctgcatatagaagatggcctattcggccatcagtggagttggctgcatccatgagccagggccctgaaaagctttaaagcctgaaatccacaaacaactgtgccaagttattccagcaattaggatttagggataggggacttccttagaaacattcctttgttatatatttatcctgtcctcgttggttggggtacttagctgtggtggggactcgtcttgcctaacattgatatcttaccttgccaaacagaatgtcagttactcatgtatgtgactctttctgccaaggagaatgtcagttcatttgggaacttacactttactaatccctacttaaaatggaagttttattccaaatggcttcttatattggtgcaggtggctctcttatgttggggcccctcccagggacagcatatatgggcaagtaccctacaagcacatacacaggtacaggaagtgctaccgggtaattggtttggggcgagcttatggtggctaactatacaactgacttctttttttttttttttttggtaaattttcattttattttatacttttttaaaattaggtattttcttcatttacatttcaatgctatcccaaaagtcccccatacccctcccccccaatcccctacccacccactcccacttcttggccctggcgttcccctgtactgaggcatataaagttacaactgacttctattgtgactggtttccaagaaccaaagcacagaatgtaacagaatatgcaatctacttgggcacaaggaagtttccttataatagtaaaagcacaaaatgactggttagacaggccacggttacctagtccttaacagtgtccatgaaaaggtagtccctgcacctaccactcaatatcccctgcaagcatatgaaaaaggcagaatcctaggcccaccaggtcaggtgtacccattccagttgctcaagttgaacatggagactcttctgtctggtcttctcagcatctggctcccacacacctcaacaagtaattccattaaaggccatctgttctgttggtgggttgttctgttcagattttgtttttcattctgatctgtagtatgttttcctggaatcttcagtcttacttgcagtcattaattcatactgctaaggcatctggcattgggagagtgggggtggtaaatgagatactcttgctttctggacactcctggtctaatgccaaaacaggaggagaggaggaggaggtgggagaggaggaggaggaggaagaagaggagggggaggggaggacaaggaagaggaggaaggagaagaagtaaagaagaagaaaaagaaggaggaggagaaggaggaggaggaggaggaggagaaggagaaggagaaggagaaggagaaggagaaggagaagaagaagaagaagaagaagaagaagaagaagaagaagaagaagaagaagaagaagaagaagaagaagaagaagaaagttgtcattgttgtcagcagcagcagcagcattagattgtgtccatatgctgatgagatgtgaggaaagaaaggtgactcatgattggggtcctagggagacctccaggcagagttgcagatgtttggagacataatctttccaggaatctatgagacgggatctctggaacatggcaaagggaatggacattcagacacaaggaagagctttgtttgggccttggaaaggttttctttgcttggggataatggggtatttgcttacattaaagtttcatggctaccaaagtgggcagggacagctggtaaccttctgaatagtgttcaaggaatgaagcttaacctagggtcagaaagggctgcccttgcggaagctggaggatggacccagaggagccaaggagccctcttcacacattgggggtagaacttctacatccttgctgctggacctgcatgggccttcctcagaaaactcgggagacagtgttgcccccagattcatcacatttgttcaactctagtttcttagccagcaatttctcctgctctgggtggacttgcaaatgaagaagacatgagctttgtctaggtttagagttcagtggatcactgggagtcttggattgaaaactcttatatgatgatattgcaatgcgtttatcatttgctttcttccttggggaaatatctttaaatatgcctactaactggcagtatctagagcagagtgtatggtccaggcagtagtctcagtcctgtagagtagggcctgggctggtcctgtctttcatttgagatgcttcaagagaaggctgggcaaggtggttgcataccagtactcaagagggtgaggtaggatatctgcctcagatcagtcagtctatggtgagatctgggaactgcctcttttaaagacaagcataggtcaaagctactggtaaaatcctggggcagattttctttcctctgatacacccagtgcctttgatctgatgctccagtatgtaagatctcagtgactcttcctaggtagcaacttgtgagacctttcctgtttctctagccttttgaggtctttgttttcagtgtttgtttttaccctgttgattcattctcttggttagaagacagacaaacaacatggaagctcctctgtatattttcatcagttgtgacttggtacgtccacagagatgggacctgagtcaggccttctcagaggtctgccattcacactgccctcagagggtgaggagatacactgtagtaaatggtggctgaggcagttgagtagctactggaaaaaagaaagtgttctttccttagatagcaataaaattatctgcttgaaaggtttagacttactgactcataagaggagtaaaccttattagatacagcatggagcagaggcaggggatactttcctgttcccagtctaacaaactcacagaccttataaagaaaaaaaaagtcacatcaaagtttaaaggtttccttaacctttaagtttcgtgactgaaatcaaataacaaataatatttgggatgggggaaagattgtttgaatgtatgtcagagggccattgcttttgcctagaaataaatgctaggaatcaacaagagtaataagctaggtgggcttatgtcctttctagaggtatgagtgaggaaacagagtagccctcgctgtttaagaagggcaatgagggcctgtgggacggctcagtgggggaaaaaggcgcttgctgccaaatctagtggtatacaaagtatctgctcctgtagacgttgtggcagtaacaaaagcacaaaatgcatgtgagactcttagcaaagatcagaagcacgtgtgtgtgcacagcacagagctctggagtgttcaaagtagcaccgttctctcattctgtcataccacttaggaaagattcacagcgttgtgtgaaaaagctgactcgggctgtacagcatgtgtgttaaaaaagaaattttaggagctggtatgtcagtgcagaagatagtagctataaaaaggaaacaatgctgtcaaagttatattctcgtgaaaatgtccttgtgtaactcagccttatgtacaatgaaaaaaaaaaaaaaaaaagagccgagcaataagaaaaggaaagcaagccttaatggagcgtatttttcttgtgaataagaagttcacatcaccgtcaggcaggttggtatagactctcctctgtgctgtccctgagttgcctactgtgtttctgttctacaggacaaattgtatgggcccctgttctcatggtaaccagatgttgtcattctaccagatctcacatctgtccttccaggcaggaaaaaaggtgcaagggtgggggtgggggtgggataggggagtacccatatgggcatgtcttatatcaagaagcaggaaaatattgagaagttcccagctgccttgtacttaaatttcactggcttgaattaccgaagggttccccagacccgcaaggaagtctctgaaagcaaaggttttatgtaagcttgtgttctgtcttcacacacaatccaaggctcagcgagcatggaagagggcagataagagggaatgctgggtaggcagaaaggcctgggatccaagcagcctcacacccatgtctgctgacactctccacagaaggagcctgagagatggatcagcagttacctttgcagaatggctgccagtcgagaggaagaaaattatttttcactttatattgttcttttccactgagattttaaataataataataccaccaccaccactactgcatatgtgttaactttaaaggaagctggtaggaagttgatatccgtccatgaccagaacctgtgggatgcagctgttctgcaagttccttccatgcagggtcatgggccatgtgtctttagcctcagttggccaatgagaggttcacttgagtgcgtctgtggtttcttcttccttagtgctgcctccagctaagcacacaatcctagcggccaggaagagggaagactcagtttcttctgccagagaatgccagtagctcgaatggccccttaatctatgtgttgggttccccaatacatgtgtcccctccaaatgttgaagatgtggccccagttctgaagactgtggtgattgcatttggggaaaagtatctttgaggaagtaatgaatcctaggatagcccttcatccagtaaggctgttctcctcatacaactagaaatgggatacactcaacacagaggaagcctccccagacacacagaaagacagagaagttgctggcaagagaggtttagggaatccagccctgccaaagcattcatcccagtgagatactaaacgtccagtaagccctgcagcctgcacactttcacaatagccaggcactggaactcaggctggtagccttccctgctttagggagagtggttcttcatgatcttttctgctttgtggtgcattgtttgggaagatggggtaggcatgaggatggggcatgccctagcatgggatgctcagtgggatgctcacagagcatctctaacccagttttactggctctccagggcagcattaacccaggctgcctcctctgtccctctccctaacattcacagggagtctagcctacgtaatactgactgtggtctaggagcaggaaagcaagcaagctctgtcagtgggaggccagcacagcctttcttcagggcctcgatgctgagtgcctggttcctctcgcctatctccctgtgctctgacccaccagcttcacctagcttcagaatgcatgggtaccctcctgagtacccatgagtctttgcctggctctcactgttaaatctgtcctgaccagagatgctttgtcttttagagatggtccatatctctgcagtgagtgagatataagagcaagatcctccattgtatgagttaccctggaactgacctggggttttgagtgtgttaggcaagtcctcagccactgagccatagtccctgtcacccagagtcacctcataacatagagccaggaagcatcttctgtctcctacctactgtccttcccttgaacccaaagttttacacatgctacttaagtgctctacttggagttactatgtagcccaggctggcctcaaactttcaattcttccaccttagcttcccaagtagatgggattccacttgtatcccaatggtgtagaaaggtgcttatgtatggaggtgtacagcgtgtgcgtgtgcatgtgtgtgcgtgtgtgtgtgtgtgtgtgtgtgtgtgtgtgtgttacaaggtgccatagcccttcaaaccctcattccagcaatctgctttgagctgggccctagccaagcccagaggaccctgccacagccaaccacattttaaattaaaggagactggtatcttctctggggctaatgaaggcttttcaggggcatcctgtgcaccgatggaagccagccaggactgcatgcccagcaagggtagctgaagatgaacagagtgtggaatttgaacagtcagcttcctccaggaggtagccttcctctttagcctgcctactgtttacttccccaggaagtggggctggagcaaggagggggcatcctgcctggccaggagtcagaccagagcagcactgatgtaaatatttaggtctggctcaaaagtatggagtggtgagctctgagagggccccgcttggctaaatggggaaggaacagtgctcacatagaaaaactcatacctatattcccaacactcactaggttaaggcaagaagattgccgagcttgggctacaaacgaaaaacagatagacagacagacagtgcttttattaacatgaaaacttaaatttcaccttttcttggtggggatgggtgtggcttacctctgttgcttccctctgggggtattttgctgtgatggaggaggaggcttgccttctttctgtgtgagcgctcagctccgacagtgagcaccacgtggttgagctcctgtaggaaggtaataaaaatctctggtgttctgatttttttttccttttttttttttctcttctttttctttctcacctggccacagccactgtgggtctgctgaagtgtcacaggttggccttcttgggatgctgagtggcaaaggatgctgatggagacttaaggaagtggcagatcagtggctcaggagagccaaggatgtatgtgtgtgtgtgtgtgtgtgtgtgtgtgtgtgtgtgtgtgtgtgcgtgctccagttggaggttgctctacttcacattgaatgtgcacggatttgaacttgagccacctagaaaattaggtagcaaatctccctgcatggtattttaagccaccactgactatttaaagctaaatgactcttgaaataaaccagttcagtctcttccttttagagctgacaactgaggccccaggatgcatagtttgccagagaggagttagcaaaccagctccagagcccagcttctgccctttcctcctaggcttccacaacaggattctcaagttagaaaaacaagcaagcaagcaagcaaacaaacaaacaaacaaacaaaccatgttcagcataaagtcaagagctcaagaattatcttgtcataatttattagagccacacagtaacttgcaaataataacagctatcaagaaaggtacccttctgtgaaagttgcattcaactatggaggtctgttcagagagtgtacgctaatttgaggtgggaaaccagggttctggtgaggaggaaacaaagcccgtgtctccacacttcttcccggactcctctcccttacgtgcttggtcccagatccagcatctgtcttcactgctctttggtcatgggcacatcctcatttacttgacagtctcctttttctctgtctcaggcccctgactccatttgcaagcccatccccatcaaactctctggcttcatcttagccactcagttgttcccatctttgtggttcccatcatggtcctctatctccgtcttgatccacttcagtccactgtgaccctccgaatccaatgtgtcattatctcagtctcccaatgccatcccagcaccttgtccctatcttagtcccctgacttactttggctccctgactcattttggtccttctgtccttgactcatctcatccctctgcccccgttctactgacccttctccatgtccatctctgtcccctgctcacagatgacccagtctccatctaagttgctagacttgtcctggcctcttgcccccattgtgcctcaggctcttgccttaggcatggcctcattgtggtatcatctctgtcactccctgagaacaagctctctttcctgctccagaagcagctccctgcagccatacaggacctgagcacctcctcccgagtcttcactctagttgcccttcccctatctcccagattaatcctgatggtcacttcagtgtcttactccccggggagcagcgtgactaccctgcaccagcttttccccaccatcctgctttttgctgccacagttgcctgctgtagttctgcagcagacccggtgtcactgggatctcctgctaacacttgtctgtgttgatcccatccagtccttgcagcaaccccatgagctttgaagtagagaatctcaggtcagagctatcaaactcattgtcagggacccactggcagaatgtcgtagagcacagactcacctttggctgatgtgactgcactgtcctgttgatgcaagggttatctgaagctcatcagatcctagtccagcagttacccttctctgttgggtgcttgtcctagttcagcagtccttccaagatctatagtgccctctgatgatgatgcagggctccccagatacgatcccccccccccttcctctatgcgttgtagtgtggctgtgcgagtctggagtttatcagttccctctgtgattccgtgcctgctttgcatcaacgttcttgtgccttggggcccctgttagggtcaacacaggttccttgaacacaagcgccatgacctgtcaatacgatgacagggatcgatgctaacattacgaacggtcaggtaacacataccatggggatgccctgatgaggggggtaatttctgcccctggaaggacagattagatagtgagagggtctctcgtgatactcaatacgtggtataaaacttagcagctgctcatttggagaatttcccatttgacatttttggattgcaaaaaaaaaaaaaaaagggagagaaactggaactgcggaaagtcaagtggggtagtgctgtgagaaatgattgtctttgacacctaggtgattctaaggagtctggattggggacctgtctcctactcaccaatgggtttctccagtgtgggtgcagaggagggcttctctactatagtttaagatcctggagacacacctaaagaagttttaaaccattgatactgtctaatgagattttaaaaagctacactctttattttaaaaaaaatgtggggctctagcataattgatcagtggtgactgatctgtattctcccaacctcaggcatccaaaggggcttcacactgccctgaagaccacaagtctgtctgggaggcgaccatttctacaccagccttcttgtctagatagtgcttgcattctgcagatctgccctgttgaaatcttaagaaccaacaaatgcagggtggaaataggtttcctgtgagtgcccttccatttcccccgcccctccttattaagatgcttggatctgctgccagaccgccttagaggcatctgtaagcgtccgcagaagccactaatccccccacccccaccctgcggtcactctgtctccatctggcatctgcttctgcacacccaagggatgggcagggagtggctgccaggcctgcagaccccagcaggtggagagtgtgtccctgtcactgttcggactcactgactgtcctgtgtgccagctttgagaggcaggagggaagggaaggacaatggaactagaagcatctacatgcttgcaagcttttctctactactggtgctgctttgttttaatcatatgtatggtttggattggtaaagtcctcccgagtcttattttgggtcgtttgattccatgatgcaaacagtactgtagtttctgcctggaatcatagtccatgctaggccagagccaccatttagagcttgaccacaggagccactgatgcagtcctatcctaagagaaggggcaggactgttgcatgtagcttttgtactctgtctaagcttccggattgggctatgctatcagcccccacctagcttcccttgaatccatggataaaagacacacgcagttgttggttttcaacttgccttcttggcacaattgctgggttctacgatctcctgcctagaaaagtgtgcccttatcaattctcttagctctgctcctcctacctgccctaactttaatcactcagttaaatctagtccctgctaaacttccctgaccacccatctgtaggaacagcctgtgtggtctcctgctcctcccaagatcttacatggctgatcagttcttctctctccaaagcagggcaaactctcttacatctccctctttcctccagggacccagaaatcccacttgtatctctacccaacaatgggcccatgactttctttactgacagatcaagaaccaattggggagcaggaccttagcatcatacctgcctgtacacaggacccaagaaggagggccaggagagaaccataggggttgtcctgagaatgtgaggattcggctccatgaagatgggaggctgttgctcaggaagttgggggaggggtgccgtaggcgtgggggacagtacaacctcatgtatgtacaattgtttgtgtgaatggctggaggaatacattgagattaggtgatagaggccctgaataatgaggacaggtcattaacagcagtgtgtcagataaagaaatagagattgcagttatgcttacagtaggcgtatatgaggaagagagaaaattaatgatataccattgtgtggataggaaaggcacacaccaggccgatttacaaagagggagaaaaggagaattgaatacatccttcaaaaacaatgtgcgtatattaacttatgtattaaaacccgcacatatgaatagacctttatgataaaatatttagaagctaagcagtggggctggagagaaggctcagcagttaagctattcccggggtactgggttcaattcccagcatctacatggtggcttataactctctgtaactccagttcctgggaatctagtaccctcttctggcctctgtagaccatgaccaggaacggggtacacagatactcatgtactcagatacccatatacatgaaataaaaataaataaaatgtaagtcaagttgtttatattagttactttcacatgttcatgaccataatacctgacagaaacaggctaaagagggaaaggtgtatgctagctccggtctcaggagatttcagccgattattctggagaggccatagtggaacggtgcagtttatgatggtagaacaggagagaaagctatgtgtctcacagctgaccaggaagcaaatagcaaggcaggaaccagggcgagggataaatttcaaaagctcacccttgatgacctacttctgtggctaagctcacttcctacaggttccctaagctccctgtcagccacttgctagataacaaacattcaaaatgagagccagtggggtggggggggggggggggagaaccgacccatcaattccaaccatatagctgttctagggaagacacagaaaacaattaaattcatgcagttgttggtcgatttgaggatcagggtggccttgaactcacagaaatctgcctgtctggctctggcttgagtgctggtatcaaaggcgtgcgctgccacacccagtgcggttattttgagctttatttttagtagtacaggctgtaaatggtacaaaaggtctgatgaggaaatgaacaccatcatttctgccttgccatgaatttcctgtcctggagcagtcacaatggcttgtctctggttacaaggtacacaggggctacatgcgtgtgttcatgcatgcatgcatgcgtgtgtgtgctctctctctctctctcatacacacacacacacacacacacacacacgcacacgcacgcgcacacacacacacacacacacacagagagagagagagagagagagagagagagagagagagagaaagagattgagaattaaatggtaacatattataaacactgttttgttcactgctttgctgggtagagaactcaccagtccttcctcgctggctgcgtgatgtcaccacacggtgagaagtggtttcatctaactagagttctgcattggatctggtcacccacctcttctcagttgtttgctcagaactcagccctgcagtgaatcctccggactgcacccgcaacgtgtatggatatacccccacaacatatcctgacgtagaattgtcaaagtcctgcctataggaaacctatggcagagtgaagcctccattgtacacatgctactttggaggcagaatggaatatagattttagagaagcaagcaggaacattgaagtacttgcaaggactactatctttccagaaattacttttgcaaatagttggattttctacattttagttgaactaaaatctaaggaaggctttatcacactgctgctctgtgctgggtctaggattaggtcggtgctaatgtcatcgtttaaattcctttagcattgctatgagatatatgttaggcactttctgctcacagtttgcagttgggaaaaccaaggtctagaggacccagtaactttcctgagttccacagtgggtagggttataagccatcttctcaacagacagacagacagatggacagatagacacaacatacacatacacacataccttaccccaattagaaatttctgcaaacttgctattatgaaaatatctgaggattcattgaacaatgaagtagtataaaaatcaagttttacctaaagttgtcacatgactctgtgacgtagtgtcttacacttttaataggttcatgcagcattcagaaacgacttgatgtgggttcatatggaatacttttaaccatacaggggctgcattcttggtccactgactctaaaacagaagatgcagccctaaaacaaacttggccctggttcaacttccaggctggtccaaaaagcccacagtgaaagacattgatggtcataattccttcaaaacctcagtccctagcagaatccaagacaggctagagcttcagtggggaaacagggcaggcacactctcccatgtgtgcacaggagcagagcttgtgggcactgaggccaccaagatttgttgagctgcaacccatgataccaggtcacagatgccccacttaggtcactttgttagaggcctcagagacagacatgctgaggagaacacagtcactcactgtttgaaaaagcaagcatcagatggtgacagtctgcacattgtcattttggatagcttcattagattgaccacctctaagacagacaggctctccttcaagtgctaaggtgtaatttggtacaatttttcagctcaagagacaaagtgctttttattttattattatccttgcttccataaaagccagggaaagattctcccccctagataatagagaccattatggcagttattcatttttcagttcaatttctcaaaaatggtataatttttagagcaggcagagagaaaaaatagtgcccgtttgagctaattttgttagtctcacgctaactccttgtgtgctttgatatgaacggagacagtgtcctcacttcaaaccacctgcccactctcctggaagattggtagaatatggctcacgtttaagttacagtacctctaacctcatgaaaggctaagtgtcatagagagaacagaggaagaaaaagtcaggcttccctgagttgacttaaggtaggtgagctgtttaccttaaatagtacctcttctacatttacccttagctagtcattagatacgtgtctatatcactgcttccctccccgactagaacttacaaccatcaattatccttagctctttggacctacagcatttaatagccattgataagtggtggtaactctccgttattagatactatattgttattaaaccacttatgtgactgtacggctctacttgggtttggctcagcagggcatttttttttataaccatcacagtgagtcctaaatgaaatagccataaatagaggctagcagagaatctcggggggagggggaagatatgtacttgtgtggcgttcctgcctttccgaaaatgtggtctaggagatgccccagttccgcagtgtagaacttctgggaaagagcagacaccatgcgttcctcctgcaatctgtcaagcatttgatgttcttgaacacagtgcctgctatgttctgactattggtgtcccctcgagtctctaggtttggatctaagacattctgctgtgatactgaaaggcagagttattcagaaatggttctgccctcgtggttggaatgagtaccctcattaaaaagcttgagcaggctacctacccctcttcagccgggggagggtacattggcatagagcagagagctctgatctgattggaatcccagccaacaggttacttctcatctttaatgaagtcagtcccctttggtggcctctatcctgctttccagacccgagtgctttcatgactgtcatttacctttatatgtatggcttcggggttcagtgtggatgcctacagcccatttgctgcttgatttatgcccgagaaatgaagacccatgcatggtgatacacacctacaactccaatactgaggaggatctcagttccagggccagccttggatacatagagaaccaactagaaagagaactcactcttgttcacagttgcagccatcagctgtcaaagctaaggagtcttaggagagtcgggatatgtcccttctcgatctgtttacacacgtggatggcattcctgtgcaaaatagtgaagtggatctgggtgaaggttccttttggccttgaagctccgtgtctatgtggtttttctatgtcttccaaacccttaagagtcccccaccccagctccaattttcatcttcctctcttctggggaaggagggggtaacgttaagaagtccctctgattccttgttaggagacaagaagagaatgcatgtctctgaacatcctgagagttctcagttccttcttcctattgcaaaaccagaatgacgctgataagacccacaggccagctgttcagattgcaggccataaaacttcctttctgctgacagctaacacgggagagtggatctctgagtccaaactcttctgcgcaggaatgcatgcatcaaagtctctcttggagcctggatccttttcccagaagtaggtgacaggctatgtaaatgaagagtcacctttgaaagtgtgtcagcccctgcagagcgagcattttttatgatcttgctggagtgtgagactggaagactgaggggtgggtgaaagactctgctctttccccccctacccagcctctcagcacactttgatctgcactgcctgtctaatcctccgccaagtgcactggaactttagccagagcaggaaaaagagaaatagttttcctttcttgggtggatttgtatttatataaacccttagccctgaaaatgagccaagtggcaggcccacgctcagagggaaggtgcatgggactgtatgaatggcgggaagaggcaagggccctctactcctttgccccctagatggatgaactagggtcagagggcatctgggactttcaagggccaaagaggagaacagggtatgccctctgtatgtttgaaagacacaataggggcatggaagagcaaagctcttggtcctaggacattgcccctgggtatgcacacttgctgctgtggatggtgtgctgcctataggaaggagcagctctctgcacacaggggagagcaatgttggagaagccttaggagtcctctgatgtcagttgccatgttggtttatttgcatgaacttgtggggagtgttgttgttgttgttgttgttgttactattagaccagtccttcctcttctttggacagagtgaatttgtcactcatatttgctattggttgtttaaagatttcttttcctgtttcccctggctctgctttctctaggatataaggtgacttacttttggactctacagaatttagattctcttgtgggatctaaagagggccttggttccttgccaagccatatcatatctggactagtctgggacaggagaagacgtaggggatagctagttgaaagtgttggttggcactttcctgctgtttcctacttttgaacccaatccagagcccttcatcatgggtgactctgcttccaacaacttcccttgagccccttctttctccgattgattcataagctcaggatgagccctgtccatctgctggccccagatgtttattctggccccagcactattattttgtatgtgttagagccttgcacttcaaagtggagtcgtcctgaagtctccacctgggtctcatcgctaggaattctgggatgctcacacttgaacctttgttgtgtgtgaaggaaagggaagttcatatcaccaagcacagggaaacactgaggcttggaagcaaacccagggaaggggcattatgaaaagggagagaggctagccccaggtccagtttggaaagaaactgttagtacctttcccccttagttctcctgggtgaagttttcaccacatgttttaggaatgactctgtgatccaagggtacaatgctctatctatctatctatctatctatctatctatctatctatctatcatctattcatcatctatcatctattatctatccatcatccatctatctatctatctatctatctatcatctattcatcatctatcatctattatctatccatcatctatctatctatctatctatctatctatctatcatctattcatcatctatcatctattatctatccatcatccatctatctatctatctattaaagtatttatagggaggggccttggtttgtgatgtgctgacatcagatagtgactcagaatatgtcatctagaccgtgacacagttaatggcaaacccatctgaccacaaaattagcaccactgttccacgttcactcagaaacatggagttgggcacatgtgtcctgtgcatgaggggagatgcattctttcacacacaaatggagcattcctttagcctagtctatcccagcctacagattccccatcctacctcccaccagctcttctctgtgctcccctagtggcattttcctattgttaagggttctttcacacttagcccacagataaaagttggcttgagcctttctgaagacattcctgttaatctagaagagccgtgggtaattacctctagggactccagcgaccaaatggagctcttctttgattagtgtccacgagataattagtgtccctttcttcttgtctctgagggatgaagagaaccttgtgtaataagtgagcaagagtcaagcaagctgacctcgtttgcccggatgggatacctgctacagaaggacaagcaaacagtagcagccacttgtacccaaggcattgctcagtgggaccaaagggtggtgtcttagtcagggtttgtattcatgcacaaaacatcatgaccaagaagcaagttggggaggaaagggtttattcagcttacactttcacattgctcttcatcaccaaagaaagtcaggactggaactcaagcaggtcaggaagcaggagctgatgcagaggccatggagggatgttccttactggcttgcttcccctggcttgctcagcctgctctcttatagaacccaagaccaccagcccagagatggtcccacccacaaggagcctttcccccttgatcactaattgagaaaatgccttacagttgtatctcatggaggcatttcctcaactgaagctcctttctctgtgataaccccagcctgtgtcaagttgacacacaaaaccagccaatacaggtggggatgctttgcgattcacccaggaggccatggttctgagctttctccttctacctgcagctgtcacctgtcagcactttggaacatgctttgaagcagttgaaaagttagttcattgcttcctgatgaccagagcataaacactcactggagatagaactattcagagtcaaagtagacgtgaactaaaaaagagaaaagaagtgaacaatttcttcacccttgtatgttgacgagagtccaaggatccatgaagaaataaagtcactggtttagaagagggtaatgattttgttttgttgttgttgcttggctggtttttgtttattttcttttatttcctgtatttatttatcttgagatagcatctcactgtgtagaccaggctggcctcaaactcaagtgctcccacagctagctagaagctcaccgttttttgatactgtaaaaatttgcagttgcctttcaaattcacattgtggaatgtgtccagctattaagtggccctgtcttacttgagtaagtgtccgccattaagtgtcttacctgagtaatttcaaaagcagccatctgagctaaaccctatgaccaggaacaatataaccccttgaaggtttaggaactgctctgagtctcagaactccttaaaagaatgggtggcttagatgacttaatgaagggccagcagatctctgttgattctgtatgtgccctagccaatttcccagagagcccagggcagctgtctggagtgtggagcaacttcccaaggacccagtttactaccccattgagattctctatggttccgcagcatgctcactcttcgtatggattacttttatgtcattgtgacataagacttgccagaagcaagcacttacggtttagacagtgtatacccatcaaggtggggatggcgtgatggcaagaccacctcctgatcaatgcagactgaggataatacagcaagtcactttgcagcagcagacaggaaagagagaggtggggaggggcaggggaaggggctagagggagagggagagggagaacttggctccaaacagggctaaactgaaacccccggaggctggcccctaatggcccaagtctgccctacttctcaaaaataggctacatcccacagcctgtcaaaatagtgccacctgctggggaccacatgttcaaacctaggcgcgcctgtgaggagtatttttgcctttaatggataacaattctcaacttgttcccacaccacaaacatagcttatgtgagatttggtgagcacctgagcacagttccagcctgctagttgatcacttaaatgcagcagccaaagtccaagagcacacactgtctcttgaggccagaaccccggcctcttggagtatcacccccagtgccatgtttcttccccccacccccaccccgaatatttcttcagcctttaatgttctctcgtgttctcctcagctattaagtcctgcaggtagataatattcatctctacttatcaggactctgtaagtctatctcatgactacactttaaaaaaaaaaaaagatttatttattttagtatgtgagtacattgtacctgtcttcagatgtaccagaagagggcatcggatcccattacagatggttgtgagccaccatgtggttactgggaattgaactcaggacctctggagagcagtcagtgctcttaaccactgagccatctctccagcccccttatgactacaccttaactgagcctttcattcactcactaaatctcttttcccttatggcccacacggttgttttttccccaggtatctgtgtaaattttacttaagttctagacagctttgttgttttgcatggtgtttataactggcatcttcaatctagatccagttgtttgtactgaacaaatattttgactttcaacacaatggcttacgctgttgctatgataaatgtttagtgttctgcataatatgcccaatagtggagagatctgatgagagaggagagaagaaagaggctcatttcaatgatctgctgttgatgttttgaaatatcctagcaggacttggtgttctgttcttcgactgagggaaaagcagttgctaggagtcacctgtcattctcctggcacaaatcttgagcccaagtaatgaagcaattcttcacagggttgaggcccacaggaggctgcatagtagtctcagcagacagtcagcttcattcaggaggcccctgacatctgtgtcctccctgatgaccacccgtgcacactttctcagaggaagaagagagatcatcctttaaagccaaatgtgaaacgagtaaatgattaagtccatgcagtccctaagggcccattcactctgagtccacattgaatgaagcttcaagacagatatggaaatggcagtctcataaccttctggctctacaaggcatcactcattgtagtgggccagagcagcattgccccatagcaagacacaggaggatattcccacgtgtctccatattgtaaacagagtaatgttataattttttgtcagaaataaagactgacttcctttaggcaggtttgtctgtctgctgcgtgtagtgtgtgtgtgtgtgtgtgtgtgtgtgtatacacaaagatgaaaagaggtattccaagtcccctggagctggagttacaggtgtacagagctgcctgaggtgggtgggtgctgggacccagactctggtcctttggcagattaggaagctctctaaacaaacatctgagttatctctccatccccataagcaggctttggaaagcagaactataccaggctacatgtaattgttttacataatctgctgctatactgccctatgtaaatataactatttatagtgcccacccactctgggaattatcactttggcttactttgctatggatgacagacgtgtaatagaatcgaacttttttacttgaatttttttatatttctggtgaggcagagttttgcctgtgataactgatggtctaacctgaattgcatgctttcattgtgcttggatgaattctttatatatttggaaaatccagtttctatagaatcttattgctgcaagcttatgaaatgtcagatagagtgtttagcattttttgtgtgttatctaatttaattatcacagtatctctgtcacagggcattctgatatggtgtttaagtattgaattgggtcattcttggtttaacttctgataccactgtttcctcttgtgaccattggtaaactttatatatcctgcaagtcttcctttgtgttatatttttattttgtgtctgtctgtctgtaccacctcactgtctatatgtgaatgtatatatatatatatatatatatatacacacacacacacatatatatatgtgtgtgtgtgttatgtatgtatgtatgtgtagtctgtgtatgtgtacgcatatgtgtatgtacatatgtttatgtgttcatctctctatgtctgtgtgtgtgtctgtgtgtatatttgtgtatctgtgtctgtatgtctctctctctctctctctgtgagtgcatgtgtgtagaagtaagaggaagatgcaggcaccattcctctctgggttctagggtttgaactcaggtcaccagggttggcaagcatctttacactctgagccatcttgcctgcccagtttcctctcctatgtattggaaataactgtccctgtcttacatgcttgtaaggattgagagagtgcatatgtgcaccatcaagtacacagcacacactcatttaatatccattgagacagtgggcattttctctttttttccctgggttaatttagattgagaaccaccactctagctggtataatggaaaagagccatgggctacttatgaagtaaagggagatttatttaggcttagaattttggagtcaaacctaaggctaggcagcccattactttaggccttgcacgccatggcaggagcacacgggcgagtaagtgctcacttctccagccaggaagcagggcgagagactgactcagggtccacagtctcatgggcatagctcaaggtctcagctttgaagatcagcagcacctacctaccagacctgccaccctggggatcacattctggcctctgagggggcacccagctctaaagaaaaccatctagctggctctatcacagctgatgtttttatagaagttggtaaccaaggcttaaaggtatttgaattatttccagttctgtgccttgtgctcaccaaaggctacagtgttgcctacagtcaagcagctctgtgtggttggtgccagggacccatgcatggggtagggctcagcacctgcggtccttatctgggtactcaggcagcctggagcagatgaagctgaggtctgcacggcatgtcaatcaactaggagagaatttccactggaaaaatagggatgcccggcttgtgctcaggctttgggttttaaatgaaaaaaattacacctcccacccacatatgtagcagatgtgcaacttagtcttcattcgggtcctccaacaactggagcaggggctgtccctttatttgctgcctgcccatagatcctgttccccctaactgggccaccttggcctcagtgagagaggatgcagctagtcctgtagtgactgatgtgcccacctgaggggattgtacctggccaggtggaggctcttctcagatgagaaggggagaagggagtgggaggaggagcttcgagagggaggactgggaagaaaggcggcctaatattggcatgtaaagtgaataaattacttaattttataaaagaaaagaaaatataccaaagaggagccaggaccatctgaaagcactctgtcctcaaggccctggtagtactgtgagtcactgcaggctgcttggatttcccagactcgcaactcttagcaactctgttaaaacgcagacatctggcttaaccagtgaggctaggctggatggcttccaggagtcagccagctccggcttgctcttacttgggtccattatgttcctttgaccccatttaatgtttccatttgtagctggcctctttctgctgttgttgctcatctcctagtaggtattggaggacacacagttctgacacataggtatccacaagaccagctcatggcgctaaactaacatttgcaatagcttaatattggcagtaacttggtgagtggactaaaattagattcagttcttattatgcaaagacgcagaaaaatgttctgcttggggaatgaatgtgcctctaaaagtataaatacgtcagtgcctaaattccttttaaaatgatgaagttaggcagcccctccaggaaagatgcatcctggttagagaagcagtccctgccttagggaggtgctgaagtctggcagcacagggttctcccatgccttctactagttaacccttgttgctgggtacatctcataacttccctgagctggcttgttttatgtctgtttgacccaagacatagtcattctggaagagagaacctcaactgggggaaaaaaatgtccccaccagattggtcactggacaagcctgtggtacattttattgattggtgattgatgtaaagggcctagctcactgtaggacccagcactgtgggtcatcctctggcctggtaatctaagggttgtaaaaactaggctgagcaagccagtaagcaacattgtgtatggcctctgagtcatctccttcttccaggtcccttccctgtttgagttcctgccctgaagttccttagcaatggtgtgtaacctgagagttgtaaggtgtaataaaaccttttctctctgacttgtttgtggtcgtggtgtttatcacagcaatagaaaccctaagtgagacagcagattcttcatttgcaaaatgaggatgtgctgcccgctcagtggggcatggtaagcactgatgtggggtacactccaggattctgattcagtgctggcacatgccccgtcattgtgagctcagctgaagaagaggtgttcagaaatacagaattttaagtgtgtgtttgtgcgcgcatgcatatatatgtgcatgcttgtgcgtgtgtgcatgcatgtgtgtgcatgtgcatgaatgtgtgtgtgtgcgtgtgtgcatgcgtttgtgtgtctgcctgtgcatgtatgtttatatgcatttgtgtgcatatgtgtgtgtgtgtgtgtgtgtgtgtgtgtgtgtgtgttgcacgtggcatggtgggtatatgaaaacaggacacccttgtggaggaggttctagggaattgaattcaggtattcaggcttgctgaaagtacgtaaaacacagaagagccaccttactggtccaaactacaggattttaagcaaaaggactttctctcattatatgccagcatagactctggagcgtctagaacttcaaatgactacccaaactgatggatttcagtagggtctttctccgatttggcgtgctttctgtatccttggttggagttatttactcctaggtctgagcagggctgccagacagaaacaaggacgatcaagagccagatcctgtcaactgagtactctaagtagctaagcctgtgcggctggacctgaggaccgaaggaggaaggacaagttcccagatgagggacctacgaggaggaagctaaggactggaagtcgctgctcctcccaaggagtcaatgatcttactgcagaaagaggatgggcaggtgtggctagtgtctgatttcctagtcccaccttagtcatgaggtaatcctgtgtgctttagaatcagcacttgggaaattctcctgctccaggatgctgggctgtggtcctgctgtttaccatgtaaacaccttgagcctgccatgtggccggattgtttgcacagagctttgttttgagcctgctaactctgcggaaatgccccatatgcctaaattttcattacgagtccctggttggtagccctgcctggctgatctcaggaatcagtctgaaaggaaaggttcacaggtgagcagggtcgtggtgagtgcttcctttgtctggagggtccacctttccactaccaccatcaccacttaagaaccctctctgtggtgatgcactgaacatcccagcaactgaagctagagctctatagtccagccatgctggccacatgttggtcctccatctcatctgaagtctttctcactacatgtcttactcctttgaaagtactgtatttctctgtgtaaattagtcccactctttggggcctatttcctaatgaatttctctctcttctttgcaggggagttgctgagccagcccaggccagaaggggtggcagagatcatctgccccaagaatggcagcgagcgagtgaatgtggctttggtttacccacctacaccgactgtgatcagcccttgttccaagtgagttttcaagtcccgctggccctcgctccttgctgcagatgctggctctgtagttgtgataacccaaagccaagttcaacagtgtgtgcctaaactgttagaagccagttatctcaagcagcaaaatagaaatgtattttcctcatgatatttaactttgctgataaagagaaattaaagctttctggatgtataattcataaaccacaccagtttactcatttaaaaatgtaatatatagattctcggtttttagtctattttcaggtatatataaccaaaagtatgtgcccttctctcaatagcattgatgcagagctttgttgaaaaggtattagggtccaactcttgtcccaaatgagttcttaactgccattgtagaattaagtgggctttccttcaaaggatagcgaggggccgttaaatcagaaaagcctgcagaaaatctataatgatccaatttttcagggggctctgattctttcatcaaagcaaagactgtgagctggctacaaccttctccccaaatggactggcagagcatgcaccagtgcaaataaatattcatacaggatgtgtgcttcatattctagagaagacacagtctgttggcttgagggatttagttatgctttcatcattctagaaagccaaggggctgcttctgaactgagatgaaatgactctaagctgctaaagcatcagccacagacctttcaggcttgaagctcattgtcgtggggatagccccagtcacatatccgccaggtggccatagtcatgcaacaggctttagtttttcttcctggtttattgatcatattgtatccattccccctgctccccttctcttctcttctctctctctctctctctctctctctctctctctctctctctctctctcacacacacacacacacacacacacacaccacacacacacacacagagacagagacagacagacagacagacagacacaaccatatacacacagacacacacaagacatatatatacacactgagagaaacacagatatacatatgtgcacacacacacacacacacacaaactcaggcacacacacacaccaagttagtatagggctttagatagtttaggcttgagaactgtgacctctctatcatcgtccagtcaatgtaagtaggagggtcaaaccggactttcttcaccaggaacttgctgtctggtcacatgccagagctctgtggtaagagtgtcatccagacaggggcagctcccttcctgtggtgtgtgcttcctgtacattgggtctctgtgatggtataacacatcagcagtagaagggaaggcccctatttcctccaaactgggcattaagcaaaggctattcaatagacctgtgctggaggctaacccaacatcctaagagaaatgcttctctaacactagattccggatactcttatctagcataatccatcactgaggtcaccctaagaaattgaggccatgaaatacttctcaggtttcatgatagaatcacacaagctcttgttaccctgtatctctgctgccctgaacatgtcaaggcccaggcattgtcctgacttataatttctttgagtctgtgcctactgcttcttgcctttcagatacaccagggcagggctcaagaggtattatagaagcagggtacaggacacagtacatactttgtattgatgtaaatgtccctgtgcccctagagacactaatcaattgttttcatatggttccatgctgtttaataaacaagctagacgcaggagttaaatatctgcttgggccagatgccctggtggcacagagccagttatcagtcattcccatgggtggcttcttgttctaccacagtaagaccccttttaccagcctggaaaaaaagccatgttatcagcctctccctgacagtttattgaatctaaatgaacaaccagctttgaatttgggtgtcatcagaattgacttagacctctctagtcgtggaagggagacaccattgaggtctgaacccctgttgttgtagcaatgatagtgtcttggctgtataattctcagctctaaatgaaggactgctccctaaatatgaaagttctgcatccttgataagattaattttttagtatggagacaagaggaaatgatctctctcatgatcacggcataaaagctagtgtttataattcaattagaaactcatgccctgaagcatctacaacttgtagtcatgagcactaaacaaaagcaaacatccaggataggccaggcccactgaatgtccaagccacagatagcattctaagggcttagccattgagtcatatggttttggtctaaggcttaggcttggtgtccagacaccaaaacactgcctttaagctctagtcacctaacttaagtcgctttctatgaagtgatctctacctctatagcaacccatacaatgtaggcaaatgggcaaggccagcctttcctcacagggcacacgcatcagaataatggagagaaagtagctaggtgtgcatctttgaagagacacagacgtcactcggctggttctaaagtacatgcattggactttagctccctggccttgcctctctaagggtgggtggcctctcagccaggactcttgccccttctctgttggagcagtataaagccaaccacaaagcagaacctggcgcatgcagtcgtagcatggtcagagctcctgtctcttctacacttgactaggctgctaattctgttcacggttcatatcaagaaagtatgagtcccaggaatcctgttcatcattatattgggacagcaggtgctaaccccaacagttctaggtaccagaataaacatcccattctatgtcatcgacattgatcttttaatgctttgggggaaaacagggtctctccaagaggttttctctcccctcagatattagagactcgacatttaatgggctgcctatagccatatgtgaaatagtgatgctatatagtttataaacaaaagaagaatcagtagttgttatttggtacgtcattatgaatcccaaacttttctatttctcatttgaaaaaaaaattccaggtataaaattttaaaaacaacaaaaaggtgtgtatgtgggaggagggggtgtagagatgactctacagttaagaatgccgactgctcttggaaagaggatctgagtttggtccccagcacccatatgggacagctcacaacagtttgtaattccagcttaagtgacttctctggcttttgcacctgcttacacacacacacacacacacacacacacacacttaaaagtaaaatttaaagtacaaaaatttccaaatgtttcttccctatgaagagaggtacaaagtaaggagtaagtagtaggtcttcaagttgagggtcatagtaggtcttccataaaggctccttctgtatgtgacttatagctgtgacttttgggtggtagaactctctccccaatttccattgagaagaggtttcaggagtggatgaaaagctgttcttctgcctccccttctcaaaccaggggagaagcagatgcctggaggcacctcgtgcactttgataatctctttgaatgagggttatttctgcacctagtttgtgtcgccagtgtgtttagtgtcttcttccagaatggttttggtggcttgtgtattgatgttaatcagattcttgagtatgaaataagttctcataaatcctttgttactggcacagttcagtcgaaagggaatgacataacttggtaccatgtgtcactcgtagccccttgtttcctgggtgatggaggagaagtagggtaccacggagggaggtagggagcttccttcagaacttcctagttgtagccttttgatagttcagcagtcaagcatgctaatccctggatgtgaggaattggtaactacatggggatcctaacagagccccaccctgtcttagacaccagaaacagaaaacactcaagtgactgtagaaaacggcatgagatgggcctgtggtacttgcctgtaatcctgattctcaggaggatgaggaggatgttgagttctgaatcagcctgagctacatagtaagactctggctttgggggagtatgtgcggggaggcaaaagaatttgatagttaaataaaatgacaggactgcataggatcctgcatactttaaatcacctctcgattactttgacacttaatagaagtactctagttgctacatcatatcatttggagaataatgacaggagaaagtacctgtctgtacagatacactaactccatgcaacagtgtttccaatgtgcagttgttagaatctgaggatgcagaatctcaaggtggtgcaagaagaggctgactagactctccctgggagcagtagagagaaaatagaaggataattgtttttttacactttaagaagtgtctagaatcatttaataattttataggcatattttgatcatctcccagtcctccccctaattatttctttctcggatccatcctctcaacccctcccaacttcaggccctctcgtttgtttgtttgtttgtttgtttgtttgtttgttttaaataattcactaagtccactttgtgttgccccataggtatggaggccatctgtcaagaccacccccttaaggaaaactgattctcccccagaagctatcaactgtcaggagctcagataggggaaggggactgtgaatttaatggaagtttccctatacgaggaatgatgttcttctcaaaagccataaaatgccaaagaaaaggcccagtaccagatgaaggatatctccccttgggttgttgggggacttcagtgtcttgatgatgcccgaaaacaatacaagctattgccatttgcccatggttatttatctgaacctgatgtcataaccctgttgctgaaaccaccatggactttgatcataggatgtagaaaaatcatgttggtactaatccggaagcttcttactgctcaaaaccttctgtagtacagatggtgccatgtaggcttctggagaaggaaccttaccaacagtctcacccattgatgaactctgggtgctgcaattcatgaccatcatggcagaacaggttcatggaagcaacagtggtacaactgttatgggtgtaaccaactgcttccgattagatttaaggcccacgtcacaggaggaaacatattcctggtgctatataaactggctaagaactcatgattggggagctcattgaccctaagggtgaggctactactatggtcttgtaagtagacatcagagtaagctacactctaaatttgtgtttctatacctgtagattggcatagttctcagacttcatcagagaagtatctcaatgcagaagatggctgtcactgcaggatctcacatctggttaaaatgcagaggttaaatgcctgttgagtgccctgttacaaataggacttctgtatcacactcctacccacagtgcttaggggccattgtgcaaaggggtcagaatgaatctgaaaagccagagactggagagaaccaaagcaaaacaataccttctggataagagagggctctctccactccatggactcacaactggtgtgatgatctagaaactagtcaacattacagagtcttttgcacgtttgtttgtgaatccctggctctgggcagtctctgttcaggttgagacacttagtgttttagtttacagggtgtgtgaacttctaggcacatgacaagatggtcagctgcactttgtttttaggtggcctgtacctgaaagctgtttctttttttctttccaaagaaattctgactggtgtcctccttcactaactaaagtgtgggtactctcttacaacctaaccccaacttggctactgtgagaaccagaaagaattcaacagactagcccaaaacaaacaaacaaacaaacaaaacacattacctctgcacactggcacaccacccatgttcatttgtatggtttttatgggctgaccccaagacatgcaaggcagagggatgtctccactcttattttctaatagttgacctttctcttagttggtccctcatctgtgtgctccatcctgtaggaatgggagggcgttcatagagaataaagaagtcaattctaattttggcagatggtgtgctaagagaattaacaaaagtattctaaacaaaagccagccttttctggcccggaaatattgagctaagcattttcacgttaacaatagagggcagagctgagatttgcattcaaaactttttatttgaaaagccttgatgattgcctgtgcctggcagagttcacattcaagtgagaaccccactagatacccacctttcttgctattgtaagtattctataaagtatggtgatagcttcatacgaggtctgcagtgacattgtcatgacataaggataattaagatccactgaaatatccttttatatatataagtagggtgaagattgtggcctgtagttcaccaaataattagtctaaaatttcgaagccctcccccccacctcccggattagctagcatgggtttgaaaacatattttaaggagaaatggagtgacccgaatttggctttgtcacagtggaccgtgttcattgattacagaattttaaagcagaagaagtgtgtgcattggaggagatgcatctggtatctccagcttagtgtggagtggcctgtttggaagctccgtgtgtttgatttatttcttttgtccctggcaaggagggactgattctcccagtgcttggctgccttttccagctgggaggaattgcgtgtcttgaatcctgtagtctcccgtcagctacattgatactggacttctcccctctctgctcaggtatctccatactttcttggaaaattaagtggaaaggatagtgcttcttgccctctgccaccatttttactgttcccactctgtgactttaggagcaccaagttttaagggtaagtctctgggaatcagagagtctcttgaataggtgtggcgctaagaccatggagaactgagggatgacacggggtggattgggaatgaagagagtccagggggcagagagcccaaggcgctctctgttcagcttgtctggaatcactcatgctttatgctcggggtagagaaaaacagcaaaacgctccattctccacttaacttagggtagtgtgatgagtcaaatgatcttagatctgcgttggagaaaacgtgagtgtgtgtaagtgtgtgtgtcctgagtgcttgaattaccagcatgggccaccctgcctggctactgagcaagcttcactgttagtgttgtgttgtgagacatcaataaaatgtagatttgtggaggtgcttttttcacgaggtcatctccttgaccaatgtgtcaggggcttttactctgagggattcttgtctaggtgttacaggtattactgactaccacatgaaagagtacagtgtgccatcatctccttcttatgagaacaggggtaggcaaaaccatctaaaagtaacacacacacacacacacacacacacgggggtgcgggagagagggagagggagggggagaggtaatttcaaacacagcatttaatataattgcatagagcaaatgaatgttcaataaaatgtacctactgttgtttctactaggaatatatgcagtgtacactgaagggcctagagagtaaaaactctaaacaaaacatttctacaatgtgcataccatggtaacaacctacccactggtttataggcacttataaactgataagtgtttatctagacacttattaattaaggggtctgcctatataaggcaagtgtgtctgctggataagtaagaatcatggttcccctttctccatctccaagggagagtagataaaaaattgtgatccttaatgcctacccctgtttgcatgaaaaggagatgcgagtacattgtgctattccatgttgtagtcactaatacctataacatctagacaataatccctcagagtaaaggcccctgacacatggtccatgtcataatcctgtaagtcatacaaagcagagaacagagcatcccacactccagctactaatgcacaggtctgccctttgccttaaagcccgaggcttcagtgctgttctcacggtgccagatgctctcatccctgtgtctactttataacaaagtaggttcccactttaaaggagaataaggctaaaaggtcagtagacagctgacaccacctgcagagagtggggacaagctacactcgggaagcatgggcttgctcctgggactgggcaggaagagctgtggcaacagctttgcttgtggtttataaggcaaggcaggcatgcaagtttaggattggctggtgtggatgcagaggctagttctctattaccaggtcctggagggatgggggcaggctagtgaaccagggtgtgaaaaccaataaaggagccggtggcctcttcatcatgacctggctggtttaggtgtagaagacagcgctggcaggcaagtctgtgatgctctctaaaaaaatggattcctccaggaggaccagtccctccaggatcatcaccctctgcacacatctcaaagtacagaaaatgaaaaagaaaaaaaagaaaaacaattaatgcacactacggttttcctttcagcccagatagccaaatattatgagccgtcatttgtttttacatctagagttggggcaggtgctctaacctgggaagactctaggcttcatatagagccttctcaactccttatctcatgtaacagtaccccatctgctggccctttggatgtcctatggcttcatggtggagaactgcgttcaccccttcttctcccagaggtcttcactgctccatttctgtccgaggtgatggtagaattttatacctggttgtctgagctaggaatctgtcagatttaatagcttccacctatatagtctgccaccagagtatttgttgatcttatcagtgtgcctggacacaaataaaccttttctttagctctatgctttcctctgactctgtatccaccaagattcctgtaattgaaactccttaactgatctagtcatcttatctttcaaactgatacaaatatataagattttttttaatgtgtatgtgtgctttgcctgcatgtatgtctatgtgccatgtgtgcttggtgcccttggaggccagaagagggaattggattccccagaacggaaagtaccgacagctgtgagccccatttaggtgataggaaacaaaccagggtcttctgaaaaagccaccagtgctcttaaccactgaggcatctctttctagccccctctccaatatttatgttgtgatgtcagtgcctgtcacatagatccccttttaaaagccttaagtaacttcctggtgatcgtaggctcaagttcaaaaccctaggtgtgactcaaaaggcccttcatagacaccttctctgctaacctaagagatagcccttcaactgaggggcagttgagcacagtggtccctggctagctctcagtcctcagctgactaacccctggttcccttaccaatgaaagtccattgcccctgaagccaagggtatgtgccttcttttcagggaagccacgattgctaactctaatcaattattttttcctgaacacttcctcagtgtttttatactgtttaatactatactattataggacagagctcacagtatcggagccactttctatctgtggcctcccccttctctcctccgccccccccccatcttactgcttatttgtgtagctgtgttgagtatttgtgctctggtgggcattgtggcaggtactgaggatgtggaaataacttgcccacaagagtcacagagtgggaaccaaagaagtagccagacaagaaaggcacgccaggttgaaatagaaatttgatgatacgttatgaatagcactgagaacagtagtaggaaataccaggtaaaggttcaggaagtggtatttggggtgaacctcgaagggctggggtggctcgctgagttggaaaagcagtaaggtagagaaggttggagatttgatggataaagagagggatcggcgtgtcctgttgttgtgatacaattccatgatcaaaagcagctttagggagaaagggtttattgtggctcatggttcaagatcatggagaggtagtgactgaccacagtaagatctgaaagctgctggccaatcacagtcaagctttcagcgctggctgttgcttagttctctactgacattggccagaatctcagccaaagaatggtccctcccgcaatgggcgggtcttcctacctccattaatgaaatcaagataatctcctccaggccctactctccggtgattctagaatccgccgagtggacagttaacaagagccatcacaatgtaagcaatgttgcaagtggtgacgggaatgtcccccttagcagcctcggttaggcgatcttgtgtttctcagatccatgtgtggctcgggagaacagacagtagacataactgtctgcatttctgaaagttcattatagtcgctgaggaaaaacagttgctgccacatgaaccgagagctggcggccacaccgcgccattaactgcctgaatgagacgtgtgtgttcatatggccatcctcttacagctagatgtatcgcattattactagaatttgaggtggtttcaagacctttgttaccagtttattatactgctaggttttcatacattttcatatggctcagtgccaaagaaatatgaaattcttcaaagccccccaaaattgacctctattctaccaatcagacatacttttggagtcttgcatgtcctatataataagacccagctatgccttaacccttgggtatcttccccccaggacctgatgggatgggtaaaatattgaaaataggagctatactgtactacaaggaaaagtgtcgttcctggtatgtatgcaggaatcaggaggctcctggtttgggtgatagcgatagtgcactaagctgcttgtgtatgggctgaaaggcatattaggtggatagcgagtcactcgcctctgcaataaaaaagcattgagagagatggagtgggggcggggcaaaccatagtccttttccttgccttgcctttatatgccattaagtgtcattaaaacacttagaaaaattccaccgcctagcactgtagaaagctaaaataaaagccagagatatctgaccttctcagctctgttctgtttcaagcaaatgccattatttatttggccgagagtgccacagtatattcaagccatgctcagacacccaggatttgggctaacacccttgcttggaacactaaataaaagcatgtttagtggcggtaggcagataagctcaggttgaggcgtgtatttctgagcctggggtgggggatggttagtcacgtgcccgtgtgtgtttcctaaggaagcgagtctgtgtttagaggctgtgcttgcttattatgaagctagttcatctgtaaagttcccgtctggtaaggggtcctagcaattagtgttggtccccgcttatggctgacctacgcatagcatcacaaacatttgaccaatctaactgctaagaagactatttactcggtgggtcatcaggagcctgacatccttgttcacagagaattttagaagtaggcatggaaatctgtgcagacgactcgtttctaatatctgctcttttaccttataaccgagactgttgtcattttgtcttctcatcccatctaggaagaacgttggtgagaagcacagaaaccagtgacatccgcggctatggaattttcatggagttaatatagggcatgggaccgaccgggacatcccccgcccctggcgagcctcctgccctactcccaagcgccttcgggggcccagagtgaaaccgcgcatgcacaccggggtgcttgcagaggacccttggaggggatggagggggctgggaagatgggagcaaacatggagcgaatgtttcacaacccgaacctcagaactgtgatcctccaaggagaaagctacttgaagaaaagaagaaaaaaaaaaaaagttaacaggcttctcagggattgtgttttctgtgtacacacgagccatagctccaggccaggcggcactcagatttcagtttcttgttcaatgtgaaggagggatcaactgacgttcattgccgttccgtaactagtgtaagatatgtatatgttaatctttatttttataatatgcaaaatacatttaaatttatacagttggacgcttctagcatgagtgaacactgggtgcaatattctgcatgagagttgtgccaagatggggctggtgtcttttagtgtcagaccttgggttcttctcgtaatccttttgcccacccactcaactgcaaagaacagaaaaagctagcctctccctcggagtccatagctaggttcaaggttgattcctagaactcttaatactccccagtggcgttcagcccatggagacagagtcccctcccaccttttcatcacacctccctgcttgctagtcactggacatggtggtagaatgatagctgttctgtctccacccatgaccactgagggtgaggggtgcgttcctagaggccagacgaggtgacgaatctctgaaaacccgaatcttggaacaacttgagataatgagttcagttctaaatcttgcagctgttctcctgctatgcacccccccccccatctccctgaccccgggaacagcgtgcatgatttagcagagccctctgtgaacctctccatctgattggtagccttcctgaaaggagcatcctctttcagggctccgtccctcattggctgtttattcatgcagagccacttggaggaagtctgcagccaaggtcctagtagaaccattgttttgaaacctctaggaggttaaacacttaaaaacaaactctacaaattgctctccagtgtcctcctggtcagggccaaacagcacgtgttgcagtagagacgcgttctctgaagactgtaaaggactgtgtttacatccgcctcctccgtgtgttgacaggaaacatgtcaaactgactgttccccacaagaaaagtgtgtcagctcttcctactctgtcacctgtattctaaaatattgactcctagaatgtcacagcacaggcagttgccacgaatctttaagaggaaggaatacaagcaggcgactgcacttcttgaggcgttacaaataagattcgtggtgaatctgttcagttgacttccctgccccctggagcccgttatgtggaggcaatttctcagaaatcagaatctagtagggattgtctctctctctctctctctatgttttgaatacttgaacatgacaagtccagtttaaaatgtctttttcctttcaggacacagttgcaggatgggtaagaatctggttgatctcttctgtcataggtctcatgtgtatgtgtgcaagtgtaaaccagagggttagcattccccttcctttgtagaccactgaattattgggcaatagttttttttgttgttgttggctttttgtttttgtttttttttttttttaaattgacaccaaacagttctgaaactgtcaagtcagcaaagttcaatgtccgctatgattttgggtttacttcccagagggccatgtcaaatcagaagaaggctccttgggagagcataccctgcccatggatgctcttttcataaacacagatgcccatgttctgaatatctgctactttctgacaagtgatgttgtgtgttgtcatctgaaccctagagaagcatcgtagatgagggaaccttggcggtcatgtatcgtggctagggtgggcacgatcagagggtcacgtgcccgagaaagctccagcaaagcgtgagaacttgcctcagtgtgggggggaagggctgagatacagaagccaccttgcccaagaagaatttcagcggcggctgtatgagaaattctgtttccttatttcacacctgggaagactcagcagccagcagctgaggggccatccactaagcacaagaggaattcgttctacccaaggagccccgtgcctctcaaatgcgctccgagtttgttatggtttctattcttacaactaacggtatcaaaaccacttcctgggattgtacaagtgctgccagaataaatgtttcccccttctaaggaaaaaaaaacaaaacaaaacaagacaaaaaatccgacagtgctcatgtttgacgtgtgcgctggactcttgaatgaataaagaggaagggcttgttgggattccagtggagtgtgtgtttttcatgctgcagtctgtgaattgtaattgtggtttcccagttcattgtcctaacggggcagaagttaaaaaacaaaacaaaaacaaaacaaaacaaaaaaaacaataaaaacacaatgaaatggttaagccgtggtagctccagcatttcattatttccgggttggtttggttattggtttagttttaccagttaaaaggagtggcaattttgtgttcttagctcaaatttgagctacaggaagaagagtctgctgctctcatctgtttgagtccccaaaggggaaaaaagctgtaagagccactgttttagttatttttcactccacttactttatttgtgaatgtgggggtggggtggggagtgccacaatacgcatgtggaagtcagaggtcaaccgtggaaagctggtttgctcaattcgccatctagctcctagggatgagatttaggggggcaagcttgggcctgccaggtgccttcacctactgagtcatctccctggcccacgtctctcccaaaactctcttctctgtttcggaagcattggttctgtcttttgggactgggagctgaacccagggccttgcatatgccaggcaagtgccccactactcaaccacagcccgagcccagtaccatctgtctgttaagtcagattccttccgcaatgagccattgtgcatctaaattggagcttactgatgtgtgatggctttggaagttcccactccccgggcttcctttttaaggctcagcacaggaatcctgccgaagcttgtaaattctgtctaggaacactccagaaggctggaattacaggtccctgagggacctctcagaagctccgttcctctgtctgtctgcttgcttgttcgttttaaaggaagacttgaaaaggagccgggcagtggtggcgcacgcctttaatcccagcacttgggaggcagaggcaggtggatttctgagttcgaggccagcctggtctacagagtgagttccaggacagccagggctacacagagaaaccctgtcttgaaaaacaaaacaacaggggctggagagatggctcagaggttaagagcactgactacttttccagaggtcctgagttcaattcccagccaccacatggtggctcacaaccatctgtaatgagatctgacgccctcttctggtgtgtctgaacacagcgactatgtactcatataaataaataaatctttaaaaaaaaaaaagaggaggaggannnnnnnnnnnnnnnnnnnncaaaagacatggaaaggaaaatgcaggcaaaccagacatatcccaagccctgcccagaggacctgggaaccgaggaacaggagcagaccagaatgttctcctttaaaatgttctgaaaaggaactttttcttttagtattaggtaccctggttcaaatgcacctctatagtatatttaccatatacctctacggtaaaatatctgaagccacctgccatgaaaaaaagaggtatgtttctggtggggtggctcgccctcacagcagaacccaggcaagttctgacacccatccttactgctgcctgcttctgctcggggagaacagactttgaacatatgtcaacaattcgcgcctgggttgtagcaagatacttcagagttctttaaacttgctcagcagatcacacaacaaagtaggtgtcagtggtgacaattagatgcctgtcagttctcacaggatccggtccctcccagggctgtctacccccccacctcagtgagtgctttctgaagtagggaccaagtttacagaacttcgaagccatcctacctaccatatgcaaggagacaatgtcggctgaatcccagcgccaagggtacctttggcttatgttactttcccagtgatgtcacctagggtggtaggcaatgagagaacctgctattgttctgtgtaggaagggggtctgtgtgtatgtgtgtgtgtgtgtgtgtgcgtgcgtgtgtgtgtgtgcatgtgtgtgtgcatgtgtgtgtgtgtgtgtgtgtgtgtgtgtgtcaggggtagtttggaaggcaaataaacttaggttagacaacatgagaaagtgcatgtggtaatggaaccccatttaactatttgtaaccccctttaggaaagaaatatcttttattttcatatacaaacaatagtttttagtgaaattaatactgttctaaacacagatcctaaatgagtgtttcccaagctggtccttagaatgactgacttcctcagtgccaacacataccctgcaatgggctccaagattcagatactttaagaaataaagcattaaataaagcaaaccagtctttgttgtaggcctctgagaaccttctagacactgttataaagtatcagtctttgtagaccagatgtgagcatgtgtttgagtgtggaaagaagccttctacaacagtgtgtggatatggcctgtatccatcaatggtatctagaatgaaactaatagaattgaatatgggctaggaagagattgttagattgacttatactacaggggctaggtagtccaaatgtctgtctgcactttgaagagcttgaaaacctggtagctggctagcccatgaagttagatgttttcacagtccagctctggtgcagaaagcctgtggggttcctggagaattgctggtctccagttcccatcaaaagaatgggaattctgatgtccatgaaggataaaggcaccaggaagaagccaaagcttgccaatcagtggcacccctttttgttggaccctcttgatagatctgaatgaatacaggttagtatcagagtactgggacaatggaaacatttttctaaagttgcaaaactgccatgagctcatgtagatagcacaagagcacagtagggggccactggtccaagaaatttgtcctgggtttacacagctcacagaaagtccaagcagtgtgccttcttacatttaaggaactctgaaagctttaagaaataattctaccagcttaaaattcccaatagaaacactcattagaagaatgttctagaagcgtatcgtaaaattacctcctagattaaaattttaagatgtgctaagcatttttaatcctgttgtagtgggaagatacttcatgtaattctgaacacgggaagcgttcatttgatttgtgacaactaacaattttaaggaggatgtcctaagtattagcatctcacaacgtctggctgcactaagaccgaaaaagcaaactcacacaacagacactcataagacatgaaaacaaaatcttatgaactgatttggtgccacaaaaaaaaaaaaaagaaagaaaaaaaaaagaaaaagaaaaaaaaagaacaagtggtttggatgtatgtcctgggactgtatgatgtcctaggagttgaaaatgtgttagcttgtacctcactctccaacagccttcctggacttcctggatggcagaggaaattctcatcgccacaagaggctgataaggaaaacttgttttcagagaaaaagcaaaaccagtcacttagattcatcagaaatcttcttaatgacatagggaatatggagaagctgtcgctgaggaaaatgtaggaaagggtcctccctagtcccgtggcttgcatccttggattcaacagtgaagcttgaaagaaaattgagtagagtgaacgagcatagactcattttttatcattcccctctaaacaatgaggtgtaacagctgtttacatagcaggtgcatagcatgaggtgtgagtaatctagaggtgattttaagcacaagggaggacgcaggcagggtatgtgcaagtattaagctgttttacatgaggattacacaagttagcatacttaggcagttatgggtttgacatgcaaggagaaccctcgaactcttccccagtatactgaagggttattgtaatacatgttggtaagaatgaccagtattgagattgctgtgacctccttcacctcccttgtcccctagcttcaagctccttaagcacacacctgacccctatttgtaactagagtctgaaaggttgagaaactgacttgtgactttgtctctcatttcttctactatggaccaagagtaaaagtcttctaaagtgttccactggtgctgattttattaacgccatcactctggaaaggggaaaaacagtttggggataagaattggtaagatgtagattaatttaatgatttttttttttcaaaataaagacaaagaaaagacctggacaggaggcttcactaatgccatctaccaaatattgagaggcctacatgctggttaatttatgccaatttgacacaaaatagaattacctggaagggaggaaaatcaacttcagaaaatgcctccattagatcttattgtgggtggtgccacccctgacctggtagtcctggattctataagaaatcaggctaagcaagccctagggaacaagccagtaagcagtgccctccacggcctctgcagcagctgctgactccagattccttccctgtttgagtttctgccctgatttccttccacgatgaacagtcctgtgaagtgaaacccactaaaccctttcctctctacattgctttggtcatggtgttttgttgcagcaatagaaagccaaagtgagaaaaactctctttcaaactgctgtgtcaggaaaacaaacaagcaagcaaacaacaacagatcgtatttctgttttgttctccttcctcgaagatctacacagatttccatgagctcagcgtgtcgggaatcattcttcccatggagagacaggtggttgttcttgcagcaagtctaccgggtgtcacctcattcaactcacttccaccacgttcttccagggcagcaccagaccccacagattgacctgatttccaagactgtgacacctcacacaccatcccaagctcggggcgggggtggggggccttgcttctagccatgcttctagccacaagctataagtcagggttcccagagctagcagctaagcaagacaagtgccttcaagggcaaactcctatatcaatgtagtgtcctattctttatcttgagctagaatttcatgacatgacccaagtttacccagtggctcctgtccaccattttaacctttcgattattttttacacaatgtattttaatcatattctttcctttctcccagcttctctcagatcattctgccattcttcactccactccacgttctttttctttcctaaaaaaaacaaaaataaaaaaacaaaaaagcacacatacacatgtgtgcacacatgtacacacacagacacagacagacagacagacagacagacacacacacacacacacacacacacacacacacacacacacacaccagagagtctgctctgtgttggcgaactcctcctgtgcatggggccttccttggagtgtggttgatatacccagtattactgcactcaagagaactgatttccccactcccagcagccgccatttcaatatctttttggttaggggtgggactctgtgcccacttccccttctctgtgctgggatatttgtctgatttgaacttcaataggttttgtgcatgctatcagaacatctctgagttcctgtgcaccggtcctgttttatctggaagatactgttttccttggagccttctatcacctctggtccctaccacctttccccctcccccttctgcataattccctgaactttgagaggaaggctgtgatagacatctcatttagggctgagtgcttcaaagtttctcactccctgcacattgccggttgttggtgctaattaccatctagtgcaagaagtttctctgatgagagttcagcttactgatctgtgggcataccaatatgtcattaggaagcattttattgctatgttcacttagcagaataatgggtttccccctagtgctcatgacctatctagtctcagatccttggcctcactaacagtgtcggcttcccataatgcttgtcccattatttcaccagtgggtatatattacagttggtcacttctgtaatttgaatggtatgtagctggggaaagttgataattacctttctctttggggagcctgtctagtactctcaagcgctatgaatgctaggcaggaggggtgaagctttgggttgagtttctccatggtgatgtgagccatcagcaatggggtcttgccaacaggttgcaaagggtaaccagtagcattggcaatgacctgtgaggtttgggggtttccatgggatccctttggcccaacatctcgacatgatataaccggcttctggtcctggtggttttatttggtaccatatgattgatgtctagttaggcatttgtctctcctattatagaatatctctatttaaatttcttttatgtatgtatatattctttggaggcttctatagtaatggaaacatgcattctatgacactgaggtaaatgtatccataaatatgtctatctttctttcttaaattagacctcagactgagcatgctcagaagagtgcccaccgataaaatactcctctccatggatatgtgtaggctacctgagtaatacctctatgctttcttagttcaaggaaggctattgctttagaaatgacttccaccgactccttactgctgcaactaacagagcgtcctctacctcttatgtcttagccatacttgctttggtgttacacttactgagaatttattttcactataactctcagttcaatgaatttattgatgcctcccatgtttaggaaaacacacacaggctgttttcctttttaaaatattattatttactatcattattttagtatgtgtgtgtgtgtgtatttatgtgcacatgtgttaacacccatggctagaggtgtagggtctcccttgtcttaattaggatttactgctgctgtgatgaacatcatgaccaactcaacttggggagtaaaaggtttttcagctgatgctttcacatcataatcatcacgaaaggaagccaggacaggaactcaaacaggccaggaaggaacctggaggcaggagctgatgcagaggccatggagggatgcttactggcttgctccccatggcttgctcagcctgctttcttatagaacccaggcccaccagcctaggtatggcaccacccacaatgggctggactctgccccatcaatcactaattaggaaaatgccttacagctgggtcatatacaagcattttctcaattgaggttctcttctctctgatgactctagcttgtatcaagttgacattggaagtatccagttcagccctggagctggagttgtaagcaattgagcgctaaacaatgcaggtgccaggaactacactcaggttctctgctagagcagtatgtgcttttaactactgagccatctctctatcaccaatattttgattttttaaatatatatatatattagaaaggacacaggaggaacacgtagaggaatgagtactgactgagcctctatgtaaagagagtcttagctctctagaagaactttctggaaacatattgagctctgttctgtcttgttggaattctgtaaagacttcattgcataagaatcattgtaaaatccagtatcaatagcttgggtgaagaagcctggagactcttgtcaacttcagcattcttgacctttcttaaataactaaactgtagaagggaaattctccccctgcctcagtcttgtactgtctaggctgcccaacaggacgccgttggggtagggagggttttacaaccttctaaacgacaagggcagctcatagaatttgcttagatccaccaccaagaaagacaggtagaaggagttcagagttc

SEQ ID NO: 156 - DNA, 3634 bp, Mus musculus
atggctggccaggacagtggcaacctgaagacggtgaggctgtggcgggacgccgccctgagagccaggaagctgcggagcaacctgcgccagctcacgctcagctgcccaggggccggaggcgacccactggagtcccccgacgccccccagctggtgctgccggccaacatcggggacattgaggtgctgaacctggggaacaacggcctcgaggatgtgcctgaaggtctggggtcagctctgggcagccttcgcgtcttggtcttgcgcaggaaccgttttgcccggctgccccctgcggtggcggagctaggccaccaccttaccgaactggacgtcagccacaaccggttgaccatcctgggagccgaggtggtgagcgccctgagggagctgcgcaaactcaacctgagccacaaccagttgccagccctgcctgcccagctgggtgccctcgcccacctggaggagctggatgtcagcttcaaccggctggcgcatctgccagattccttctcctgcctcaaccaccttcggacccttgacgtggaccacaaccagctcaccgcctttccccagcagctgctgcagctggctgccctggaggagctcgacgtctccagcaaccggctgcgaggcctacctgaggatatcagtgccctgcgtgccctcaagatcctctggcttagcggggccgagcttggcacgctgcccagaggcttctgcgagctggccagtttggagagcctcatgttagataacaacgggctccaggctctgcccgacgagttcagccgtctgcagaggctcaaaatgctcaacctctcttccaacctcttcgaggagttccctgctgcgctgctgcccctggctggtctggaggagctctatcttagtcgcaatcagctcacctcagtgccctctcttatcgccgggctgggtcggcttctcaccttgtggctggataataaccgcatccggtacctgccagactccattgtggagctgactggcctggaggagctggtgctccagggcaaccagatcgctgtgctgccggacaactttggccagctctcccgggtaggcttgtggaaaatcaaggacaacccactgattcagcccccttacgaagtctgcatgaaggggatcccttacatcgcagcctaccagaaggaactggcgcattcgcagccagccgtgcagccccggctcaagctgctcctgatgggccacaaggctgcaggaaagaccctgcttcgacattgcctcaccgaggacaaagtggagggagggcaaggtggaggggacaaggagaagagctacctacctttccctccccttggtagtaagggcatcgaggtgaccagctggacagcggatgcttcccggggcttgcggttcattgtgtatgacttagccggtgatgaaagctatgaggtgatacagcccttcttcctctcccctggagccctgtatgtgctcgtggtcaacttggccacctatgaacctcgctgcttccctaccaccgtgggctccttcttgcatcgggtgggggcccgggtgcctcacgctgtggtgtgtattgtaggcacgcatgcggacctgtgtggggagcgggagcttgaggagaaatgtctggacattcaccgacagattgccctgcaggagaagaacgatgcagagggcctcagccatctagccaaggtggtggatgaggccctggctcgggacttcgagctgcgctctgccagccctcacgcagcctactacggtgtttcagacaagaaccttcggaggcgcaaggcccattttcaatacttgcttaaccaccggttgcagatcctctctcccgtgttgcccgtaagctgccgggaccccctccaattgcaacgccttcgagacaagctgctctctgtagctgagcaccgagaaatctttcccaacttacaccgagtcctgcctcgatcctggcaggtactggaggaactgcacttccagccacctcaggcacaacgactgtggctgagctggtgggactctgcccgcctgggcctgcaggcaggtctgactgaggaccggctccagagtgctctttcctacctgcacgagagcggcaaactgctctattttgaggatagcccagccctcaaggagcatgtcttccacaacctcacccgcctcattgacatcctcaatgtctttttccagagagatgcttcattgctgctgcataaactgctcttagggaccaatggagagggggagggggagggggaaagtttccccactatagcagtgcccagcccgggtcaggacccactccgggccacccagcttcatcattatgtggaaggctttttgctgcatgggcttctgccagcccacatcattcggttgctgcttaagcctcatgtccaggcccaacaggacttgcagctcctgctggagctgttggagaagatgggactctgttactgcctcaataaacccaaaggcaagcctttgaatggctccgcggcatggtacaagttcccatgctacgtgcagaatgaggtgccccatgcagaggcctggattaatggcaccaacctagccgggcagtcttttgtggctgaacagttacagatcgaatatagttttcccttcacctttccacctggattgttcgcacgttacagtgtccagatcaacagtcacgtggtgcacaggtcggatgggaaatttcagatctttgcatatagagggaaagttcccgtggtggtgagttacagacctgccaagggggttctgcagcccgacaccctgtccattgccagccatgcgtcactaccaaatatatggaccgcatggcaagccatcacccctttggtagaggaactgaatgtcctacttcaggaatggcctggactgcactacactgtgcacatcctctgttctaagtgccttaagagagggtcgccaaatccacacgctttcccaggggagttgctgagccagcccaggccagaaggggtggcagagatcatctgccccaagaatggcagcgagcgagtgaatgtggctttggtttacccacctacaccgactgtgatcagcccttgttccaagaagaacgttggtgagaagcacagaaaccagtgacatccgcggctatggaattttcatggagttaatatagggcatgggaccgaccgggacatcccccgcccctggcgagcctcctgccctactcccaagcgccttcgggggcccagagtgaaaccgcgcatgcacaccggggtgcttgcagaggacccttggaggggatggagggggctgggaagatgggagcaaacatggagcgaatgtttcacaacccgaacctcagaactgtgatcctccaaggagaaagctacttgaagaaaagaagaaaaaaaaaaaaagttaacaggcttctcagggattgtgttttctgtgtacacacgagccatagctccaggccaggcggcactcagatttcagtttcttgttcaatgtgaaggagggatcaactgacgttcattgccgttccgtaactagtgtaagatatgtatatgttaatctttatttttataatatgcaaaatacatttaaatttatacagttggac

SEQ ID NO: 157 - protein, 1038 aa, Mus musculus
MAGQDSGNLKTVRLWRDAALRARKLRSNLRQLTLSCPGAGGDPLESPDAPQLVLPANIGDIEVLNLGNNGLEDVPEGLGSALGSLRVLVLRRNRFARLPPAVAELGHHLTELDVSHNRLTILGAEVVSALRELRKLNLSHNQLPALPAQLGAHLEELDVSFNRLAHLPDSFSCLNHLRTLDVDHNQLTAFPQQLLQLAALEELDVSSNRLRGLPEDISALRALKILWLSGAELGTLPRGFCELASLESLMLDNNGLQALPDEFSRLQRLKMLNLSSNLFEEFPAALLPLAGLEELYLSRNQLTSVPSLIAGLGRLLTLWLDNNRIRYLPDSIVELTGLEELVLQGNQIAVLPDNFGQLSRVGLWKIKDNPLIQPPYEVCMKGIPYIAAYQKELAHSQPAVQPRLKLLLMGHKAAGKTLLRHCLTEDKVEGGQGGGDKEKSYLPFPPLGSKGIEVTSWTADASRGLRFIVYDLAGDESYEVIQPFFLSPGALYVLVVNLATYEPRCFPTTVGSFLHRVGARVPHAVVCIVGTHADLCGERELEEKCLDIHRQIALQEKNDAEGLSHLAKVVDEARDFELRSDHAAYYGVSDKNLRRRKAHFQYLLNHRLQILSPVLPVSCRDPLQLQRLRDKLLSVAEHREIFPNLHRVLPRSWQVLEELHFQPPQAQRLWLSWWDSARLGLQAGLTEDRLQSALSYLHESGKLLYFEDSPALKEHVFHNLTRLIDILNVFFQRDASLLLHKLLLGTNGEGEGEGESFPTIAVPSPGQDPLRATQLHHYVEGFLLHGLLPAHIIRLLLKPHVQAQQDLQLLLELLEKMGLCYCLNKPKGKPLNGSAAWYKFPCYVQNEVPHAEAWINGTNLAGQSFVAEQLQIEYSFPFTFPPGLFARYSVQINSHVVHRSDGKFQIFAYRGKVPVVVSYRPAKGVLQPDTLSIASHASLPNIWTAWQAITPLVEELNVLLQEWPGLHYTVHILCSKCLKRGSPNPHAFPGELLSQPRPEGVAEIICPKNGSVNVVYPPTPTVISPCSKKNVGEKHRNQ

SEQ ID NO: 158 - DNA, 127508 bp, Homo sapiens
ctcccaggttcaagcaattgttgagcctcagcctcctgagtagctgggattacaggcttttgccatcatgcctggctaatttttgtattttttgtagagacgagatttcaccatgtttgccaggctggtctcgaactcctgacctcaagtgatttgaccaccttggcctcccatagtggttggattacaggcatgagccaccatgctgggctggactttacattttcaatgctacgctttatagtatgtgttaggtcattgtagagttttctgaaattttggaactacgatgttcaaaaaggagggcccaatatccctgggtcgtttatttaaaaggtaggtactagtacatttatttttaaatatgaaaaatatttcaaagccttgtggacggaagcaaggtcttaaaccatttatctcactgtgactgcatctcattatagttcagactggtaactgaaactccattcccagggctacacagcttatgctgtgcacacacacccttggaagaaggcatggaagacaaaagcacctaaacttcactcaccatgcctaggagcatggttgggtctgtggagagtgatgcattgctctccctttcactgaggcaccatacaggccctgatatggtttgactgtgtccccacccaaatctcatcttgaatttccacacgctatgggagggacctggtgggaggtaattgaatcatgggggcaggtctttcccatactgttcttgtgacagtgaagaagtctcatgatatctgatggttttataaggggagttctcctgcacaagctctctctttttgcctgctgccatccatgtaagacgtgacttactcctccttgccttctgccatgatcgtgaaggcctccccagccacgtggaactgtgagttcattaaacctatttttcttcccagtctcaggtatgtcttcaccagcagtgtgaaaacggactaatacaggccccttttgaaaagccccacaatagagtgtctccctgtccaatgcttgccgttagcaatagacacgaagcgggggatgatagggacatcctctctgcaacccattctccctctcccctcctcctggacatgcttcatttcaaaatgccaagtatgctacagttagcctcatgtgtcatgactatttcacagatattttccgttggtctttcactggactaattttccttgtttttctcagaaagaggatgttttctccaggattcggtgggcagttgggggttgggaggggacactgctactctgggacccccaggaaaagttctgggattctaggtgacgtcgaggcaaatcctttggcttgcagtgaaatggcctgggtcctgtggaatatcttcagctgaaagtactttcaacggatgctaaaaatacattacagtttattttccccagtagggagcgtgtgtgttcccacttgacctggaaacacaaagagatccaatgttaaatgtaatgttgctcattccaagataaatgagttttctggagagcaagggaaagaaaaaacaacagtcgtctgggtatagttttgcctttgctctctggaggagtcagtgtcttgaacacatactttatgctccacgcttgtagttaagtggcaattctcaggcttcttagccattgctgatcagaactggcttgctttcaaatcacatgagtccaaggcagatttattaaatttaggaaagaggggtgaggtatgttttatatattttttaaataaaattttaaaaaatccaaacaaaaggggtcagattctttgtatctaatctgagcttaataaattcatcttccatcttttttcaaaaaatgcagtcaaaatatgaagtctgaaacaccctctaattggagtgtagatttacggtcattgttattaaaccctttctgtgtaaaactagcaaattgaacaaacacagctgatctacaattagcatagacattctgttggtttcctgcagtgacatttatgaatagttgttcagcccagttcttgtagttggggacactgtgtttagagctttggattgcccaatataatattcttcaattttgtaagagctcagttcaatttctactgaagactgggtggcagccctgtctccagctggtacctctttccctcttttctacagcttaaaatacacagtctgttccaggtcagttaagaaccaatctcctccaccctcctgacccctgaagaattagcaccgtgattaaatacatgaattttacagtctgctttgttttgagtgaattttgccactcagtagctctgctttcatttttctccatctgtaaatgaggctaatggaacctactattcagggctgttgtgaagattaaatgaaatattgcatgaaaagcacacaacacagtgcctgggtgcatggaaaacttttaagagatgttagctatcatgactcgtgattattctgagatttcccattgagtgatgcccagtggcaggagagaatgccatgatcaccaagacctcgtttgacaaaactgtttgatgtccatttttaagactttatttctaatcccctgctttggaccaagcctaacacctttcgaagggctatctcttcctggccgggtgcagtggctcacacctgtaatccccagcacgttgggaggctgaggcaggtggatcacttgaggtcaggagttcgagaccagcctggccaacatggtgaaaccctgtctctactaaaaaatacaaaaattagccgggcttgatggtgtgtgcttgtagtcccagctactagggagggtgaggcaggagaatctcttcaactggggaggcagatattgcaatgagcctagatcacggcactgcactacagcctgggcaacagagcaagactctgtctcaaataaatacatacataaataaataaatatttcttccttttcctctgtctgtttttctcttgactttttccacttctatctcctccaaagacaagccaagaagggtgtggcctaattaaaatctcaaaggtgagattttctcttagttgcctttagccacataggaggaagcattgttgttgctgtcatttatttaaagcaaaacacgacctaaaattacaagaaaggagaaatgtgggaaaccctttgccccttttcatgatacaggcagcatatcttcagcttctccagacttcaaggagaaaactcagttcattttctcatgagatgtttaacccagccctgggtctcatttgtgtggaagggttaagtgattgccaaattttctttcaagactagacaggtaattttcatactccaaagtcagctggaacctccagcccatgaatatcctgtcttctaaggtagtgaacaactaggtaaatgaaatcagaacaaagtctaaatcagaactaaagcagctgaaaatgtgctacatttcctggaagctgtgctttctgaactcctgaagggtaaagggagagtaagttaaagggtttgttttaaagaccaagtcagttaacaaattgtactagtttcctaagattaccctagttttaagaacagaatgtctcctatcctgagagacccctcagtcttgtgcacattggagcattttgtcaccttaaaatcaagacttgattaagttgtgatagattaaattaaaattcaatggaaaagggtgctcatatgattttcaaaatgcatctttaatagaaatagaataatataaatttaagtggaaaaaccatactgactaaatatcctcctaagaagctatcattatctaggcaaatcctggcctctctgcccacgtagttatagtgcttcgtttggtagcacttattctaattgcaaacttgatccctataaggaaataattagcctttatagggactccttttgaaaacccaaaccttaaagtgacaccaaatatcctataggccaagaaaggaaaaagtttccaaaggaagttgtttaacattttcagcgatgggaggtcaaggaggagaaagggtgagttgacccttaagagggaaaggctcatcagcatggtggggatggaaaccagattcctggactggcccaaggagggagccaggggagaggagtcagactagcgtggaccaattatggaagatatttgacagagaaaggaagtaaagtagtcagacagtagctagggcattagcaaggttgagagaaatctgtcaagatggaagaaggttgattgaatatgctgaagacacagcaaaagaaactaggatgaaagcttacttggggcttgttgatagttttagcaaaggataggaacaaactactcttgcccacctctattcagacttttttttttttgagacagcgtctcgctctgtcgtccaggctggagtgcagtggcacgatctcggctcactgtgacctctgcctcctgggttcaagtgatcctcctgcctcagcctcctgagtagctaggattacaggagtgcatcaccacgtctggctaatttttttttttttgtatttttagtagagagggggtgtcaccgtgttggccaggctggtcttgaactcctgacctcaagtgatccgcccacctctacctcccaaagtgttgggattacagtcgtgagccatcacacattgccaatccagactgttcttgacaaaagacgcttatctggagcatctaggattctcccttctaaacagccatgtttcaaggcctcactcaagacacaacctctttccatgtactctccactctcctgaatgactctgctcttgcagacagggtctagactctggaacaaagccaatgtgtatggaatgctcttgccatcataaggcagcagcgaaagagaaaacaatctaagagtcagaaaacaggatatattaaaaggcttaagctgaaaaggttttggaaagtttatagattagattcatgacattggatagacctctaaggaaagaaaactttatataatagagttcctcttctccaaacaatgttgttgttgtttttgcttttagaaaaaccctaccatttgcagggccacgcttatcctttgcagggcctggggaaagggtacacgggaaggcccacatgccacatgcctaaatatctaaatgtgttacatcaccctaacagatgtggcacattcacactccttgccctagcctgggctacatccagcacagagaggagcttcgtcggcacacagctgaggtccagctcctgcacaacccccaggtctagggatgcccacctcaataacttctttcgaatgactatgaaagactgccccacgctccccatccaggcttgaggctatttgcattgggaattcagggtcctccataccatgtgtgttctagaaggtggagggggcgtgcccccttggcccatcagaaacttaaccacacggggtacagcatggtgagaggagggccaggttaggtgcccacggcaggagtccttgcctgggttgatacttgagaggatcacttgagcacaggagttcgagatcagcccgggcaacataagcagaccctgtctcaatgaaaaaacagaaaagatgatactttcatgaatcctctttctttctttcttttttctttctgagatggaatcttgctctgttgcccaggctggagtgcagtggcatgatctcggctcactgtgacctctgcctcccgggtccacgcgattctcctgcctcagcctcctgagtagctgagactacaggcacccaccaccatgcccagctaatttttgtatttttagtagagatgaggtttcaccacgttggccaggctggtctcgaactcctgaccttgtgatctgcccgcctcggcctcccaaactgctgggattacaggtgtgagccactgcacccagcccaggaatcatttctatagttctttacgaagcagtttctttgaaagtggaaagcacaaagaaaaaaaaattttaaagctatatggaacacaatatcttttcatagagttttcttttatcattgagttatcttttatcatttgactttctagtttttagcatactgactttcttttgttgtgttgtgttgtattttgagacagagtctcactctgtttcccaggctggagtacagtggtgcagtcttggctcactgccgcctccacttcccagcctcaagtgatcttcccgcgtcactcctgagtagctgggactacaggtgtgcgccaccacaccctactaatttttgtattttttgtagagatgatgtcttgccttgttgcacaggctggtctcgaactcctgagctcaaatgatctgctcgcctcagcctctggaagtgctgggattacaggcatatacccctgtgcccattcacatactgactttcaaagaactcatagacaaggattcttacaaggcttcctactatattgactgcatcagctgaggggctcacaaagaattgccacccccagcacacttattcactccaggctttggggctttagtggggcttgaagcccctagcgcagggtcctagccagtactttttattagataaagcaaattatagatgatctcctgacaaatgaagagtgcagttttccaaggacatttaaaatagaagtataagctggtcagggtggcttatgcctataatcccagctactcaggaggctcaggcaaaaagactgcttgagcccaggagttcgagtccagcatgggcaacaaagcaagacccccatctccagaaaaaaaaaaaaaaaagaaagaaagaaaagaaaggaaaatataattttcttcagagaaaaagtctcactctgtcacccaggctggagtgcagtggtgtgatcttggctgactgcaacctccgccttctggtttcgagcaactctcgtgcctcagcctcctgagtagctggggactaaaggtgcgcaccactatgcctggctaatttttgtatttttagtagagatggggttttgacatgttggccaggctggtcttgagctcctaacctcaactgatccaccacctcggcctcccaaagtgctgagattacaggcatgagatgccatgtccggccatttttcttttttaaaataattttttaaatgaaaatattattaaataaatgaacaccatgaatttgcatgtcatctttgtgcagggccatgctaatcctctctgtatttttccaattttagtatatgtgctgctgaagcaagcacaattttcatttttttcaattgatttcagcttctgcaggaggaagtataattttctgatggcttctaaagaggaacagttagcagttattgagatataatcatgtaaggtggtgtaggatggtgatgcctactccagtctccttacccaggctgagttcatatttttgttagaagaagctgcaggatggagaatttggggtctggctcaagaacagtgtgagtacaggtgatgatcacaggggaatacattccacacggggagttagcagtcctgcctctactctactttgatggctgattgagaagtcacttactttgagcccatttcctcctctgtgggggaaaaaaagggtcagcctagataactcagaatatttgttgtaaaattgactgtctctgggagggagtgtgggtggggctaccctgagccatctgaactctcggaagtccttcagagtgaacacagatcagctcttgctgttcacttactcacatttcatctgtggtgtcagagcctcagggacccagcagaactggggaacatcctccagttacagcatgtactacctgcagcctgataaccatcactggggtggatttccagcctcagatgttcaggtgctctttttggaaacacacacttctcacgttactgcaccaaatatgggtccccaaatgacagccatagcgcatgtcggggagagctgcagtgggtcaagtgatgcctttaaccaattgaacgcagttttcggtccctgaaaactatttgcttccttatcaatcaacctgaagggaatgatggaggtgacactgggagtcttggtaggtttccagactttcataagttcgggagaaattattgacttagcatagatgtgagctcaaagaaacatttcctaacagcaataaaaataagcattagagttgaacaatggactgtgactgtttcccaaaatagctgttttcttgagtccgcagaacaacaggtactgtattaatggggatacagtatttgtttcacagcgttgttgtgaagataaacgggataccccagataaacagcttgtgtcccccccatcttaacaaccctcctttaggctggcgggccacctgctcaaaagccttccccaggggggttaaaaccgtcttttagtagttctggtacgggtgggctgggggagatcctctaaagccagtgcgaccttgaccccagccaatgtccaggctcttgacacatccagagaatgagttcaaggacaactcagaaaatagtgacaatatgcagatttattgcaaagggaaaagtacacacccaggaaaagggattgtgggtgggagagggtcactcacaacggggcttggggctgctacctttatgggtttctttaaccaaggggtgaaatattcatgaaaattcctggaaaagtgtggagatttttcgggactgtggtgccacccatttttacttcaaatatgggtgtccccggaattgtcatggcactggtgtgacttaggatgttaaagagcgtataatggaggcctaggagaaacctaggtcaaatccaggaccacgtcgggtccagccggtcttagccagcttggtacacaccctggttttcagggtcttatcagcccatagcctccagtcaagtgaaactgctgcctggtattttttattctcctctgaccagcctgcattactcctgtcccatgttcaacacgaaatagggcctcaggaaatatttaccaaatgaatgaatggttgcctgttctaattttgtttaaccacactcttgtcctaagcttctatgatgatacccagggcccccgagttgtgccagttccactacggcgtggatgcaaggcgagcggcaggggagcaggtaaaggatgagtaagggaagccggcggatccgacgcattagagaacaagaaaaagaaatccttagagactgggggccaacaaagagccaggcgcgggcgaacccaccaggggggccccggagccccacatccgccgctgggacgacctccccgcccagcatggtccggggcgcggacccggccccgcgccaggcgcccccggccccgcacccggcgccctccgcagctcccgcccccggggcggtgccgggaaaacgcggcgcctccgccggtcacgtaggggccgctccggcgggcggcgctgccgcttcccaatcgcgccctcccagcgccggggacgcggcgcccgcgctcccgcccgagcccggggaaacggagacaaggaggcgccgccgccccctccccgcggctgcgccccagccctgcgcccgcagcatgcccgccgccgggccgagcgccgccctcccccaggagctcgaggaggcgacgccgctgccggccgcgggaccgcggctgcgagggtagcggggccggagccgggcaccccgaggcgccgcgcggcgggcggagagggaggaggagcaggcatcctccgcggcgcgcgggcggcggccctgctgcccggcgcgcccatggcccggccgcagggagaatgcaagctgctctccacgcgctcggcgtcccccggagccgctcgcgtcgccgccgccccctagccgccagcgctcggccgctggctgcgctaggacccgcggccgccggccgccgagcgcgggagggcaggcaggggcaggagccggagggcccggggcgcggcgcggcatgtagctgcgggctcccgcgtccgcgtgaggctgtcggcccggggccccgccatggctgggatggacagtggcaacctgaagaccgcgaggctgtggcgggacgccgccctgcgtgccaggaagctgcggagcaacctgcgccagctcacgcttaccgccgccggggcctgccccggggccggggccgacgcgctcgagtcccccgcctccccccagctcgtgctgccggccaacctcggggacattgaggcactgaacctggggaacaacggcctggaggaggtacccgaggggctggggtcggcgctgggcagcctgcgcgtcctggtcctgcgcaggaaccgcttcgcccggctgcccccggcggtggccgagctcggccaccacctcaccgagctggacgtgagccacaaccggctgaccgccctgggcgcggaggtggtgagtgctctgagggagctgcggaagctcaacctcagccacaaccagctgcccgccctgcccgcccagctgggcgctctcgctcacctggaggagctggatgtcagctttaaccggctggcgcacctgcctgactccctctcctgcctctcccgcctgcgcaccctggacgtggatcacaaccagctcactgccttcccccggcagctgctgcagctggtggccctggaggagctggacgtgtccagcaaccggctgcggggcctgcctgaggatatcagtgccctgcgtgccctcaagatcctctggctgagtggggccgagcttggcacgctgcccgccggcttctgcgagctggccagtttggagagcctcatgctagacaacaacgggctgcaggctctgcccgcccagttcagctgcctgcagcggctcaaaatgctcaacctctcctccaacctcttcgaggagttccctgccgcgctgctgcccctggctggtctggaggagctctaccttagtcgcaaccagctcacctcggtgccatcccttatctcgggcctgggccggcttctcaccttgtggctggataataaccgcatccgctacctgccggactccatcgtggagctgaccggcctggaggagctcgtgctgcaggggaaccagatcgcggtgctgcccgaccactttggccagctctcccgggtgggtttgtggaagatcaaagacaacccactgatccagcccccctacgaggtctgcatgaaggggatcccctacatcgcagcctaccagaaggaactggctcattcccagccggcggtgcagccccggctcaagctgctcctgatggggcataaggctgcaggaaagactttgctgcgccactgcctcaccgaggagagagtggagggatgcccaggaggaggggacaaggagaagtgctacccaccgtcacctccccctgtgagcaagggcatcgaggtgaccagctggacggccgatgcctcccggggcctgcggttcatcgtgtatgacttagctggggatgaaagttatgaggtgatccagcccttcttcctgtccccaggggccctatacgtgctggtggtcaacttggccacctatgagcctcgccactttcctaccaccgtgggctccttcttgcatcgggtcggggcgagagtgccccacgcggtggtgtgcatcgtgggcacccacgcagacctgtgcggagagcgtgagctggaggagaaatgtctggacattcaccgccagatcgccctgcaggagaagcacgacgcggagggactgagccgcttggccaaggtggtggacgaggcactggcccgggacttcgagctgcgctctgccagcccccacgcagcctactatggcgtttcggacaagaaccttcgacggcgcaaggcccattttcaatacctgctcaaccaccggctgcagatcctctcccccgtgttgcctgttagctgcagggacccgcgccacttacgacgccttcgggacaagttgctgtcagttgctgagcaccgagagatcttccccaacttacacagagtactgcctcgatcctggcaggtgctggaggaactgcatttccagccacctcaggcccagcgactgtggctaagctggtgggactcggcgcgcttgggcctgcaggcgggtctgaccgaggaccgactgcagagtgccctctcctacctgcatgagagcggcaagctactctactttgaggacagtccggctctcaaggagcacgtcttccacaacctcacccgcctcatcgacatcctcaatgtcttcttccagagggatccctctttgctgctgcataagctgctcctagggaccagtggagagggcaaggcggagggggaaagctccccgcccatggcgcggtccacccccagccaggaactgctccgggccacccagctccatcagtatgtggagggctttctgttgcatgggctcttgccagctcatgtcattcggttgctgcttaagcctcatgtccaggcccagcaggacttgcagctgttgctggagctgctggagaagatgggactctgttactgcctcaataaacccaagggcaagcctttgaatgggtccacagcttggtacaagttcccatgctatgtgcagaacgaggtgccccatgcagaagcctggattaatgggaccaacctagctgggcagtcttttgtggctgagcagttgcagattgaatatagctttccttttacttttccacctgggttgtttgcacgctacagtgtccagatcaacagccatgtggtgcacaggtcggatggtaaatttcagatctttgcctatagagggaaagttcctgtggttgtgagttacagacctgccaggggagtcctgcagccagacaccctgtccattgctagccatgcatcattaccaaatatatggaccgcatggcaagccataacccccttggtggaggaactgaatgtcctacttcaggaatggcctggactgcactacaccgtgcacattctctgttctaagtgccttaagagaggatcgcccaatccacatgcttttccaggtaagtggagagagggagaagttcttctgtggtgtgctgtaagatatgtttttggagatacttggttgtcatttggcagaatgtttgtttaacttcacgggttctccaggaaagcttcgtaagggaaacacagggagatttggagatgagcaaaaggtagtaagtacctgagccttatgaaatgcagtcacaagtgtcatcctctcctaacagactcagacttccaaaatgggttccagtcacaacatttgccatctcctttcccctcttgtcgatgtagcccacatttggtggaaggaaatttcaggtggttgaacagatagattctggacagtgtccgatgttagcctcttactgatcgttggctaaagtgttcattagacacgtctcaaaggggtagatgagtttgagtttcaagtgtccagtgtcacaattttttaaaaaacttaaattttcgtgagtacataggtttgtatatttgtggggtgcatgagatgttttgatacaggcatgcaatgcatagaaatcagattgtaaaatgcggtatccatcccctcaagcatttaagcactctgcttacattcagaatgtaattagaaagtaaaaattactgctcacttttcttaagaaattccagagaaaatcttttgtaattggagtgaacaatggatgagtaaagacagaaatttcagactgtaatgcatgactaaatcctggggctgctgctcccctccgcccactcagggacatggaagatagatgactgaaatctttgaggggcgtttcctcgggaatttcctggcagtttcgagttttatagacgtcttaaggtttgttttttggtaagtgttaagcaaatgaagctttctggcagtgcttaataattgagacggaagggacagaaagctaagagttttctggagagtgttttccagtagacttttttttcgttttctttttttaaaccatcataagcaagtggaagaattccaggactagttgtctggggttttttgttttttttttttttgaagacttttttttttttcttagagcagttttaagtttatagcaaaactgaacagaaggtacagagatttcccatatatccccttccccacatgcgtagcttcaccaacgtcaacatctcccaccagagcagtacatttgtttcagttgataaacctgcagtgacacatcagtaccagccaaaggtcatagtttacacagggtttactctgtgttgggcattctgtgggtttggacaaatgtccaatgacctgtatcccccattatagtatcatacagagtagttctactgctttaaaaatcctctgtgctctgccaattcattccccccaaccccggcaaccacagatctttttactgtctccataagttttgcgttttacttatatgggatttttttcttttgagcctggttaattggtatcaaactagtttttagttgggaacgtgtccatttcctcatcctttgtagttctttaaacaactgtttttgtgtgtgtgtgtgtgtgtgtgttttgttttttgtttttttgtggagcaggtggttaacaacattccaagtgtcctaagcacaaaccagacagaacaatagcatccttgcacgtttctcacctgggtccccacccccaggggacccggaggggtgatgaaatggaagactgcgtcccactctgatctttgtcctggtcagagagggacaacaagaatgcagctggtaatagtatcaggaaggaattgaataccaatatttccgaaggtgacatctttccgttgccctggatctaggttgaatttaattcttaagcatgaaaaaagccagcgtattcagttaccagtcaactgagacatccattctgtatgtttatctggaatcttgtcacactccatgacttggtagactcttcagtttgttttatatttgtcattgtgtgttattcatggaagcaagatacttctttattgtgataccaaatggaataaagtgactgggagttacgcatttacagggtagtttactgaaggagcaacctgaagccattcttaatccaaagtaataaaaacgaatgttattaacaacaaaaggagagacataggttattgagcaagtaaagatcttctaagaactttgaggagttaggggcgaggctggaggtttttttttttttttttttgttttttttgctaacgtcagctctttatgtttaatttttaccagtcataaattccacagacaagcttgtactgagatgcagaaacaagccccttgtcttgtgttgtctatttgcctttcaaatgaggcacacctggttttgcaatccaggctataaggaagagattttttttcaatgtggaaaacaaatgattgaaaaattgtaaaattatcttatagattgaataggaataaatcatcagttgtttttagagcaggattataaaatatatacatatacatataattataaaatatgtacatataaaatatatatgtatatatacaccaacgtacatatttttgtcttatagtctttttgtttttttttgaattgtgttgtttttcaaaagtagcagagggtatagaatagtagaaaacatgattatagtacatttctcgttacattaagaagatgcaaaaaacattttcctcttctgtatttttctgtgatagccatcatttgttagtaattgttacagttacgaaagatttggtaaaagttaaaataatgagttagaaataaaagctaaatgtgggaacagaattatgttgagtgtttaagtagagcatacattaaaaatagattcattgaatccctagattattaaaatatatattaattcagcagaaaccctttgaatctattggcagcctttgccttttcatgtttttttgtttgtttgtttgtttttgagatggagtcttgctctgttgcccaggctggagtgcagtggagtgatcttgactcactgcaacctctgcctcctggattcaagcgattctcctgcctcagcctcccaagtagctggaattagaggcatgcgccaccacacctggctaatttttgtatttttagtagaggcgggggtttcgccaggttggccaggctggtcttgaactcctgacctcagatgatccacccacctcagtctcgcaaagtgctgggattataagcgtgagccactaggcttggccacctttgtctttttaagaagtcattttgcttctggggacattaaaaattgtttacttttatgttttataaaagcgttaagttgtcctataaactataacaattttatatgcaacgctgaaaaagttggactttgaattttcttaactttgggatgttacagtaaaagtaaatagtaaattactgtctctcttgattttatacagaaaaaatgtataaagttgcactaatatcttttaaagtatttttatgtgaaaagcctattttggccttgtcctgttggattttctggcctgagctgccctactgtagttgaccacgggaagtataatggtaaatttctcttttcttattttggtttatacaagaaaagtaatgggcagcgtgcagtggctcagggctgtaatccctttgctttgggaggctgaggcaggaggatcacttgggtcaaggagttcgagaccagcctgagtaatgtagccagactccgtgtctacaaaaaaaaataaaaaataaaaatcagctaagcgtgcacacttgtggtcccagctagttggggggctgaggtgggacaatcacttgagcatgggagtttgaggttgcagtgaactatgattgtgccattgcactctgaccctgtctcttaaaaaaaaaaaaagaaatgattggaaaatgcacatccagcaatcactagtttcatagttttttgtaaaaataaatcacattgtcagagagaagacctatttgtcttatttaaaataggtaatctgacaacgtgattatctttttaagacatcttatttaagacaaatgggttgagtgacaggagattcttttggaaactcggagatggcctatgatgaagcctaaatgtcactgtgaaagtcttgacctgctttctccatcctggccaacatcctagcctggtcaacctggtgaaaccccatctctacaaaaaatacaaaaaaattagctgggcatggtggctcatgcctgtaatcccagctactgggaagaatgaggcacgagaatcccttgaacttgggaggcggaggttgcagtgagctgagattgtgccactgcgctccagcctgggcgacagggcaagaccctggctccgaaaagaaagtctttacctgcttcctgcaggtaccctttcttttttgcagacttgctgcccatagctggtagccaggattcccttccttttgctgttttccttctcattggttggtcctgtatacttgtcttagagcaagtttcttcttgtgggatatttgtttatgcttttattctgttctaccagtatgacctctaaactcaaagagttggtactcttgaagttgagtgagggtacattaagatgtggtggttaggacacgggcctgcagcaagattcaagtgctttgatattccttttaagcagatgagtgaatactgtgtttttgaattggaagagtgtgtcttagtgagttaaacttgcattgactgcagattttcactaaatatcctactctccaaattatttaaggtcattttaaaaaataaggagaaagcaacccaaatcagtagacagaatgagttatgtggctttctttagctttactgtctttcatttactcagtaacttgatgcctttttgtatctcatgccaaatgtcttctgtccctcagtttcttgcacacggagtgtacctctccgacaacacagcatatttgacttgttttgttggtgtttggttgcgtcatgatatatctttgattaggttgttcacttgctgcttctgagccagagacacacccgagacttagtagcttctgcagagcctctcagatgtttgctgaatgatagtttggtctttttgtgagaaataactttttttttgggggggtgggggcagggtctcactctgtcaccgaggttggaatgcattggggcaataatggcttactgcagcctcgacctcttgggctcaggtgatgatcctcctacttcagcctcctgagtagctgggactccagaaacaccctaccatgcctggctaatttttgtgttgttttgtagagacagggtttcgctgtgttgctcaggctggtctcaaagtctgcctgcctcagccttccaaagtgctgggattataggcttgagccaccatgccctgcctgagaactatctctttttctttgttattcacacactcagtgaaaatcccaggtagtattgtaatgattatctggctttgtttagcttcccaactccctccccctcacagtgttcctccagcattcccattgtgcgtctatgactggtcttacccttgaatgggtccttcattttgaccactgaagcaaagcaaaattcttgccttattatatctaagttttagaattactggaatttgagcatgacctagttgtttggattgaattagtcattgtttttaattttacaaaggtttttcaatatctctttggttaagctttattaatattgatgcttcttggcttttctttttatgaataggcctctgaactccctgggactttgttttatgtaaaaatcaaaaccttaatcaggcactaggataaacaaatactgtgcagaatagagttctagaaggctagaaaggcctttggagtatttgaattattttaaatattaggtgcctcttctttaaaccctggaatagactcttaagtccatctctgcacaagtagtttagaatttcctaaagtattttttctttaattttttttttctttttgtgtgtgtgtgtgtgtgtgtgtgtgtgtgtgtgtgtgtgtgtttgtgaaatagagatagggcctttttatgttgcccaagctggtcttgatctcctggcctcaaatggtcctccccactcagcctcccaaaatgttgggattagaggcgtgagccaccatacccaaccagtattttttatttagtggatattttatgtcatactctgaggttattcccctttgtccgtgaagaggtgaggggctttaactctgtattataggaggggaatgagtggggaaaggaggaattggacatttctgtttttcttctcatctacctattaacttgcttctatccatgggagccctttcttttttttttttttttttttttttgagactgagtctcgctctgttgcccaggctggagtgtagtggcgctgtctgagctcattgcaacctccacctcctgggttcaagtgattctcctgcctcagcctcccgagtagctgggattacaggcatgcaccaccacgcccagctaatttttgtaattttagtagaaacgaggtttcaccatgttggccaggctcgtcttgaactcctgacctcacgtgatccacccaccttggctgcccaaagtgctgggattacaggcatgagccactgcgcctggcccatgggagccctttttgattaaggacacctgaccatccatccattagggcatcagaatgcctgctgattttgttttgttttgttttgaaaaccagcgggtgggtgcaggcccagtactgccctctcttgtctctggcagccttggcgtccctgttccctggggatggaggtctgctttgtgtttccagtctttgtggaaagcacatcaggtaggctcaggtctcagtcctctctggttcagcttttcttttcttttctttttgtttttgttttgagacggagtcttgctctggcgcccaggctggagtgcagtggcacagtcatggctcactgcaacctccacctcctgggtccaagtgatcctcctgctccagcctcctgaatagctgggactacaggggtgcaccaccatgcctggctaatttttgtatttttagtagacacagggtttcaccatgttggccaggctggtctcaaactcctgacctcagatgatcctccctcctcggcctcccaaagtgctgggattacaggcatgagccaccgcacccagcctggttcagcttttctgattgcaacattaattgctggggggtggttgtcaggtttaccttcttctgggggctggcagccttcacttcagcagggagggattaggaacccctgtttggcctgccttctccaaggctgctctagcatgaatgaagctgtgcaatgcctggcacagggcagatcaggtagaaggggtcagagcaggttggttattttgaaagaactcaaactctcatttttattttattttatttatttttttgagatggagtctcactctgtcgcccagggtggagtgcaatggcgcgatctcagctcactgcaacgtctgcttcccgggttcaagtgattcttctgcctcagcctcctgagtagctgggattacaggcgtgtgccaccacgcacggctatttcttaattgatgcctggcaagtgcttttttggttgtttatgatattttgtttgtttgtttgtttgtttgttttgagactgagtctcgctctgtctccaggctggagtgcagtgccactatctgagctcactgcaacctccacctcctgggttcaagtgattctcctgccccagcctcccacgtagctgggattacaggcacataccaccacccccagctaatttttgtgtgtgtttttttttagtagagatgggggtttcactatgttagtgaggctggtctcgaactcctgacctcaggtggtctgcccgctttggcctcccagagtgctgggattacaggtgtgagccaccatgctcggcctgtgatgttctttatctttatgcattttaaaggaagccattgtcattgtcccatgtggtttttctggtatacatattcctgccttccatatctaccgcctaattcttacagaaatgggggaagagtgggcaaggggcacttagcagcaggatgcaaatgtgcatttaatgcaggagctggccacagaaagccttctaccacctggccttgaggcagtgaatactccaacctcccaaagctgatggttcactggctgctgctttctttttttttttttttttttgagacggagtcttactctgtcaccaggttggagtgcagtggctcaattctcctgcctaagttcaagtgattctcctgtctcagcctctcgagtagctgggattacaggcaactgccaccacgcctgactaatttttgtatttttagtagagacagcgtttcaccatggtggccaggctgatctcaaactcctgacctcaggtgatccgcccgcctcagcctcccaaagtgggattacaggcgtgagccaccatgcccagccaacattctatagtggggagcatatagatggtgaggagcgtgaggtctgatggtggaggtggaataggtgcaggaaggaagatgttttcagtggttcccggaaagtgtgtacaggttacacctgctggtgtgagttcctggaaggtcatggaagggtggctggcgtaatgcagagatgattgcatgtgtactctatatgatggtggctgcgtggataacagttcccagaatccactgctagcagggctgacttatttctggagaccaagaaggaaacattctgagttatttttatttttggcactaaatccttcagaacatttttccttcctcaatctcttagctgaaaatactggggctttgtttattaaaagagtaaatttaatgaaaagctatcaccaacaagtttttttcttttgctgtaaatttatagaagcaaagagtctaaaaagtgcacgttggagcaggagaagaatgtgggcagaggaagacagaggcatcgggttactgctggtgggcttgcagggacattgtgagtttggagcctgtttcacccatcttaggaaggtatgggtcaggcgtgatggctcacacctgtaatcacatcactttgggaggctgaggaggtggatcacttgaggtcaggagttcgagaacaggttggccaatgcggtgaaccctcatctctactaaaaatacaaaaattagccaggtgtggtggtgtgtgcctgtaatcccagctacttgggaggctgaggcaggagaatcacttgaacccaagaggcggaggttgcagtgagctgagatcgcgccgctatactccaacctgggcgacaaaacaagactccatctggggaaaaaaaaaaaaaacaaaaaaggaagggatgtcctgccctagaccgacagcccccagcacccagcctattgcaaatggtttctttcacttttgcaaatctgaacaagcatgcttgggagaagggcgaggaggcagggaaactggagtcatgttaagactactctctggaggtttctgttgtgcgtgtgccattctgccttttgggtgatgtggcttaatgagtcaagccctgatgactgatgctgcttttcttcctcatcttcctcctcctcttcctcctattgagtgaaagtcacataatatgaaaaagccattttaaagtaaactattccctgtcatttagtacattcccagtgttgtgcacctgccacatctcagccaagcacctttggaggggtggggcagatacattggtgtcattcttcctggggccaagtgactgggaattcttttgccaggctttgtagcaactttctttccaaggtgtaacttaagagtaggggttttggggctaggcctggagatgccatgttgattggagatcttggacacggttgtggggatcctcttagtgtggatgagaggacagaaaggagggcatccgagcctcctggtctgttctagggtgtatgtgatttaatgaggggtgacatacacgagctccgtaaagaacacgtagaagagaagtacaaataaatgttgtgtaattcttgtcttctgcatagagcttttttttaaagataaattttaagtttaactcctggaatgactggcaagacctaatgaaggtagagtggcagcgggtggtgatggtggcagtgatacaaatgtagatgattaccagattagataagtgtcgtcaatcactgttgaatacctgctctatacagaagtttgtactgaactgggagttctaggaaaataaaatacctgatcttgggcttggggagctgtgttgggatcttggttaatgtcattgttgattcttgtaaatacggaatctgaccccatatggagaaaatcatttgcatatttgaatgttactttggggggaaccctggcttttgatttttccagaaaaaaaatgtgatcctactgagcaaagcaggccacagctttgaatttccttcagatgtatgagtaggtggaaagtaatggtcaagtccttcttttgagttgactttcagtttggattacttgtttgcgagaaatctcaggcagaacttgtgaggatgctggaaaaaggaaattcattgtatatgaggatctctaaaaacttcccaaacgaatcagcctttccaaggaaaagaaatgccttttcttcaggagtccttaccttttttttttgagatgggagtctctctctgccacccaggcttgagtgcagtgatgcgatcttggctcactgcagcttccgcctcccgggttcaagtgattctcctgcctcatctcccaactagctgggactacaggcatgtgccaccacacccagctagttttttttgaatttttagtagagacggggtttcatcgtgttggccagcctggtctcaatctcctgacctcaagtgatcctcctgcctcggcctcccaaagtgctgggattacaggcgtgagtcaccatgcctggcagtagtccttaccttttttgtcatttatagacttgctcccatctggggaaggattcaaatcatcagtcatttctgaacaccaaagactatatgaatgctgactccaaagacagcatccattaaagtgcatatcatcataataaaaatatatgactgctggatttctttgctgagagatgctttgaagtacttttgtactattagcatattaaatgttgagaaaattaaagagtttaattttcttagatcctccttattcctaaaatgaagtctatgctattaacattgtattagtactaggttatagcagtagtgaattttaggtctctagaacaagcctccctcccttcctcctcactctttctgtccttccctccttttttcctttttttttttctttttttgaaaagaaggaatttttaaaaacgcaatggaaagggaaaacataaaaccagaaaaatatttcgcctgggtgccgttgtttgacttaccaactttattattgttttaatatgattcttgtttttcatgtcataaaggtaattgtgttaatcatcacatcagtctccctatttttggagaaaaatagaagaggtgacaatgttgacgttttctcatgttgcagagacagtgctaagtgcctcctaggggtgatcttatttaatccccacagcagccctaggaagtaggtattattactgtctttgctttcagaaggagaaattgacatttagaaattaagtgaattccccagagttagagaactctaggatatcagccccaaacctctgctctgacccaccgtcacttgggtctcagttaggttgccattgatttccagagtacaccagctcacctcctctcccttcatattctaagttctgggcagacagtctggtactgcacaggagctgcccgtgcagaggtcagcggaggtcatggtcaggtggaggtaaggtggggagagcgccatcaggggtctcagagaagggttcccagaaaggccacactgtagttgagtgtcagaggatgatttctagttaaccacctgaagaagggaggtgggtggagcatttcaagttagaatgccatttaaaaggcagggagcagacaaagacttcagcaggcctaggggtgggcatgtgtgggcacagatgcgttttgcatttagaaattatagtaagggagagacttctttgtttaaatggcattcatggactggtagacacttgccagtgacccactggcccatcaactagagttttaaaagcattgttctagcctgtccctttgtcattgggctgggctctcttgagaccttggaagagatttatggctgggaaaacggaagggtagtttcacatgatttgctcagactcataatcaagttattgttaagctgacagaacacctgctctgcagagccatgtctaagcgtgctgctggtcactttcactatgtcggagtagagggagaagagtagcattggttattcattctaacatcagccagagagccgcatgcctctgtaatccctaggaatgtattccagaacatcgattttccctgctctaaatcttaccctaatagaccctgcaataaaggcaaattcggatctgacacaattaccattttattgtgggctgtttaagtttcactatatttactttatgcttttttgtgtgtgacactactcactgactgaaaatgccatttttattaaatttgcattaatggaacaccgtagtttttttttttttttttttgaggcagggtctcactctgtcacccaggctggagtgtgcagtggcacagtcacagctcactaaagccttgaccttctgggctccagtgatcctcccacctcagcctccccagtagttgggactacaggtacatgccaccatgcccagttagtttttatattttttatagagacaggattttgccacgttgcctgggctggtctcaaattcctgggctccagcagtccactcaccttggcctctcaaagtgctgggattacaggtgtgtgccactgcgcccagccctggaccaccatgtcttatgcacttcatttgttggacaccacttaccgcactatgacagtggtttcattttttttcttttttttttgactgagtcttgctctgtcatgcaggctggagtgcagtggcatgatcttggctcactgcaacctctgcctcctgggttcaagtgattctcttaccttagcctcccgagtaactgggaccactatttagaagagtgataagtttgtggataaaaagtcttttcttcatagaagaggtggaatacagtatgatctctgttcatatgaacaccttatgctcttttaaaagtactttttcccctttataaaaacttataggccaggtgtggtggctcacacctgtaatcccagcactttgggaggccgaggcgggaggatcacgatgcatacaccactatgcccggctaatttttgtatttttaatagagacggggtttcaccacgttagccacactggtctcgaactgctgacctgaggcagtctgcctgcctcatcctcccaaagtgctgggattataggcatgtgccaccacgcccggccgacaacagtggtttcttgcatcttatcatcatttgagtttgtcttcccttgcctgccaacttatcaaagtttcctcaattacatttaatcaaatcctaggaagtacaaggtatttttaagtcttaggttatattttgtttgtatttgctttatagattgacttgaaacagttgggattttgtgtagttttcaaattgaagcattataatatggtggttagttgcaagagctcttggagtagactgctgggctctaatccctgtgccactgcttcttagttatgtgactttaggcatcataatagtttgtgttggttctgaagattgagttatatgtgttaaatgcttagaacaatgcttgacacctggcaagagctcagtaggagtttgctgctgtttccaccattccagaaggtacaagagtctaaacatacttttagaagagtgataagtttgtggatcaaaactcttttcttcatagaagaggtggaatacagtatgatctctgttcatatgaacaccttatgctcttttaaaaatgctttttcccctttataaaaacttataggccgggcatggtggctcacacctgtaatgccagcactttgggaggccgaggcgggcggatcacgaggtcaggagttcgagagcagtctgacatggtgaaaccccgtctctagtaaaaaattgcaaaaattagctgagcgtggtggcacgcacctgtaatcccagctactcaggaggctgaggcaggagaatcgcttgaacccaggaggcagaggttacggtgagctgagatcgtgccactgtactccagcctgggtgacagagcgagactgactcaaaaaaacataaaaaatttggagagtagaagaaaaaaaagtttctcatggtgggtatctaaagtaatcactacacattttgctctgtgtcttttagctttgtttcctccttaagcttaggttttaaaaatatgtagttataattgtataaataattcaaatattgattttttaaacttatgctaacatggatataatttcctgtgattagtatttatacagtaattaaaaatgcttgcataatagtacatcaaggtgatttttcacctttgtttatttaaccttgtgttctttttgtttatccaaccatttgtgctcttgttcccagttttttttgtgagtgattctctgatgactgtatttctttataaaaactcttttttatttgggcagtaatccccgaagtagagtcattgagtcaaaggcaaaaaatgtcattaaatctcaatgcacgtttacgttgcttcccatgaggatgggcacgtcagatgcaagatctttttcactgtacctcctcaacattgggtatcatctataaaatgcactaccgtttaatggaaacaatatgtcactggtgactgaagattttaactagtggatgtgaacgttttcttgtataaatgttgcctaattgtgttgcttcttttctgaatcctctaataacatcttctggcatcatcttggtggtttttctttttttttttttaatcacagtgttttatcagtttatattaactcttcatatataaaagataaccttttgtctatcatacttaaggcatttttttctagcttgttcccctctttgctttaaaaacctttaacgttttgaagtttcaaatttcattcagtatattaatagcttcctctgtgatttcttctagagcttaaaaaaacctcataacatttttctaaatacagaggtgacagcgggaatcacatagtgattcttcacccttataactttaactgaaaataaaaaaagtgctatccatatgtggatggtagattcattagcaaagccccctttttcataacccctccccaaactgtctcctctgtaaaatgtttcttgctgatttcttccagggaaaataaagcatgtatttgcatatattttaacaggaatgagatcatgctgtactccttgttctgcacctcgcatttgatcacttcaaaatatatttttgagatgcctccatatgaacagttagaaccctgttatagaagattattatgtgtgtgtgtgtgtgtgtgtgtgtgtgtgtgtgtgtgtgtgtagaatgttatagtatatcctacaaatatagcatagtagtctaccaatggatgtattgttcagtcacacctataccggcagacctttgatcctttccagattgttaaactaagtacgttctccaccttccagaggtgtaagaaatactcagttttatttccttcagggttaataatccctctctgtgctcggaacactcttgagatgcaattagaaaaagacaaatctctaaatcaaagtggtgggacctaaaaaaagcctcgagggttatgaaggcttcgctttgtgatttgaaacaaggtaatttttttaaattggctttggtgatgtgtattggaacaccattgttttcagcataattacgcatttcacagcttaattcagccattacacgtgatgcagtgtttagacatagcaataattacaaattgtacatgtttacagatagatataccgctgatcaaaataaaacagtggcagcaagaatgatgttctgtccatgtaagaaatcaatgaaatataattaagaacgaactgtatctcattgactcaaaacattgcatctgcctttctgtcccatctgttttctaaacaaaaatcttcccgcgctgcgtggttgtttttatttgtatcctagaaccatcctctcgagttccacaccgttgtattttctacacctaagcttggtgtgttctgcacaggaaatgtttcttggatgttttatcctcataccaagtgggaatttaaaatttaagagattacccacactctttgcctttctgtacatgtgatgaagaaagagtgggtgtaacccagcactctaaaatgtgtttgacctgtaaaaaaaaaaaaaaaaaagtaagcaattaaatcctgttatagttgcttctgtgtttaaaacatacttaatgacgtatatatttatttgaagctaacaaagtccccagtcaggttcttgggagtttttttcacaggactcattgaagtgtttggtctttaaaatccttcatttcatgctaactgccaagtcaatgcagacagtatggccgaacagagctggtcacattttccctgaacatgctattaaaaaatatattcactgggattctcttgactcatggcatagctgaggtgactttgattccggagggctattgcttatgaattgcatgtggaagaactaaaaatagaaatgtgaattttccaaaagaacactatgataccaaaaatggctcactggcttgcctagagctgggctgttttgtgcccaaggtacagtaataagaactgggatgcaaagccctgtagggtgcatctgtccccttccctgacacccctcactcccagatggctcacgagtggcactgcccggttgtctccgtctcactcttgcacgatgttctgctgcctgtctgggatggagcaggtgttcttttgaatgtatttgttaagcctctgaaatatatgcatttccccctccccaagaaaaacacacatgtgcatgctctgtgcttttccctggttactgtattgttcccatctttttttttatttttattttttcccttggaatagggaatatccactcattttctatttagtcccttcaggaatttgccttaggggctgttgggccaggcctcactgcagccagccagagcttatcagctgtgtgttaacctctcccagacacttcttgaatgctgttcatgcatccgagcctatgcatctgagcctcctctgtgtaatgtggtgcggcattaaaagcttacccaaatagcagggatgattgcatcttgttgattaccagggctgataacattttcttgcttagctaaaaagaaaagccagatgactgtttccaggaagtgataaactgccatgcatccggccccaggtggtccgcatgaaggaagctgcaaggttggaatcctcctgccgtccccttttacagttcataaatcttctgatttatggggccatttgtgattgcagacacatttattcatggggggatttccatcgagatcataacccactgtaaagcaggaggaagaatcaggaattagaacggtgtacattcctctttgttagaaaagaatcccgattctttggtcatagacaaatatttgcttttgaagaatctggtggtgtgtcgctggctttgttcatatccgtgcacagtcacatgctcccttgcctcccatggacccagaagcttatgttacacagatcgttttataatgcttgccatccgggcatgtttatgcaaagtgtgaataactttttgccttagcctcctcttccttccttctccctcctttgatttagctcatttctggaatggggcagattttcatctcagggagttgatacggtttcctaggtagggtgacagaacaagtgtcaccttagctgtagctagagatgaatattgccatgcagcttacttgctttatattaaaccagcattagagaaagaggccttgcatcttttatcagcagtatgttaacctctcccaggcacttcttgaatgccattcatacatctgagcccatgcatctgagccttggatgtaattaaatcagtggattaggaagtcgggggcctggacctctgggaagccacttggcctccctgggcctcaatttcgtctgtaaataggtaaaaataattctaacagttcccaagcatttacacctgctatcagagtctccttagatgttgtgagggggaaatgaatgaatagatgtcaagtccccaagtagttttttctttgtttgcgtgtttgtgatcactctgttgcccaggctggagtgcagtggagtgatcttggctcactgcaacctccacctccctggttcaaatgattcttgtgcctcattgtcatgagtagcagggattacaggcatgtgccaccatgcccagctaatttttgtatttttagtagaaactgggtttcaccaagttggcgagggtggtctcaaactcccgacctcaagtgatccagccccctcggcctcccagagtgctgggattacaggtgtgagccatcacgcccagctgcaagtagtttttaccatataataagggctcagtaaacattagctctgattaccatcatcctggtttacagatgaggagtggagacagaggagggctaagtcatatggccaggggcacacagcatgtagcagagcccaggttgtcctcaggaacctatggtctttgctgtcaccctgtgctgcttctcaggaaggcaatagcttgtcacccattaaaaatgggtagttatttgaatgaaaagcagaataacccccggaggcagaggttgcaatgagctgagattgcaccattgcactccagcctgggcaacagagtgacgctcctgtcaccaaaaaaagaaaaaaagtaaggactccttgtgtgaaatgcacatggttgcttttaacattgcagtactggactataaacatttgctggggattggcagtgaccagccatggggcagagcatggggcatgggaggggagcaaggccttgaccccgggaagctgcagtccagggaagcagtgtggacagtaagcagagatttgcagggctgtgtaataaattccaggagaaaaagatctccaggggctcggagaggcctgcgggatggaatctgtcttgatccacgtgtgtgtgtgtggggtggttagatggatgggaggtctccaggggaggtgagtcgtagggactttctgtaaaaccagggcccctgacgtgtgatgggctgtacaaattactggcagcccaactattcatttatcaatgcacgtctgtaaatatttttgttttctttttaaaccttttttgttttcctgggagacagagtcttgctctgtcatttaggctggagtgaggtggcgcgatttcagcttaccacagcctcaacttcctgggctcaagctatccttccactgcagcctcccgagttagctgagactgtaggtgcgtgccaccatgtctggctaatttttttttttttgtagagacagggtctcactatgttgcctaggctggtcttgaactcctgtgcttaagtgatctgtgcatcttgtcctcccgaagtgctgggattacaggttgaaccactgtacatatcccgtgtaaataacttttagcctatctattcactagctaacactttttcaccagaaggaacttctggcatctgggtgttaagctaaattaaagcctgatggtttttttcagagggtgagaggaaaatactgaagggtcaaatggggaaatgtcaaatttccattttgtcagcacactcagggcagcagtgtggaagatggatttcaatggagtaagaatggagtcagagggaccacttagaggtaattcagacaataataaacaatagaggcccccaggtaggtccttggggatgaaggcaattgagtcttggatgttaatgaggcagagtcctgggcctctctcctcctagctctgagctcttgaaccttcccaggctccggtttcctcatccattagacagaaagcatgactgatttaagtgtatgtttcaagaaaaattttaaccacagcgggaagaagactgcagcatgttttaaaaaacagaaagcggaagtgatttgataagattaatttcaacaggactgatgtggaacggctgctagcttaattggtttattagggtcgtgtagccaccctcttatgatggataccaggtgaattccaggagatatatagtcttaggtttgtaagcagtgccatttgcagaggaataaggttctttatttcttaaatttggaagggtctcatagaaataagagactttataaatatctagtaacctgtcaccgctttaaaataccgcaaagataaatgatgctgattgtcgcgtgcttggcatgatgaattatgtatgtagcgtgccccggagttctttatggttgtgcataacgaatcagcttttgttctagcttattttcagtggtagtgcttgtaaaagcagaggtcaaagcagatgcactgaagagatgtggttggtgcaggatgatcgggttttgctatcctgttctgtgcattgcttttgtttgtgctttgatttttcattatcaactttggggagggtgggagagcagccttgtggcattaacagctgcatgatggcacagagcaggcagcgactcttcttggttcatgcacctcaaaagcggccctctttttgccttcctcctcctcctctctgcacctgctttgcatagctgttaactacttttccacctaataataaaggaaattgaaataaatggttaggaacatgcccataatcttttttctcactgactttctctaaactctagacgaaactagagaggattaagaaatgtaaaacacagcagagaatgtcttttttttcctctccctttttctcttcccctagcaaagatttctttagaatctgagtgagatatcagaggtgctgtttgcatatgaagtagcgatgactatgggtggaagccagttgtaaggttgcatagtcatttataacttctttctatgttaaggttactaccgactttatgagaggagcctcccagactcaggtgtcatgcctgactcatgagtaattcattagagagggcccaagccatgtatttcattgtgggtttgtgagcggcctcatcttccataagatgctcatttgttgggctgatccaaggcaaagatccgagtagttgggagtagctccaaattgggatgagcccaggcctactgtgcatatctgtttggaagggcacatctgtctaccaagggctggttccagtgtattagccgagtggcactaggtaatcagtttacagtcagtttaaaaaagttgaggctatccttctcggtgattaattatggcttttagttcatactagattaaaaaaaatctttgcatctttgcaagaataatcattaacttagtttgtctatattattagccgaaagatacaacacagtgctcatgcagtgtagagaaatgagataacatctagagtttacatgtaagtagctatttgtcaggatatttattcattgattctagattcataaagcaggagtttccagaggccttgcagcaaggaataagcacctgggagattcaactgaatccccctcagagcctgtgcgttgggaacttggtctagaaaatggatcaggtttgtgcgctataccacttattataataaatgataaaagtcagtctggacagagtgccacagaagttcaggcgagaaagaggattcttccaactgagtggggccatggaaaaactcgagttccatttattagcggtaggaaacacatgttgagaatgaagaatggagttaaacaattggtctttccctcagatcccagggtttttaacctgttactaaaaaagtatagcaatttatggccaggcacggtggctcacgcctgtaatcccagcactttgggaggccgaggtgggcccatcacgaggtcaggagatcgagacaatcctgcctaacacggtgaaaccccgtctctagtaaaaatacaaaaaattagccgggtgtggtggcgggtgcctgtagtcccagctacttgggaggctgaggcaggagaatggcatgaacccgggaggcggagcttttggtgagccgagattgcgccactgcactccagcctaggagacagcgagactccacctcaaaaaaaaaaaaaagtatagcaatttataatgtttgaattatcattagcttattggcgtgtaataatactttgcatacttttaaaattctggggttggattaataataaaagagtagaaacattgtttttataaaaaaaattttctgtgcgacacctataggcaagtacctatgggcctccttttaattttggactgttttaggaatgttttattttatttttggtatcttaggaaccataagaagcatactttcaaaaatgtgagggtatatttttaacttttgttataaaaatgtaacaaaaagtttatatggtgaagaatttagtgggtttgcatatgctgatgaccattgtgactttcataaaaccccacagcctgtgtttaattccatttcctactagtacagacttgaagagctcagtccatctcctttattatcttgtttcctttaatctatattaatgcaccttagcagtatcagaaattttgttaatatattatgtgtagctgaactgtaagctaaaaatagatcataccaacccatctctctttctctttcttttttttcccactgtcaccttcacatttattcttagtgacttgcaaatgatgggattacaccttaaaaattgtcttgtatcagatatgtatttccccattctctaaagaaggctaattatgcaagtacacggttctttcctgattcatgaattcatatcacgattttattttcagattcctcaaggtaattgcttgttagactggttcacaggatgagagatatccaagtagtcatatgaaccgtttccgtcccattcatgccattctgtcttctgcagaaaataagtgagtcaatcactgtttatgagaatgtgtaagagactggggagagagaagggactcagtggccattttgtatcacggatcctttttactagggataagagtgatccttactggctgactgcagtggctcatgcctgtaatcccaaaactttgagaggttgaggtgggaggatcgcttgagcccaggagttgaagaccagcctgggcaacatggcaaaaccccatttctacaaaaaataaaaaattagctgggcgtggtggtgcatgcctgtagttgcagccgttggggaggctgaggtgggaggattgtttgagccagggcggcagaggctacggtgagctgagattacgccaccgtactccagcctagaggacagtaagaccctgtctcaaaaaagaaaaaaaaaaaaacaaaaaagaagtgatccttgctaagttgccatagatccctgttctaggttcccattcagcgtcagagttttatcgtctgataaaacagggatcagttagagagcttttcgcaggcaaaatgacactgattttactgaaccaatggtaaagagaagtgctcctaggttcccaggccctgttcttctgtattcttcctgcttagaaaaagagaataataaaagcacttcagctaggagtagagctttctaaaaattggccagccaaatccccagggaaaccaggatttcagcttctctgtcatcacctctgtttgaggttggcatgctttggcactttttccgtggctgcactgtcaggagagtaggccaagccgcctgaacaaggagaggtgtggaggacagtcattctgtagctgcagtaatccctgccctagtttttctgccttcctgagagaaataatagacaccacttgttttacatcaaccaggcttctgacctttttggactatgaaaattaaattcttctaagacactaagtgttaaatttgggacccaaaaatagttggactaagtggctgcctggtttaatagtggcaactcagttcagataataattactagaaatttcaaagaagttataggagcctcaccttgagtagactaggatttgacagttgagtgatatacaattgtacttaacagccattttctaaaatgaagttttctggacagtaattcatgtcaagtgtcatctgttgcttttctatgtgattccacttcaccagggctgtcctgggaggggtccttggttgtgtttagctttcatcgagttagggtagtaactcctagtctccttcctctccatcctctgtaccttgtgtctcttttcccatttctgatttttgtatccaggagtttctgatttttgccttttgagttttgtttcttaaactaagtggagctaggtttttatggggaaataatttctcagcctgtcatcttgacagtgaaacatttcttttttttttttttttttttttttgagatggagtctcactctgtcatccagggttgagtgcagtggcacaatcttggcttactgcaacctccagctcctgggttcgagcgattctcctgcctcggcctcctgagtgactgggattacaggtgcatgccaccgtgcccagctaactttttgtatttttagtagaaatggggtttcaccatgttggccaggctggtcttgaactgctgacctcaagtgatccacccaccttgccctcctcaagtgctgggattaccggcatgagccaccagacctggcctgaaacatgtttttggtttgttttttaatctaggtggaaactagataccctttctagtaactaatatgtggttcatacctaaagccaaaagaaatctcaagtaattttttggatgagacaatttcggcaccatgttatataactttatgatatcatcttatctgagtcctctctctctccctctctccttccctttccttttttccctagtgcctgtaggtgtgagtttaaagataaaatgactgccaagtgaccccaagttcaaggacttttatcctggcatgcaactggaaaattcagtttacatgatacatttcaaaagtgtctggtgggtagctggtacaaatgataggaagagagtagctaattttatgctcattgtggttctgtaagatgatgtaaatatatgaggattttaggagaaataaaaagtgatctcactgaaacagttatttgtagattgcattttgacttgtctgaaacacatcaaggttaacataagaatatttaggatatgaatttggtccaaggaacattaaaaatatttttacttggtgattctgataggaagacattgtttctactaatgtgggagggtgggcaaagaggaggaggagtcgggcagggccattttgttgcttggtgtgaatggcatccttgaatcgtgcagtgggcggccctcatggccagtagcagcagatttggttgagcataggggcagaaaatggctttgtttttttaacttacccttctgtgtttatgttaccagaacaccagagatttggtttaggtcctgctgcttgccgcacagaaagccaatcactgctgagacaagtgttgccagggaagaaggctttaatcgggtactgcagccatggagatgggagctcagtctcaaatccatctccctgaccaactaaaattgggggcttatatagtgggaaggcaatgtaactacatgccggtaaacaggaattaggaaggtataaggaagaggagttggtcaacaggaagctggtggtcactgaggcagccataatgggtgaagggtctggtgtctccttgtccaaatgcagtgatctggtgagtttcagctccttgatatctgggagccctgatggttggttttctgagaaaggaattcagataaaacaaatgcaactttcttaagttttaagacagggtgggtcaatttctaagctcattagaaactgcatattaatagattagttctgtgagatgatggggtgggtttcagttacaggtaagggccagactcttagtgaaaacaggccatggtctgggttaaggaccagtatgttagggaaatgattctctgaggaagtccaaataggtaggaatcagatggtcaaaacagaggttagaaacattttaatgatatggtctggaaaaatctaaggactagagaccacgggtgcaaggggttatggccagtggaacaagaaaagatcatacgtggtaataaatataggtaacagtccattctggatgaggtcaactgggcaggaattctttatgctccatctaggcaggaaatacatggaggcctttgaagtcccactggcatgtgtgcaaggagccactgttaatttacacaggaaaaaggaatggagggagtaacagcatcagtttgaggtcctgtgatatatccattgggggtgaattgtcccacagttattaaattatttaaaaatcagtactgtattctaagttacactgcctgatttcagtgcttactttccggctatagtaattaagacagtgtagtattggcgtaagtataaacagatagattgatggaacagaatagacccacacatacatgcccaattgattatggacaaaggtacaaatataattcagtgaggaaagaatattttcaagtggtgccaaaacaatcagataattgtattaataaaaatgaaccttgagtcattccttgtactatatacacaaattaacttgaaatgggtaatcgatctaaatgtaagtgctaaaaatatacagtcttaccaaggaagcataggagaaactcttagtgaccttcagacgggcaaagatttttactgttaaatagactatgttttagagaagttttaggttcacagcaaaattgcacagaaggcatgagattgcccatctgttccctgtccccacacatgcgcagcctcctccattagtagcatccccaaccacagtgggactggttacaatcgatgaacctacattgacacaacattgtcacacgaagtccagtagttcacactaggtagggttcactcttagtgttctatgagtttggacaaatgtgtaattagatgtatccaccgttatagtatcatacggaagagttttactgccctaaaattcctctgagctctgcctgttcatcacctccaccccctaacagcagacattttttctttttagcatagaaactaaataattttttagtttaagaaatttttttaacttaatctaaatttaaaactttgggtcttcaaaagatctgttaagatgaagagacaatctatagtctaggagaaaatatttgaaaaatatatatctgattaaaaaaaaaaaacctcttatagctgagacaacccagttaaacatgagtaacatattttgaatagagattttccaaaatatgatacatgaatagcaggtaagtataagatgtcaacatcattaatcattagagaaatgtaaattaaaccactaggagatactagtgcatgttccctagagtggctaagatgaaaaagactgaccataccaaatgttgacgaggagctgtgacaactggagctttcctacgctgctcttgggagtggaaaatgatacagcatttggggaaacagtttgctagtttcatataaagttaaacacatgtttactagctaactcagcaatttcattctgagttaattcacccaagggaaatgaaaatacattttaaaaagatacacaaatgttcataacagctttttccacaattgccacatactggaaacaacttgtctggtgcacagataaacacattgtggtatgcgacatagcaaggaaaagagatgaactactgataaagcgacatggatgactctcaaaagcattatgctgagtgaaagaagccagtcgagtacatattgtatgactccatttatatgaagttctagaaaaggcaaaactgatacactgtcagaaagcaggtctggggccggtggtatggggaagggatttactgcagaggggtacaagagaacctttttgtggtgacgggaatattctacctcatgactgtagtggaggttacgagactatatctgtcaaaatgcatcaagttctacgtttaaaattggtgaattttattacacgtaaaatgcctttattatatcttgttaatttaaaaaataagttttgattatacgatttccttagatgtcctgaaacatgctgttttcacactaatttggtatataccttgtgattatatcctttgtatatgaatattgtggtaagtggaacattgttgttggagatatatccagattttctaccttagtttgtgtgattgattatattctgttagactgaaccacatgaaattgttgatatccaatcattcttgacctacaaaagcagcaatttcacgtggcataagtatagtagaaattttgtttgctttttaattcattggaaagacttggcaatggtcacatctcgattgtgaagtttcaaggattttgtaagacacaaggcctgagtgttctgttttacattacatgttttattttgctttaattcagttcggtagatgttttatatatgtctaccacttttcaggcattctacttgaaattacagtggatgaatgtaaagatgagtttgatattacctcagcccaagaaacgttaagtgatgaaattaaaaggcacgtgtagactttctgtcataatcgctaatagggactgtgaaatagaactcccagttcttgtcatgtccattgcagtgattataataaggtatttgggctttcatagtgatgaaataagtggttgtgggtttgtatacgtatgtatacataaatatgtatgcgtatgagcccagaagaaatggaaacgagaccaatgatttaatttgcatgaaaattagaactgtctgccaagagcaaacatctctctcaccctttttcaagagaaaaaaaggtcttgtagtttggcatgactcagtggatgacctcacactgattctcctttagttattgcttgaatgcgtggagccctcagtcctaagtgaggcggtctgggtgatgttatggcatttcatttgggaaagcggctgtcacttcatccttaagcctcctgtttgctgtgatggtggcagagccactctcagcaccacaggaagagccccggggaattcctgaagacacattctagagaatccggtacaagtgtatgtaggttggtcaccttgatgccttattttctcaggcttctagtagagatgcatgccagcaaaatggaaaggaacagagggcgttcttgaagtttcctaactggcgtattttctccttctctttttctaataattaagtacaggggactgagaaggcaggggttgttgttatttttacatggaatggacctaacctagcagtcagatgagattgttgacgcgtagcacagtctgttatctttgggcatctgccaccaaagagagtgtacccaagaagggctgtcgtgtgagtgggatgggtttccatcttttgttctgtgctctttctgtggaatctcaggcctgcgtgtgctccctctgaccgtaccttgactcttgatgaaggatttgcagccctgagagggagcaggcagacccaaattaattatttccattttttttgtggcactgtgggacaatgggagagaatacaggctttggagccagccaaatgtgtttcagatcctaaatcctccacctaaggtatgcagtcctgatgggtaagttattttaatttgtttgaactgccacttaactgaaaatgggattaataccagatatcacttaaaattagtaaaaaatacagttgacccttgaacaatgcaggcattgggggcaccgaccccccattcagttgaacatctaacttttgactttgcagaatttaactactaatagcctactgttgactggaagtcttactgatagcattaacagtcaatagcacatattttgtacattatagatattagatactatattcttacaatatagtaaactagagcaaagaaaatgttactgagaaaaccgtaaggaagaggaaatatatttactgttccttaaatggaagtaaatcatcggtgaaggtcttcatccttgtcatgttaaaattgagtagactgaggaggaggaagaagaggaggggttggtcttgctgtctcaggcatggtaggggtggaagaaaactgtcatataagtagaccagcacagttcacacccgtgttgttaaacgatcaactgtattttattaagctgtctttgaatagcaccaagtatcttagtgtatgagaaggcctctgagaagttccacagttaggaaacatggtgaacttttttttttggtgtgaggggcacagagtcttgctctgtcacccaggctagagtgcagtggtgtgatcttggctcactacaacttccacctcctgggttcaagtgattctcctgcctcagcctcccaggtggctgggactacaggcgtgtgccactacacccatgtaatttttgtagagacggggtttcgccatgttggccaggctggtctcgaactcctgacctcaagtgatccttgcatctcagcctcccaaagttttgggattacaggcatgagccatcactaccagccgtggtgagctttgtttaaccaagcatttttcaaacttattgactgaagaatctttatgtgtgtgtgtatgtgtgtgcatatgtaagaagtaacatccgctggagctggtattgtgcagaaaatatgttgagaaatataaaacagatatctggcttgtgttcctctatatagtcttttttgactgagaatgctttatccttgttgttacggatattttcactttgtttatttctattttggtctgaatcatgagtgtagttgatccttgaacaacatagatttgaactgcttgggtccacctcgacgccacctgtgcatacggagggctggctcatctcatatgcaggtcccgagggccaacttcaggactttatgcatagattttggtgtgctggggatgggggccctagaacccaaccccccatatatataccgagggaggactgtctatttttgttttttacctgtgaggccatcgccacaatgaagagagtatcccccaaaaggcatatttttaatatagttgtaattatagcattgcataatcgttttcagtaacataggtctcatctgttgctctaggtcttagtaaaataaatcactcttgttgaacccttcctaggctccaaaactggatgggccatttaatataattttaaatattaaatttaaattttctttcatttattagaattttcaaagggtaataatgttatatatttagattttgatgacatggagacatctgagacttgcttagttttaaaaaagcaaaatttatgtcatacagctcttgtaaggactgaataaaataatgcatataaaaatgcctaagacaatgcttggcatgtagtgggcacttactaaacaatttccttccttcccttgctggcttcttaactactccctgccttgtataccccctgtgctccgtcccaatttctgttcagatactagacagatggctgttgctttgggataggtcaaaggctgtcaggcgtggaggcaggcaaatgacccagatcagtgaacaccagtcattgtctcagagcattttgttttgttcagctcagctatttgaatcatcttggattttctcatttgtttagaaaaaggtttccccaaaattggtggtgttgggttcctgatagcaaaatgtatcaacaagtgggcagtcagcatatggaatttgcccaactctacagggaaacttgctttaggtattttaaaagttaacttgtcaatgtcactgtaggacagttatatatctactgagtttacaaacaaaagatttttttttgttttttttttgagacggagtcttgctctgttgcccaggctagagtgccttggtgcgatcttggctcactgcaacctctgcctcccgggttcaagcgattctcctgccttagcctcctgagtagctgagactacaggcacccgccaccatgcctggctaatttttatatattttttggtagagacggggtttcacaatattggccaggctggtctcgagctcctgaccttgtgatccacctgcctgggactcccaaagtgctgggattacaggcgttagacaccgcgccgggcctgaactcatttttaattagaattcttattatttcagtggctgaatggaggaaaaaagaaaggacctaagcccagaaaattcacaggtttgtttcagggtagaaaaatttggcatattttggcctggaagatatctcattatggaatcagaaatctgaaagggatattaaattaggagcaaacttgtgctgtgttggttaaccactgaaagttgcattggcagtttagtaactaaacaatagggccacacgcggaatttattgatgtctcatgaactttctgtttaaatctttattgctttgaattgataggcttcttttttcccttccactttgcttaagggactgaatctgtttttggcattctaagactctttttagaatttggcagtgcctctctaggatgttttcttctgcactgcctccaaaacaaaattatgaacagcctggctctttcggtatctctcctctttttttttttttttttttttttttttcactttcctgatgtgaaagtgtcaggttttgagccagtttgaaagatgagaactagaatatatttctctttctgatctagagaatcctagtggcttctagggcagtgtataaacaaagccctgtggctgcaaggtttcccgtgtgcagcaataaactgatacatgccggtgacaggaatctggctcatgggcttgaaaccatccattaactcattaattgaccagacatcatgggggtctgctgagtgccatggggatgctctgtgctgggaaagatgcaaagatgaataggctaggaataaaagaccaatttcattttttaatgtgtcagtatttttaatattgaaatgtaggaccttgcaagtaaaatactattaagctaatttcccaatttagagtctttgaattattgtcttggatattaaatatattcagtgtttcccaccagtggatcccaaagcctcacctgatatgtttggcaattgtcaggccctcttttttatactccagaggaattccaacaggaaatatgtacacaccatcccttacctcccttgcttcttttcttttctgcgtcctactttgtttgatcttgaaatacggggaagtatcttctgggcaagtgctgtttctgtgccaggctgtgcaggtcatgcttgccccagtgccatgagaaagacactcgagtgagctcgggacagatctctccagcactgtcctggcttgaccccacctgaccagtgactcttgtaccatgcccagctcctttggctgctggagcaaaaagatctagggagtttgttttccaaataagggccccagatcttactttcagagctgtgcatgtgaggagttcatggggaatccctcatctcagcagacatggggaagaccgtcttctaaactgtagttctgaaacaggtaaacattcagtccccgctcgctttcaaagcacaaaagtgaggaggcttatttggcattgaaataactgagcatcttttctcatctgtgtttctgaatctgttatggccagtgttttataacccccttcacattaccttgtcagtaacttgcttcagatgaaaataacggcagaaagcataattttttgtttttttcttttttgagacggcgtctcactctgttgccgaagctggagtgcagtggcgtgatctcggctcactgcaacctcagcctcccaggttcaagtgcttctcctgtctcagcctcccaagtagctgggattacaggtgcctgccaccatgcctggctaaattttgtatttttagtagagagtaggttttgccatgttggccaggctggtcttgaacttctgacctcaagtaatccacccgcctcggcctaccaaagcgccaggattacaggtgtgagccaccgtgcctggctgaaaacactgtagcgagttcatgaatcaggattaaagaatctgtgggatatatagaatgatagaataaattctataacgttcattttcattgtgcaggatggagacattagtgtgcatctcagttaggatttaattgctccttccctgtgttcttgaaagcgcttggaaagcgcctccaatcctccattgtatgattctagttcaggtctggctctttcaccagacaatgagctcctgtggtaagatgccatgtcttaattcatctgttttccgcttgtcctaatacaatgttaagattgccagataaaatacaggatgtcggctgagtgtggtggctcacgcctgtgatcccagcactttgggaggccgaggcgggtggatcccctgagcccaggagttcgagaccagcctgggcgacatggcgagacctctctcaacaagaaataaaaaataattttggtatgctgggggtgggggccctagaaccaaaccccccatatatactgagggaggaccacgactgtggtcccagcttcttgacaggctgagatgggagaatcacttgagcccaggagatggaggctgcagtgagctgtgatagtatcactgcactccagcgtggggtatagagtgagatcctgtatcaaaaacaaagaaacaaacaaacaaaaccccaaaaacccaaaaccaaaaaaacaggatagccagttaaatttgaatttcagataaacaataaagtgttgcttatgggtgggtctcatgtatacatctattcttacatctgaatttcacgtaagcaacgaataatttttagtgtaaatatgttccatgtgatgttctgatttagtcataatacatatttttttctttcttcctttttttttttttgagacaaagtccccctctgtcatccaggctggagtgcagtggtgcaatcttggctcactgcaacctccacctccaaggttcaagcaattctcatacctcggcctcctgagttgctgggactagaggcatgcaccacctcacctggctaatttttttttttttttgagacagagtctcgctctgttgcccaggctggagtgcagtggtgcgatctcagctcactgcaagtacggcctcccgggttcactccattatcctgcctcagcctccggagtagctgggactgtaggcgcccaccaccaagcctggctgattttttgtatttttagtagagacggggtttcactgtgttagccaggatggtcttgatctcctgacctcttcttgacctcccaaagtgctgggattacaggcgtgagccactgcacctggcctaatttttatgtttttagtagacacggggtttcaccatgttggccaggctggtcttgaactcctgacctcaagtcatcctgccaccttggcctcctagagtgctgggattacagctgtgagccaccacacccagcgtatatttttgttttgtaaattgggcaaccttatacaatgcccatgacttacaaaggattttttgctcctaaatcagtgtaatttaataatgtgaacacaactaagacaaatcaaggtgttcatggagttggttggtgtcttttatggaatgcaacatgggaattggaaatagtaattatccaccttcaccagtgtgttagtgagtatggaccatttaacctacaacagttggataaccttgacaatagaaataggtagctaagccaggggtggtggctcctagtactttgggaggccgaagtagggggatcacttgaggtcaggagttcgagactagcctgcccaacatagtgaaaccctgtctctactaaaaacacaaaatttgccaggagtggtggcgcatagctgtaatctcagctactcaggaggctgagacaggagaatcgcttgaaccctggaggcggagtttgcagtgagctgagattgcgccattgcactccagcctgggcgacagaacaagactccatctcaaatatatatacgtagctaggacctgacctaatggttgtacccacactgtttgccttgtacgtgccaggcactagcaatctaagttgtgtgtggttttttttttttttttttttttttaagaatgagcagacaccttgtgcgattgtccaggttaactaacaaaaatagttgtctgggtttatggaactgtaattacgagtcagatcctggttcccttccgctttctctgctatttctggttgctcctttttattcccaaaaggtagaaaggggcaggtaggacaggagcttgccgcctgttgaactagagggagtagcttccgagcaaactgtgacaaaatggggtattttaagcctccattttttttggggggtatgtgagtgtgtgtgtgagtcggtgtatatgtacacagtgcaagtaaataagcctgagtgggtggcaagagccttgtttgtgtagtaggagaaatggagcctgcaggggcatagtcggggtcttgagagcagacacacggactgagccaggcagttgctgctgagaacagaatcaggacctcctgcttcctttgggtgatattgggttttttaggccaccttcccagccacaaagtaggactctgaaatacatccgggtataaatgttcttatggaaatgcaatcacttctgactttaagtatgtagaagtgagggctcatacccttctcccagaatgtaaatttgactcatcggggctaacaacaatgatagcctaatataagaaactgtttaccggactctgttctgatgtcagccaagctagagctttgcatggtgggatgctttctcttggctgtgccctattagggaaggcaaaaatagaaagctttttctctggacttcagaacggaattaatgcatggttattaaaagcatcaatggcaaatggccatggaagtcagaatctcagccttaatgaagggcgatggtgtccacagaaccaattattttgcaaagaaataaaataataaaatcctcccattggttttagagtggctgaaaccagcaggcaccaggtctaaaccctcttgtgggtgtgtgtgtttgtgtgtatgtgtgtgtgtgtgtgtgtgtgtttgagagagggtctcgctttgttgcttacgctggagtggcgtgatctcagttcactgcagcctccgcctcccaggttcaagcgattctcttgcctcagcctcccaagtagctgggattacaggtgcatgccaccacacccagctaatttttgtatttttagtagagatgaggtttcaccatgttgcacaggctggtctcgaattcctgacctcaagtgatctgcccgcctcggcttcccaaatgtgattacaggtgtgagtcaccgcacctggacattgtggtatgttttaagtactcacgctaatgacatttataccttgcttggcactcctgaaacctcagctctctggaggacagaatatctgctaagggtgcgactcccatggtgctggagaggggtctccttcgaatggaagccggcattccaccacccactccctatgtatccaaaactgggcttggcatcgctgttcctgagggagcgctctgtccttattagggatccgcctggtgacctcagatttacacttaagcttcaactttgttgagggaaaacattttttctctgtcaccaagagaatggagaacactgtgatcgcttttcaagtctcacctgccaggaaatctttattttgcggggggcatcacaacttcctctttttccatgtaccttagtttactattactttaagtgttttggttggattaacttcctgtatttgttcttattttaaatacattctttagttaaagtgttactcagtgaatggaaagagaaaaacaaggcaagaggaaggggtataatatgaaagaatagagttttgtttccagttttgttttgcaacagtagataagaactgtaaactttctagtccctggttttttaatagtatatggaaacacgattttgttgtactacatggtaggatgaatttaattaagctgccaagcaaacttgttgatttagataacaactccacacgtagagtttgaagagcctgttttgtggtatctagacctcacttttaagagtatttccctgaacctgtccatgcatttctgagacgtttgtgtgctgactgtttgttttatgtttgtgcaaagcctagtgtcctactgacttgtagggactcattgaaatggcagaaactgtgtgcattttaagtgctggaggaatgctaaatattaatatttgggatcaaccacaaaatatagtttctatttataagacacccaagactaaataaactgtaggacaaatgaagggtgcacattctttttggtaacattcagcatcctgaaaaccaccaagggttaggaaaaagagaaaaatgtatttttcatcttctgtaattcatctagccttgggattttctcctaacctcttgaggcacgcttatatacgtgaccctatgtaagacttttgggtgataaagtcgaggagattcactaaggaggaacagagcaggtgtagtgcccagggtggtaaaaccacagatggagctatggggtgaatatggaacctgctagctggagatggggaaagagaagagatcgctgagattacgtgagtgttgaagggttagatgaattggtgtgtagcgggtgctgacctgatctttctgggtgttctgatttttttttttttttttttttgagacggagtttcactcctgttgcccaggcacgatcgccactcactgtaaccttcgcctcctggattcaagcgattctcctgcttcagcctcctgattataggtgtgcgccaccaagcgaggctaattttggggtttttagtagagacagggttttgccatgttggccaggctggtctcctgaccttagtgatccacctggcttggcctcccaaagtgctgaaattacaggcgtgagctaccgcacccgaccctgggtgttctgattttatatttactaataaactctgtggctttggacatttcagaggctctggttctatctcctaatctttaaaatgagaagctggatgaaatgatctctaaagtctgttccaatttaaaaattctgtcgtttgctaggaaaatattagcaccacagtctatctctctaatatgggaagttttttcagattgggtatcagtgctattaaacatttaataaaaagtgggaaattattagtgtgtattgtcacagacatgttaagctatttgcattttaatgaatgaaagagaactttaactgttaacatttaccaaggggtgtagctgagagttaatagtttacaaggggtgtaggtgagagttaatggtttataaatgttaactagtttaatagctgttagttgcctcgggatttaaaggtatacacactgatttttggttttggtagcctcaaacctagtcaagaatcatacaaaattatcttcattagaacaagcatagtattagccatcagtgctatgtaaggtaaagatttcaaactctctctgaggcttcattaaattcctttgctttcctgaaagtttctaccatcctgagaaagtctagcagcttcttcagagacctggttgctttctgtctcagaatatttaaaggaaagtacattttcttaaaatggagttttccctgggtcataccaggcaattagggctttgagccatgaaccgtcttcaggatttggttccctctgagagaaagggaaaggagataacttttgcccttgctagaaagtaaagcttatctacccttacctgtttgaagtttagacaaatagtttatttatacaaaagcatagtttcccttgaccacaatgaagtgtccacttggactgctcatttcttgaccaggagacacaaaatgcattttcagcccaggggaggctctttggggccacagttggactgaacaggaccgcagctgtgaaggtctaatttgcaactggcaaatatctttataataaccccacgtttcttactgacacagaatacacacacgtgtaagtgcacacacattatgcacatgtggggtggtgaaggcagaaaatcagtgaactgaaattacttgctgcaagtattactttctgcaaggctttcagaattacttgctacaaggctgggtgcggtggctcacacttgtaatcccagcacttcaggaggctgaggcaggcaggccacttgaggccaggagttcaagagcagcctgaacaacatggcaaaaccctgtctctattaaaaatacaaaaattagctgggcatggtggctcacgcctgtagtcccagctactcgggaggctaaggcaggagaatcgcttgaacacgggaggcagaggttgcagtgagctgagatcgtgccattgctcttcagcctgggcaacagagctagactctatgtctccaaaaaaaaaaaaaaaaaaaaaaaaaaaaaaggtaaaaaggaattaattgctgcagagctgttctttgcattgtgtacctttaccctgctagtgggaggaagtggtcaattccatcatgtagcaatttaagaaaaaagtaagtataatagtgttttgaattcagaagtaaatccctcttcctaccttcagaagaaaaaaggtaacttgatttaaccagtttttaaaaacaccagctttgagaacggaaaccgacttcgcactgtttgattaaattggttctgtggctatttaattcatttgtgttaagtagcctgtgggccgactgcttgccatagcagtctgtgtttttcatttgtttgctttaaaaaacacgtcctaatgtaaggaccaaaatctttgtccattctctattgagtactcaatttatggtttaaaaataactacctcttgcgagatctgattgtttaaaaaaaattaataactgcccagctccgttagtagtaaaagggcttgtctttatctcatgaagtattttaattcaatttccagttaaatgatcaggggtttttgagttctgcctgagccgtttgccctttacgtgtgtctctttatgttaatggctttcacttttattcctttgcctgcagtggagaggaaaatgaagtgggatggcatggcttcttttttttttttttttcttcctctttaggcctgactggccctttttaaaatggaaagtagaggcactccctccaaatggctaacacgggttcagcggtgtgtaaattggagtcataatcccttctttgaagactaggaggaggctattatgataaatgttggagaaatgattaaagagatgagaacagcaggatgcagatggcaactgcaaaccctgtggtgtcaggtggaacactctgggagctcggctaaaagggacagagaagcaaagggactagccagtgcagccctgggcgggctgggtggaaagcagccgtcccagatgattgtcccagcagttcagttgcaacccagtgtctaggctgtgctttgttttttctcaccttttatcctaggatggggaaaatatcccctaacagggaaggatgtttggatagtgtttttaatgttacatgtgtgcatcacagcaagtatactgcctctttcaatatttacaaatctttttttaaagcataactgtggtgtgaaattgaggttgttcagcaacatgggctataccagatattgattagactaagctgagcatcccttaatgaatgaattgactttaaacacctgctgtctgaagcggttgggaatagaaactctcctatcactgttgatgataaaatggaattttagttcatacacattttctgaaggtccagagtgtgcagggaatttactgcaaaattgttttatacgtctgtcatgagatgtcttcatcaggtagttagtaaatgacaattctaagcatagggctctttttatttcttagtatataaccaccagctgtcttatcaataatgaatttccattctgtcttttgtcaagtagatcctgcctgcttctgagtagatcctttctgcttctttgtttcttaagatatttctggccgggcgtggtgactcacacctgtcatcttaacactttgacaggccaaggcaggtgcatcacctgaggtcaggagtttgagaccagcctggccaacatggtgaaaccccgtctctactaaaaatacaaaaattagctgggtgcggtggcacattcctctaatcccagctactcaggagactgaggcaggagaatcacttcaacctgggaggtggaggttgcagtgagcccacatcaagccattgtactccagcctggatgacaagagcaaaactctgtctcaaaagaaaaaaaacaaaaaatatttctaactagcgagtatacacaagtacctgtgtctccagtcttcctgccaattacgaaaaatatcattggtgttagcctcattttggtgattcctctgaaaaatctaagacaattgtttttctgagtgtgtttggaggagggatgttggaattcactcattcatttattcatccattcaacaaatatttattgtgtctggcatatagtagatgcataataagtttattccttcattctgcaagcatttgttgaatgcagtgtatcaaaggtcatcgtagacactgcacaaagtcattgtttttatgggttttacatacttgtgatgagagacagaatgatgggcggggtgggtcgctgctattttaaataaagcagccaaggaaaacctgtctaggagggctaattcagcagaaccttgaatgaagtaagggaatgagcaatcttattatgtgagggaagagcatttgaggcagggagaacaagtgcagaggccccgagacagctgtgttcttggtttgtttgaggcacaacaggaaggctgcaagcaggggaagaaggagaaaagagatcagagaggtgccagcagcagaggggagattctgtgaggcttgggaactttgagctgagaacattttaaatgaactagttttaaaaggtcctggagagtgtgtggtgaataggtaagggtgaaggcagggaggtaaggcaggagacttttgcagtagtttgggcaaggaacactgataccttggacttgcatagtagcagtggagctggtgaccagtggtcattttcttctccttctccttctcctcctccccctcctccccctcctccccctcctactcctccttctcctccttcccctcctccttcttatcctcctccccctcctcctccttcccccccccccttttttttggagacagagtctcgctctgtcgctcaggctggagtgcagtggcatgttctcagctcactgcagcctccacctcccaggttcgagcgattctcctgcctcagcttcctgagtagctgggattacagatgcgtgccaccatgtccagctaatttttgtgtttttagtagagacagggtttcgccatgttgtccaggctggtctcaacctcctgacctcaagtgatccgcctgccttggcctcccaaactgctgggaatacaggtgttagccactgtgccaggcccattttctagatctgtttggaggatcgagttgaaggggttgttgatggatttgttctgggttttgagagaaagaggtaaagacaaaggtttttggcctgacaaccagaaagatggagttgctatttattgaactgggaaagctagggagaggagcagattttgtggggaaaattaaaattgggtgtgggacccatttagttttttgctgtggttgttatgaaaagctattattgtctcattcagtcttctctatgcttttctatagggataagtgtgcttttgttaacaaatctcagagtataacactaagcttaagatagggaaatattaagtcaaaaaaaggaaaattcaggataaagactagaaaagaccactgaggaagaagcattccccggagcctgccatgggccccccagcaggagggtcttgtcaaaggccatttaatgaaattataagtgtctcattgagaacctgtttccggcagcctcacagatgccactcataatcttctgctcctgggtctgccgctagataagcgtgcacccaggcttgggtttcactacccggtatgctctgtgatatgctaatattactgaaaaggaatatgattttctgctgcttcacagatacatcaattgtaatcttgccaatactggtattgatgatgaaagcacctttttaaaaaagtttttaagtgtctataggactgtttctgacttttatgtgaactaacctagaaaactaccattatttgttcagctgattaaatctgaaaaagaatggcagttgaagcagaacataaaaaatccacttgattttatcctctttgcatatgaatgacagagggtcagtttaaatttctgttcgtaactctaaagggaaaaacacatgtgcattcagaatactgagggtagttgtatcttaatccattttataggtcttcttagttttcctcttactccaacaaaaatgaattcttttcttcttcttcttcttttgttgctcttgttcttatcttcatccaaggattgctttgtcatgcagatagttttgggccttcttcttgaaaatacagcaacaacctcactgaccagtattagaacttaaatttgcttatttggccagtggttatggcctctgtgccagacactgttttgatgtagtagtagtgccaggtaacacccctcctctctaggagttgaaaatcaagttggggaagaggaatggtcagtaatccaatatgccaattataatttaagctttgagaagatgtaagagaggttcaggggatagagtgtgatgggtggtgcatgagagatggtctgagaaggaggcatctgaagcagagagctgaccttgcggagcttcccgtttatgcccgagaaggtggacagaagccagccctgcctctgcagaattagagcacgccagttgtgtcatttttagatcttttcagataagaagctggtgcaagagtcatgctaactttaaacaatgacaggtgtgctgtgtatatgcctaggcttatttgtattttggtaaacaagactggctaagtgtgaatagagtcatgttttgaagaagtctggactatttcctaaaatgagcaaatgacacatttgaagcctgcatctggtgagactacctgtgagtcatttttcccattttaaagagaaatagtaatattgagacaatgattaactgacttagaatcatacagtttttagggctcctatggaaggacctttggagacaacgttggttgatttttcctgtttctttggatgacaaagctgagcctgagaaactgcccacagttctcttgctaggttagtagtagaagggctgacactgcattctgggcttgctgacttcagagttctttcttctccatctgtcattcttttcaaaaggattagaatttgcgtttctgtgcctttcagcatgacacccatgtaggtagagtcccagagaacagtggattgttaattacttaaattgatcccacaatcccttataaaataagattctgctattttttaatattttgtcctctttaggcaggtaatactgctttggttaatgataaaacagaggtaattaattcttcaatttctacctttccatttttggaccttagcgtaaaagttaaatttaagagaaatgtgactccttttccagcctgtaagatagggatgagttcgctgatgtttatgggagcaggtgcagggtgacgtgtggggagaaatgagcctctgccctctcttctgacctgcttcttccacaccggacctgctcacctttcactttcttctttttctctcccaaacagaccccgctccctgctttctctctcactttctttttatttatgtgtttatttatttttgaaacggagtcccactctttagcccaggctggcatgcagtggcatgatcaccactcgctacggccttaacctcctgggctcaatccatcctcctgcttcagcatcctgagtagctgggactaaaggtgcacaacaccgtatctgagtttctttattttttgtagagatggggtcttgaaatgttgcctaggctggtctcgaactcctggcctcaagtgatttgcccacctgagcctcccgaaatgttgggattacaggtgtgagtcacagcacctggccctctttcgctttctttttttttttttgagacggagtctcgctctgtcgcccaggcgggactgcggactgcagtggcgcaatctcggctcactgcaagctccgcttccggggttcacgccattctcctgcctcagcctcccgagtagctgggactacaggcgcccgccaccgcgcccggctaattttttttttgtatttttagtagagaccgggtttcaccttgttagccaggatggtctcgatctcctgacctcatgatccacccgcctcggcctcccaaagtgctgggattacaggcgtgagccaccgcgcccggcctctttcgctttcttagatgctaaccagatactactcttttgtttttctgttaattcaaaccatgctaatttgtaaatgcagattgcaaaggcccaagtgagaaattggagagatcacagggagcactatgagcatccgtcctgtgtcctgcagcatcaggtgggaaggaagaggaggcagtgtctgggatttctcatgatggtgcatgggttactaggattagggcattgcttctctagctttaacgtgctgtccgatcacctgggcaccttgctcaaaatggatgatgctgagtccagagattggggcaggggctgaggttctcctttccttaccagctcctgggtgatgccggtgctgctggtgcagaccacacttgatagcaaggctgtacggatgaggcttctagtgcgatttacacgtgcgtcctgtgtcactttgatgttgtgagttactgtgtaccgaggaaatgttagcattcaaaatcagacgtggggtcgggcatggtggctcacgcctattacaatcccagcactttgggaggctgaggtgggtggatctcctgaagtcaggagttcgagatcagcctggtgaacgtggtgaaaccctgtctctactaaaaatacaaaaattagctgggcttggtggtgggtgcctgtaatcctagctactcaggaggctgaggcaggagaatcgcttgaacctgggaggcagaggttgcagtgagccgaggttgagccaccgcactccagcctgggcaacagagcgaaattccgtttcaaaaaaaaaaagaaaagaaaatcagacctgtgaagttacagtttctccggaagaaggtagggtgggtcgtgctgcttctttcaggacttcccttgaaaacctgcagcaggctgtccggttactaagatgattataaaggcgcagccttgttggcactcagcctcccacattgcttggctcattctttcaccgtagagaaacaccggctctgattatttttaactgcatgccttgctgagactgagtaggggtttttatttctggagctaatgcagaacacacatccctctttctttaaatgcagaaaatctcacataaggttgccaaagtaggatggcatatttcctaaaattctgcagcaacataagggtggcttattctgggatacgaacaggaagatcaagtctttttggttcaacccaaactctcgtacccgtggggtgtggcccatgtggggtctggaaggcttcgtggagcagggaagagtataaccaggggctggcttcttattcctgttcagtctctctgcagcctggaaggagctacttaactcccttttggccttaccattgccatttttgaaataaaagtcctccactcgactgtctgaccgagtgattgtcagctcacaaggcctcttacattcagcatgtttgcttgaggggaatgagtgagtgttttacatgtggtggatccattcccagcaaacaacaaaaagaagtcttttttttttttttgagacgaagtcttgatctgtcgcccaggctgtagtgcagtggtgcattcccggctcactctgcctcctgggttcaagcgattctcctgcctcagcctcccgagtagctgggattacaggcgtgcgccaccacgcccagctcatttttgtatttttagtagagatggggtttcactatgttggccaggctggtcttaaactcatgaccgcaggtgatccgcctgcctcggcctcccaaagtgctaggattacggttgtgagccaccacgcccgacccaaaaagaagtcttgaagtacagcccgccatcggtatttttagcacatgaagaatatcttaaggaatatgcgaaggagatgttacataggtagcttgacctttattaaggcacttggtaattgccctacattttattattttttacttatttaaggttaaatgaagacatttaaaatattacatgtgatggggcttatagttttacatacaatgtcatagtttgtgtgccttgtttaaaacaaatccaatatgagaatatgctcttgtgtaagaagtgtatcattttactaaaggatttataagatatttgaatcaggaatcctgtagtactttaaaaagtggtaccttctacaccatctttttaggagcatgtttatcacacaaggcaaggcaaatcactaggttaggcatccagtacatagaattcgactagaagtgtagtgaggtgtgagatttagggggacagggattctaagaaccaacggcatctaactaatggacttgttcctaaaggaatgttgaagaagtgatcatccatcttaaaagattgtgccttcagaagaactgaaggatacttttgctttcgtgtacagtgtgccgagtttgatggtatgtcattaccgggtcgggtccatgaatgaccggcaccatcatggctgccaagtccttgagatttgaacaagatgttccagatggtaatgaaccattctttttttttttttttttttttgtattgagatggagtctcactctgtggcccaggctagagtgcagtggcacaatctcggctcactgcaagctccgtctcccaggttcaagtgattctcatgcctcagcctcctgagtagctgggacgacaggtgtgtgccaccatacctggctaatttttgtatttttagtagacacagggttttgccatgttggccaggctagcctgaaactcctgacctcaagtgatctgcccgcttcggcctcccaaagtgctgagattacaggcgtgagtcactgtgcccggccagtaatgagcattttgttgcgtccctggagtcttcctaataatgaggtagtggcagtggggttggaacagtaggtgcttggatatgtcttttgatggataacaattccttaaaaacattgagttacactgtacaaacatatatgtgtatatatacgtatatgtatatccatttactagaattaagagaatgcattcaaatactagtgggtttgtatcttttttttctttttcctccaattattgtgtttatcttgacttgctattaaagctctggaaatactcatctgagacagtccaggcatggtaggttctggatcttccactgtaatactatgtgaaatgagatattctttgtttcttagaaacaggtggattcagccaggtgaccgttactctttgggctcgtgttacaaggatatcatgatggtgtttcattgatatatgtaatcaataatatattacgttatttcagccagacctaggaataaataatactgctctcttttattgagagtggcttggtgattttcaaagtttgtttatatgccatcatcagatctgcagagcaagcttatgagatgaggaaggcatggattggtggacataagaaatggagggttaaggcaagtggttacttacccacagtcactaatttcataattggtagatttgggaccagaactaggatatctcatttccagcctagtgttctttctgtgatatttgttaaaggggccatctggttaaaaggatagtctggctctttaatgatgatagctttcaaatatataacactttacagtttgacaggcttttacatagatagcacattttcttcacaaaaagacaaataatggctttacatatgttggatgaagatgtggagaaattagagtctttgcatactgttgagaagaaaaaaaaactttatttttctctttctcagtcagtttttgcagcaagtcttttatagtccttattttttttttaattctctcttccccaggtttaattttcttaagaggcagatttataatactaagtaatatccagaatagatagttcctgcaggaaatgggtttattgttctcataaattttagtggtctagtttgtcaatattactgtcatttcttaatagcatttgtctttctgagtagtaacttgtacttgaattaaaatctttcacatgtatagagtggagcaaagagaccctgcatatattataaaatggtccatgcctttgcttagttgtcattgtgttagatcagagaaagagaaagtcctttaaaatatgaaaataactggtactcaggaagggagaagagaagcttgaaggtacgtggatttttttttttttttttgaggcagggtctcgccctgttgctcagtctggagtgcagtggtgcagtctcgactcactacaacctctgcctcccagttcaaccgattctcctgcctcaccctcctgagtagctggaattacaggcacccgcctccatgcccagctaatttttgtatttttagtagagacacggttttgccatgttggccagggtggtcttgaactcctgacctcaggtgatccgcccgcctctgcctcccaaagtgctgggattacaggcatgagccaacgtgcccagctgatatatggaattttatgtgaggcttattagaaggtgtggggtatagggggaagaaggacagcttcgcttcttttcatctttcaatatgaaaacacagcaggatagcgtaaaatttttttaatgatgtatagtttgcatacaataaaatgtaccattttaactatacatttgggtgaattgtgacagatttaggtatctaccaccacaatcaagaatatagacccttcccctcaatcctggggttgctttctgcctcttcccagccaggcctccctcatgccagcctcaggcaaccactgatgggctttttgtcactatagattagatctgccttgtctagagcttcgtagaaatcctaacggatagtcttttgtctgaccttttcactcagtgtaatgtatttgacactcactcttgaggtgttgcacaggtcagtacttcatccatcttattgctgaatatgccggtttatttatccattcaccagctgatagacatagaggctgtttccagtttggggtgattataaataaaattgttatgaacatgcatgtacaagtctttgtgtgctggacatgtcattgtttctcctgagtaaacatgtaggggtggaatggtgggtcacatggtgttaaatcatttcgctgattttactgagcagtcataatactgttttctgtagcggttgtaccattttacattcccacccacagtgcacaagagttccagtttctccacatcctagctaacacttgttatttatttatttttttaatagtagccctcctaatgggtgtgcagtggtatctcattgtgttttaaatttgcatgttcctaatgataagtggtgttgagcatcttcttcctcttctttttttttttcagttgagatggggtctcactctgtcgcccaggctggagtgcagtggcgcgatcttggctcactgcaacctccgcctcctgggttcaaggaattcttgtgcctcagcctctcgagtagcttgggagtataggtgtgcgccaccacgcttggctaatttttgtatttttagtaaagacagagtttcaccatgttggccagactggtttcgaactcctgatctctcaagtgatccgcccgccttgcctcccaaagtgttgagattaggcgtgagccactgcgcctggccaagcatcttcttatgtacttattggatgttcttctttggagaaatgtctattcaactcctttgctgcattgctttttaaaatatttggacttgaaagcccagcaaggataactattttgttcttctgctctaagaatatataaagatcttgctcaactcagcagaacatttgtatcatcatttcagaactgcagtggtatgaacatctagttgctaattacatatttagaatagttcatatttcaaaatgctaaataaatatttgtgggcactgagcctagttattatgttttgccaaagtcacaagttccgccattgcacgtcccaatccagttcagcttgtacaaaaatgcttaaaatctcttttgcatgaaactatgttttggtcatgacattaagcagacagaatgagacttaatatgtctttaaagggtcattttaaataaacaacaagatgactgtcactgcggcggaacaaaaagaggaaagaagaaaggttggttaacttagagaaaaatggcaagattcagatgggaaagggaatcagaatttttagacccctgtgtgcagaaaggaaactaaaggaagttatctagctctacttcatttgttctccccaaccttgagttcatggatagagatgaatggagataccaggaagtgttcaaaaaggaaaagtggatggttgggcgaggtggctcatgcatttaatctcaacactttgggagactgaggtgggaggatcacttgaggccaggggtttgagactaacctgggcaacataggaagaccctgcctccacagaaaaaacaaaattggctgggtgtggtggtggacacctgtagtctccagctttttggaggctgaggtgggaggttcactcgagcccgggagtttgagactgcagtgagttccgatcatgccactgcactccagcctgggcagcagaacaagaccctgtctctaaaaaacaaaacaaaacaataaagtagaaaggaaagctgggtactttttctaagaagccaagagccattgataattacaactcacagaagcagactttttgagagggacgccacccagaacctgaggctactcaaactattattttgtcagaagcaacagggttgcctgaaatttgcaattgaaacagtgtgcttttctcacatacacagcctttatgtaattgttcagttgtgttttaaaaagaaataacatcactgaggtgtttggttttctccttttctttcctctctgtcttgcatggttcagcatgttgttttaggtcaacagatatattatagattggagttcagcacactttttctttgaagggctagatagtaattatttctcgcttcgcaggctatagcctgtgtggcaaccacctacctgtgccactgtagtagcatcggttagcagaattgcactaccttggaaagcagtcgtagataatatgtaaatgactggctgtggttaagttccaataaaactttatttacaagaacaggcagcgggccatgttttgccaacttttgttctaaataatcacaagaggccatgaaaagtttaatttccatacatgagaactgggtctgaatattgactcttctacgtagtataatgggtgtcccaaatactcttacccagtaaaggatcttttaaaattttaagttgaaaccatattcagtggcaggaatcctgaggaagtgagagagaaaagctttataaatattaataagtgctgaaaattaagttgttgaaaaaattgttcacataaaagatcattatatagcaagtttggaatttagtttcaattttcatttccttgtagaaacatcttcatcgtgaggaaaatgagggaattaatgaacatttgtttcctgagtgtgagctgtgataccttgtagtcactgagatggcggctgcatgatgggtatctcgtaactctgctccgggatgcccaccatctagaaagatgctcaagacccgtgggacaggatagtgtttaggaatgtgtgttttaaacttttcttgcagtatttaatttctaaataaactttattaaggtataatttatatacagtaaaaatgcacctatttttttaagtgtgtgatagattctatgggttttgacatgcattcactcccaatcaagatagagagcattcccattaccccaaatgtaccctcactcccctaatgctcaccctcgaacaaccactcatctgctttctgtccatgggaattaggttgccctattagagagcttcctatacattcagtcatttagtatgtactttttttgtgtctggtttagaggtttgcaaacttccttggttcacagtgcctttagaatccataattttttatggtgttgaaagttaaaagggatacctaccagttccattagatccagagaactcattaaaagtagcttacatggtgtcccacaattattgctgtttccctccaagatttaaaatatccagtggcatgtctgtgagttcactgggggccctggggtggtttcgtgcacagttgaggaaccacagatctggcttcttctacttagcataatgttttggaggtttatttatgttgttacatgaatgaatacagtcatgcatcccttaatgatggggatactgagaaatgtgtcattaggcaatttcattgttgtatgaacatcatagagtggacccacataacttacatgttacaacctattatgcacctaggctatatggtcaagcctgttgctcctagaatagaaacctgtgcagcatgttactgtaatgaatactataggcaattataacacagtggtacttgtgtatctcaaatgtgaacacagaagaggtactgtcaaaatacagtataaaagacagaaaatggtgcacttgtatagggcacgtctcgtgaatggagcctgcgtactggaagtgtctctgggtgagtcagtgaatgagtaatgagtaaatgtgaaggcctagtacattactgcacattactgtaggctttataaacatggaacacttaggcaacactaaatttattttaaaaaattgagttatggcggctatgatgtcactccgtgataggaatttttccactccattataatcttatgggaccaccatagtataaaatgtcattatgctgcatgtgacagtagtctgttcctgttttttgtttgtttgtttgtttgttttgttttttttgttttttttgacagagtctcactcggttgcccaggctggagtgcagtggcacgatcttggctcactgcagcctccgcctcccgggttcaagcgattctcatgcctcaacctcctgagtagctgggattacagacatgtaccaccatgcccagctaatttttgtatttttagtagagacggggttttaccatgttggccaggcaggtgttgaactcctgtcctcaggtgatccgcccacctcagcttcccaaagtgtagcctgtttctttttgttgttgagtagtattccattttaggaagtactgcagtatgttcattcatttgatgggacatttgggttcttctcatttttttggcaatgtgaataaagtcactatgaacattcacatgtaaggctttgtgtaagcatatattgtcattgctctaagattagaattgctaggtcatatggaaagtgcatgtctagctttttgtttatttgttgatttaatttatttattcttaaagacagggtcttgttctgtcacccaggctagagtgtggtcgtgcaatcgtggctcactgcagccttgaactcctggtttcaagcagtcttcctacctcagcctcctgagtagctgagacttcaggcatgtaccaccacgcctggctaatttttaatttttttgtagacatggggtctccctgtgttgcccaggctggtcttgaactcctggcctcaagcgatcctcccacttccgcctctccatatgttaggattatggcatgaatcactgcactcagcccatgtctagctttataggaagctgccaaatttttccagagtgtttgtaccattacattctgatatgatttagatctatgtccccacacaaatctcatgttgaaatgcaatccccagtgctgaaggtggggcctggtgggagatgattggatcagggggtggtctctaatggtgtagcaccagtccccctttggtggtgttgtcacgatggtgaattctcatgggatctggttgtttaaaagtgtgtggcaccttcccttctctttcttcctcctgctcctgccatgtaagacacctgctcccccgttgccctctgtgatgagtaaaagctcgttgaggccctcctagaagcagatgcttccgtgctttttgtacagcctgcagaactgtgagccaattaagcctcttttctttataaattacccggtctcaggtatttctttatagcagtgtaagaatgggctaatacacaattcgaccaatagtttgtaaaaattcttagcctgggcaactaaaagagacctcgcctcgacaaaaaattaaaagtgaaaacttagcatgtagtaatggcatgtgcctgtagtctcggcgagtcaggaggctgaagtgggaggaacgcttgagcctaggagttcaaggtggccgtcagctatgattgagccaccacactccagcctgggcaacagagagagactctgtcttgaaaaaaaaaaaaaaaaaaaagaaaaaaattctggttgcatcacatgttcatcagtacttggtattgtcagtcattttaattgcaggcattctagtggttatgttgtgtatcttcgtaaggtttctgtttgtgtttctgatagctaatgatgagcatctttgctcattgtgccatttctgtggttactggctgtgtgtgtgtgtgtgtgtgtgtgtgtgtgtgtgtgaagtatcttgttctaatttttgcccatttttaatagggttgcttgtcgtcttatcattgagctgtatgagtttttaaatatattctagaaacaagtcctttgccagatgtatgtattacaaacatgttctcccagtgggtggcttgctttttcattttcttcaagtgtcttttgaagagcaagagttcaacatttcaatttgtcgaagtcttctggttagtacttttttttttctttctttctgtccctctcaaggttaagaagaccttcacctagaagtttgtgattttggcttttgcatttaggtctaggatctatttcaagttactttggtgcgtgtgtgtgtgtgtgtgtgtgtgtgtgtgtgtgtgcgtgcatgtgcgccttgaagtaaggattgaggtttattttcttttccatacagatatccagttgttttagcaccatttgctgaaaaaagctattctttctcctttaaattgcctgggctcttgtcaaaaatcaattgacggctgggggcggtagctcacacctgtaatcccagcactttgggaggctgaggcaggcagacggatcacgtgaggtcaagagtttgagactagcatggctaacatggtgaaacccgtctctactaaaaatataaaagttagatgggtgtggtggcgcatgcctgtaatcccagctactcaggaggctgaggcacaagaatcgcttgaacctgggaggcggaggttgcagtgagctgagattgcaccactccagcctgggcgaccgagtgagactgtctcaaaaaaaaaaaaaaaaattgaccatttatgtgtttgtctatttctgaactctattctgttctattgatctatatgtctgttcacattaccctgattcttgtagctttgtggtacgttttgaaatcaggtgattgtggagatgtatttttcccatccaagtactaacgaggcccgaccctgcttagctttccagatcaggtagtatggctgtagacaagaaggtgtatttttaagttggatttattcgatcaaacttttatcaaatgcattattctactcatattggaaaaatgaagtaagagtatcatttttcaaagttggcattgcttgggactgatttgtgactcccaaattatatgttgaagccccaacccccaatgtatattggagatagagtctataaggaggttttaaggttaaatgagatcatgagggtggttgctgattcagtggggttagtgtccttattggaagagacccccgagagcccactgtgtctctctctgccatgtgaggacataacaagaaggcagcattctacaagctagggagaggccctcaccagacaccaaccatgcaggcaccctgatcttggacctcccagcctctggactgtgagaaactacatttctgtagtttaaactacccaatccgtagtattttggtatagcaacctgagcaggctaagacaaagagcaagctgactttaaaggaagggaaagtatactgagaatattggctgggcacggtggctcatgcctgtaatcccagcactttgggaggccgaggtgggcggatcacctgaggtcaggagtttgagaccagcctgccaacatggcaaaactccgcctctactaaaaatacaaaaattagccgggcatggtggtgctgtaatcccagctactcgggaggctgaggcatgtgaattacttgaaaccgggtggcggaggttgcactgagccaagatcacaccactgcactgcagcctagaagaaagagcaagaatccatctcaaaaagaaatatataggataggattccttgctttagggccaactttggtgaccttgggtacatgtttcctttcctgtaaaattagaaaattggtccagagaactctagaatagcccccactaatgtcctatttaaatttaataacctgtaattttagatggattatgagtgattttctcttttacttgtattctctgccctgattcaggttttaaaatagctgaacaaaaacaatactgaaagccaaatcgtttgatgaaaacggtggctgacacttaataataacttagtcttcttttagttaaaatgcttcaggaaaatcctgatatagatagaaccagactctagtttattttaggagtttttacagtcatttcttccttgagccttttgcttggtgtttcctgacacagaactcgaagccatgctttctccttagttaatggctccccacgccagaggtgtggggccacctcatatatgtgtcctgggacagatcccaggattggagagaaattagaggtcatctagtcccgggcatttcaaatgtggtccctggactagcagcttcgacctcccctgggagaatattaggaatgcagaatcccaggccacaccccagacctgccgaagcaggcacactctaaagcaaggctgagaagcactgttctagttgaacagtgaagaatcttctgtatggtcttcccagcagaccatctggcctctgggcacctctgaacgtgacctcacgtgaggcaatctgttccatttgtggacagttctgttcaagtctcttttttgtatttatctgaaatgtgtcttcccctcccttctagtttaacttgctgtcatccattggtcctgccattgtgtcaggcactgaggataccccacgcaatctcctttctcaaagatctcgcaatcttttgtttgttggtttgagacagagtctcactctttcgcccaggctgaagtgcagtggcgtgatctcggctcactgcaacctccacctactgggttcaagcgattctcctgcctcagcctcctcagtagctgggattacaggtgcctgccaccttgcttggctaatttttgtatttttagtagagatggggtttcaccatgttggccaggctggtcttgaactcctgacctcaagtgatctacccacctaggcctcccaacgtgctctgattacaggcatgggccatggcgctggacagatctcacgatctgatatagaaatagagatgtccatgaatgaactagagcacagtgtgagaaaggcagtgaagaagatgatgtccagggtgctgagctgcacggagaagggtgctggagaggacctccaggtgggggtgcagcccggtacacatactgagttggaatctgccagactcaggatggggaaggggttctgggagggcgctccgcacccagagaagagcttagcagaggcatgagaggtgacgtattggggtccctgaaaagtttgatttccttatgttaaagtagcaaggagctgggaaagtgggcagggggctggatcacaaagggcccattctgcagtgtccaaggagttcacttgaatgtgagaggctggggagaatagatttgcattgtaggaagaaggctgctggctgcagtaacgggccggaagagggaggcaggggtgctcttagcagattgacagagcctgatctaaaggaaagacatgaaggactgagctaggggcgggataagagctcggccactagtctctaaggaatctacctcataaatctaaagcagcaaatcctgtcccctcagttctccacttttgctcaatgcttattcattaggggccagctctttccaggctatgcacgccgtgaggactgcacagataaaggtggcgtgggccttgcccgcattacagagtgtcactgcttagtgggcagtgggcatctccagttattccttcttcatgtgatattgttttaaatgcccttagcttttgcgtttttcctccgtggagtggtctagttgatattccccttaactggtcgtgtctgaaactgaattgcaggctctaggtaatggtgtgagcaatgtggactagggcccgggctgttaccttctttctgtgaagacggcctaagatacagtatggccctgcgtctttgaaggccatctgagaacactgcagcttcagactgccctaggtcagagctactggcagtgtcccaaggaggccttggcatgtgttctgcctccccactatttctcttctgtatctgatggctttgatttcaccgcacctaagtgtaagttcaaactatatcctattagacattatcttgttaaacagttcctgttgctccatgcttttgagatgttttttaatctctggtttcatcctgttaatttattctcttggttgtaagcgacacaaatgattgacgagttcccttgtatatttgcatcagcatcattcactgaaacgttctcgaaggtagggcatatgtcagagtcctggcagatgtaggctgcttcacactgtgcctccagattgggaaaaggtggcattcctaatcaccgggggaagtaaattcatcaataaatgtggtttaggacagctgaagagctgttagaaaaaaaagggagctggggtccctccaacattccttagataaaaataaactacataacaaagaaagtctcttaaaaaaaaagaaattaaattgtctgaaagatttagacttaaataatgaactcataaaaattattagacgaaacatgagtaaattttaaatatatcttggaatgtagacagaagacttttttccccccaaagcgtgtcacaaaacacagaagctgtaaagaaaaaggctaactttcctaaaagaaaaatttcatgaggaaaatttaaagttctgttgggcaaaaattccataaatgtggtcaaaaaacaagtaatatattggagaaaaatatttgcagcctatgtgtcagagctaattcctttcacatggaaagaagtcttagaagtcaataggaaaaatgaaaaatggaatagttaaaccaatgttcattgctagaagtgagcttgtgaaaacatagtaaacttcactttgtttaaaaatgcaaaggaaaataaagaggtctcattgttttcatctgtgaaattggatgtggctaagtctgataatacccaccttgctggtgaaaggatgagaaaacagacatattgagttgaccagtgctgttgaagggcatttctacaatatccttagactagaatttaaaaggttcgtattcttagactcagtcattccactaatgaccctgtaaatgttttccagcatgtacacaaaaataactacgcagatatttgtaataatagcatttatactagcaaaaaatagaggtagcttatatgaccatctgtaggtgtccagcaaaatattgtgtagtgttaaaaatggcacaattctctacgtactaactaggaaaggttcaggatactaaatggaaaagcaaatcactatgcataggaggatgttgtgttaaaaattaaaaagatatacgggatatcagtaaggaagatattagctataaattaacaaaaatgaagggaatgtatttaccttgtacaacaagacatcttcatatgtcagcagtgcagggttgggacagggtctcactatgccatccctgcctcagatgccatctttctcctctgcggtactaattatgtgggtgtgtttccttatggcagcaagatggctgcactgtaccggacctcacatctgcatttctgatggaaaaaagatgtaaggaggaaggtaagaagttggaatcggaaaacccaaaatatttccagaaatgtccaaccagctcttttttgagatggagcctcactctgtcacccaggctggagtgcagtggcgtgatctcagctcactgcagcctccaccttctgggttcaagcgattgtcctgcctcagcctcccgagtagctgggactacaggcgcccgccaccacgctcggctaatttttgtatttttagtagagatgaggtttcgccgtgttggccaggcaggtcttgaactcgtgaccttaagtgatctaccctcctgggtctctcaaagtgctgggattacaggcgtgagccaccatgcctggcccaacttctgcttacatttcattggctagaactatcccatggctacccagaccttcagggaatctgtcaaggcaaaaattttgattaggcacgtgttcttccctgacacacaatccagagttctgtgaatatggaagaagaggagaagggatattgggtaggcagcagtgtgcgacacacacacacacacacacacacacacactctttgtgtttgcatgcagtatttctggaaggcgcctgagaaatgggtaacagtagttacctctgtggaatagactggccgtcaggaggaaggtggacatttatttttcactttatagtgttctttcctgcaaattttttaaaaaaacaatgaatatgtgttaactttaaaggaaggaagttgataggaagctgacaactatccattatcagaacctcttgggtacagctgtccaaccagttactcagaaccaggtcatttaacctctgtgaacttcagcctcaactgcaaaatgagaggctagaatagatagtatcttaggctccttctacctctgagcctcctccagttaattacacaatctccaggagctgaaggagagaactaagagtcagctcctttagcaagaaaagacatccaggattttaaacaggttcttacttagcctttgttatggctgaattgtgttccctctaaaattcatatttggaaatcttaatctccagaaggtagtatttggagttagggtctttaaagaggtaattatggttcaatgaggtcattaggttgggccctaatccagtaggactggggttcttacaagaagaggaaatttgtacccaaacatcctcagagggaaggccacgtgaagacaccgggagaaggcagccacctgcaagcagaggagagaggcctcagaagaaaccaaccctgccagcaccttgatcttggacttccagactccagaatttgagaaaataaatacctgttcttaggctgggcatggtggctcacacccataatcccagcactttgggaggctgaggcagatggatcacttgagatcaggagtttgagaccagcctggccaacatggtgaaactctgtctctgctacaaacacaaaaattagctgagtgtggtgacgcacacctgtaatcctagctattctggaggctgacgccggagaattccttgaacccgggaggcggaggttgcagtgagcagagattgcgccactgtactccagcctgggcaatagagggagactccatctcaaaaaacaaaaaaaccgcaacccttttctttaagttctccagcctgtagtcctgtgttatgatagccttagcaagctgatgcagtcttctgtccctttacactttgtgaggggagctctgcattttgcagaatctctaggacagcatgagattgcactgacttagctactgcctctattcccttccttggtgaaagcaggtcccctaggagtctagcctgggaacctgcaaatgctaaacgtggcctgggggcagagaagcgcatctgactggaagaagcaaatctgttcccgtgaggccagcgcagccttcctccagggtgcgatcgctgtgcacacctccttcctgggttccttggggccttgcctccaacttgcttacctgttctctaatctattttctttccttgaacttcagaattgatggataccctgtctcactctagattccttgcctggcttctgaccgctaaacccatctggactacaaatggtttatcttttagagatgatctatatctcttcagctggtgagatttgagggcaggatcttatgttacatgagtgaccttcttatagatattggcaagaatcattttcttcttctgatggagcagaaaggggtgtgtgtgtgtgtgtgtgtgtgtgttgtgtgtgtgtgtgtgtgtgaaagagagagaaagagaaagactttcattgccctttaagccctcaccctagcactgcatctgagccagaagactctgaaatggcctgcagtgttccaggccatttaagggagactggatcttttctgaggctaaatgagggctggttttcctgtgctggagtgggtaaggactccggggtaccctgtgtgcttggagggaggcagtcctgtatttcttaagatgcttaagaagatgcaagatgtgagatgcttagatgatggaaggtgaggagagattggcctccaggcatcctgctccccgcagagcccctgagaaggtggccttatttatggagtttgcctgtctgtttactggcttcttctcaagggagcatagaggaccccactggtcaggtgtcagacaaaagagctgtacggatgcatagatttagttctgcctcacaggcaggtagcctgagctcctagggggaactgtttttgctaagtagggaatgaaaagcatgtttatttaagcacaaaattaaatctctcctatttttatatgatttcccgttgttttcttccctgtagggaaatctgctgtgatagagaactgcgtaacaggccttttctgtgagcgctcactcatacattatgcacgacgtggctaagatctttgaagcgcatggagacaggcacatctctgagaggcgagattctttcttttctcagcccccactatcttctgtgctacatcagagatggagcacagccaccgtgggtcttgaaatttcgcaggtgatgctcttctcggtgacctgtgggttcattacctgtgtcaaagactgaagacgggagaattagggaagtggtggcctgggagaaccaaggacatgtttgtgtgccctatttaggcgattgttctacttcatgctaaatttgtgaggagttttatgaagcctagaaaattaagtagaaaatatatttttacagtattttaagctggaacagactatttaaagctcgaagagaccctagagataaaccagttcagtctcttccttttgcagtagaagggacgaggcccagaggactcacggtgtttcgggaacttgcagggagttagcgcagcaccaggatcggagcgcggggccccgtgtccagctccttactctttttgttctggcagcgatgcccaccgggccttcacagtacatttctctggatacagagagaaacattattcatctgaaagcaaggcttcagaagctgtttttataataatttgttagagccacatagtaacttgcaaataaacatttacagttaatgagaaaaatggatacccctgagaaaaaccgtttgtagttactgtgttctagtcagagctcttgagctaatttgaaaggaaagtcaggattctggcaggaggagagctatccccagattccaaggatggggaagagaatctctgtatggactagaattcgagactgtcctgtgtccctctgtctctccttcccggtcttctgtctgtgtcctctgtgcgggatcccatgcctggctctgttaccctcccttcccgccaccagcctgtcggtacctcctgtcctgattttctggttttcagtcattccaaccccttctcagtttccctgacttggtccctgtgcccgtctcagtccccctgacttggttcctgtccctgtgtcagtccccctgacttggtccctgtccccttctaaatccccctggcttggttccctgtcaccatctcagtccccctgacttggttccctgtcctcatctcagtctccctgacttggtccctgcccccatctcagtccccctgacttggtccctgtccccgtctcagtccccctgacttgggtccctgtctccatctcagtccccctgacttgggtccctgtctccatctcattccccctgatttggtccctgtcctcacctcaggccccctgacttgggtcactgtctccatctcaatccccctgacgtgatccctgtccccatctcagtccccctgacttgggtccctgtctccatctcaatcccccctgacttggtccctgtccccatctcagtgcccctggcgtggtcccctgtctcccgctccatcccctgcccccatctctgtccctctgcatcaggcatggtcacgtctcagtgccatctcaccctctccctgaggactcgctccattttcctctcccctcagaccagcttgctctgcagctgcgcacgatgcaaatgaccgccccagcctctcttggcttcagtcccccaccacagactaattctatctctcaccccaatttcaaatccccagggagctgtctgatctgcctgcttcagctcctctcagcctgcctggtgctgccgcacagaggaattggctgcccgtggccgggtggagagtcctcgtcttgtgtgtggccagggtctcaaggcctcatgctacacacttgcgtatagcatctcgtgcaggcttcaccacagtcttacgaggcatgcggtgaccttgcccttagacgtgtgcactcaggcctagagctgtcagagccatttgtcgagcgacccgctgctaggagatggcagagctggagccagaccccaaagccagcgctgcgctgttctccttttgacgcgggcttatccacagttaatcagtgatttcctcagatgtccacatgctcctacggtgactaaacccagctgtcttttgcacatagttggaaaagttactattaggcacctagactaggtttgatagcaataggattttattaaaaccttgatggaaaacctgcgtagtatctgctaacatctttgcatgcttggaggcagaggaggatttaatatacatcaagtctgtgtagcaacatcaaaggaagatttaaacactgctggcttttttgtgcgatatttaaaaagcaccccccaccttttaagaaaatgtgaagttctggcataaatcaaagtgtgattaatcagtgatgattgactggtattttcataacctgtggcattaataacaactttgtatggacataagagttgtaagcaaatttgggagggaggttactgcttcatgctattctccatgccgatcttcgatctttgtacatacttacttgcattctgtaaaattcggcgtgatgaaatccaagaaccaaaaatgcagggtggaaataggcttagtagtaagtgaccttctatttccacttcccacctccttgttaagattctttgacctcctgccacaggggccttagaggcatcctgtaagctttgcacagaagctgctaatcccccggcaggcagttcaggcaggcagttcattccgtttccacctggcagctgctccctctgacacccaaggactcgcagggagtggccgttggacctgcagacccctgggaacaggcagggggaagatatgtggaactgagacccagaggcctccccacttccctgtgctgactcacgtaggctgtcatctctgttggcttttaaaggaagaggggtaggaaggacagtgaaattagaagcattgccaggtcttgcttgagagcttctctctctcactgctgctattttttcttcattaaatgtgtgatgtgggtttgttcaaagcatccagtggctctccacttagatcatttaattccacgatgcaaatggcagcacagctttggcctggaatcatgcttcgcacttggtcaaggccacctttaactgcctggccagacggctagagattttcccggggcacccctggagtttttcccatcctgactagagataatctcagagcgggagccagccccaagtgagagggcctctgaaagaccacaggatgggaacatggacgtgtagcctcatttcctcaaggggatgcaaggagattgattaggcaatgggggattccatgaaaaaaaaattcatgatattagtctacttacgtaaaattgtttgggtgagcacgggtggaggggcagggtggggaagagaaagacattgagatcaagtgaataaaggaattgggaccaaataccattctcacgctaacctgactgtcagatgaaagaagagaatgttgcagttatgcttatggcttgattctgcttggaagaaaagaaatcaacacaaaaaattcctgatgtgtgcatgcgcttttggaaaaaggtgtagggaagggcacacagcagtctaatcctggggacttgagaagggggagcacagcagtcccaaccctggggacttgggaagggggagcatagcagtctaactctggggacttgggaagggggagtaagggaaaggattatattcttttctttgcacatctttatatttatttccttattcaaaccagcactgttaatttttgtaattaaataaatttagagaaagactttttaaatgtgagagagctgttctgggggaaaaatcagaacaaaaactaaatttacactgggattgtttattttaagttttgtgtttcatagatagtctgtatagactgggtgtggtggctcatgcctgcagtcccaacactttgggaggccgaggcgggaggatagtttgaactcaggagtttgagaccagcctgggtaatgtaaagaccccgtctctatcaaaaatagaaaaagtcagctgggcatggtggtgcgcacctgtggtctcagaaactcgggaggctgaggcagaaggattgcttgagcctgggaggctgaggctgcaatgagctgtgatcataccaccacactccagcctgggtgactcaaaaggtacaaaaggctctttggggaaaaggaagttgtctgttctgtccacagccatgtatttccctttctggaggcagccactttggccagattcttggatattcttttttttttttttttttgttttgagttggagtcttgctctgtcgcctaggctggagtgcagtggcgtgatcttggctcactgcaagctccgcctcccgattcacgccattctcctgcctcagcctcccgagtagctgggactgcaggcacccgccaccatgcccggctaattttttgtgtttttagtagagatggggtttcaccctgttagccaggatggtctcgatctcctgacctcgtgatccgcccacctcggcctcccaaagtgctgggattacaggcgtgagccaccgcacccggccaattcttggatattcttaaagaaatgctctatggtttaaaaaatctagagatttgtttataatatatatatttgcatgtatataatgagtagggagagaaagtctcccaccccaaaatggtagtagaatagaaacagtgttttgtatgctttttaaaagtttaatatatacactgcaaaatattgatatatagagagctgtttgattcttttttactggccacgtgatattccattatataagccgactttatttagccagccttctattgatgagcattttgattattttcaatattttactccagaaacaacactaaagactcgagattgtattctttgacacatgttagtatatccgtagaataaataccttgaagcagaataatttttctccaaaaaggggctacaaataatacacttccttcagaaacatgtgaaagtgctagatattctttatagaacaaggtctgcattggaagtgggatgaaatataatgatagcgacagggactttagagaaggaagtaggaaagtcagggcccttgcagttgcttctctcatagacacctctctttctagaagatatttttgcccaaactttggtttttatatttcagggtaacaaggatgtgaggaaggaagtcaacattgagtgagttgctattatgtgccaagcctagggttaagtcagttgcaagtattgtttaattcttgtagtgttcctataaggtccatatttggcatttactatccacagagcacagatgagaaaaatgaggctcaggaggctaagtcagttccacagggttatccagtggataaatggcagagtcacctttcagacttcatgaaagtactctagctttttacagtccttctccttctcttcctcgtagaaaaatagaaatctctgtagctcttgctttgtgaaggatctggggatgcatgaaccaggaactaggtggaagaccagtttcacctgaggttgacctgtgatgtatgactttgcttgtacttaagaagtcacttttaataaggttgtagggtgtgcagagaaaatttactgttggattatgtggattgtcttcaaccacaaagggctgtgttccagaaactcttctgagtctactgactttaaaggagaagagccagccccgaagtatgacgctctgaaagctggtcaggtttcaaggtggacccacaaagcccacctaacttagaacattctgaaagagtatgacgtatgggtggccatgatttcttggtgttcttagtccataatgggatgcataggtgagaatgtatgtatagatacgggctagagcaggggtcctcagtccccgggccacagaccagtaccagttcatgggctgttaggaactgggctgcagggcaggagtgagcagtttcatctgtgtttatagctgctccccgtagctcacatttctgcctgagctctgcctcctgtccgatcagcggcagcattacattaggttctcataggagcttgaactctattgtgaattctgcatgctagggatccgtgcactccttatgagaatctaatgcctaatgatctgaagtggaacagcttcatccagaaaccatccccctcctccgccatccctggaaaaatcatcttccacgaaactggtttctagtgccaaacaggttggggactgctgggttagagccacagcaaggagaacaggaggggcgagagcccccccatctgcgggctgggatggagtccaggggcactgcggcagcactcgaggctgcagcaaggctggggctgtggccaaggatacagggcaataggtggcctcttaggtggaattgttgaaagcctcagagagagcactgtgaggaggaatgaggccatttattatttttgaaagtcaagtatgtgtaggttggcaactgcccatactttttatttcaaatggctttattaagcgaattacctctgatacaaatggacgtcaattaacaaagagcttggaggtaatttaatgtaatttctcagctcaagaaatcaagtgctttttttttttcctttcatagaagccagggtaaattttctcatagctgacagagattattatggtggttactcattttatcagaagtgatgtaatatccagtttagatggagagaggatggtgctctttggagctagttttcggagtctgccactagattgctgtgtgcttctatactgaaagcagccagtgtcctgatctctaattacccttagccttggtgtctctttgacatttcgagggggatagtgttggatgaactaaagctcgtgtctcacttttaagttacagttctctgaaccttgtaaacaggtagggagtcatttcctgaggctgaagaagaagaggagaaagaagccacgcttatatatgtctttagttgattagagatgggtaagagtatgttaaccttggcttacctttccctaaatgtcagctcttacatgtgggtccttcagtcagtaggtgtgtttccatgttattgctactccttcaaagtttataaccatcaactatgtttaactactttgacctactgatataataaccattggtaggtagtgtcatctaccaattattattagatagcatctagtattattaatatgagaactttctacatgtttgcgtagagcttcagcttgaatttcatctcatagaatatactttttttcttttaccaacaatacagtaaggcacaaatgaaataatcataaatatttcacagaacgatgcacgcttatatggcatttctgcctgtgtgtgcatttgatctatgagattccctgattctttagcatgaaactcatgggatatgatcagtgaaatttgtcccgctcagaatctgtcaagcattttattttcttggggaggatggtcatgccataaccccaattgatatttcttggtgatagtttaggttttgggttaaccatagggttttgtgtttttgtttgtttgtaattgagatataacttgcacacagaaaaatgcatagttgagggtccaatttgatagattttgatatatacatacacccataaaatcgtcaccccagaccccatcatgagtatgtccatcaccctcactccttgctcacttccattccttcctggctcccatcctcacccccagcagccactgatctgcttcctgtcactccagcttagcttgcattgtctagaattttgtataatggactcatccactatgcactctgtttttggtctggcttgttttactcaacatagttattcccaggtcatcgatgttggcgtatatatccatggctcattccttttccttcctagatagtagtctattgtacgaatatgccacaatttgtttatgtgccgaccttttaacggacacttgtattccttcaaatgagggagtttctactttttgactacttcagatgaagctgctacaagtctttgtatggatatatgctttgttgtctgttgagtaaatatctaggagcggcatagctgggtaacatggtaggtgtatgtttcaacttttcaagaaatgccacccacagtgtaggagagttccagttcccccacatcctcagcaacaattgattatgctgagtgtttttcattttataaattctagtaggcatgcaacaaacatatgaaaaaaagctcaacatcactggtcattagaaaaatgtgaatcaaaaccacaatgagataccatctcacaccagtcagaatggcaattattaaaaagtcaagaagcaacagatgctggcgaagctgtggagaaataggaatgcttttacactgttggtgggagtgcgaattagttcaaccattgtggaagacagtgtggcaattcctcaaagacctagaaccagaaataccgtttgacccagcaattccattactgggtatatacttaaaggaatataaatcattctgttataaagatacatgcatgtgtatgttcatcgcagcactattcacaataacaaagacgtggaatcaacccaaatgcccatcaatgatagactggataaagaaaatgtggtacatatacaccatggaatacaatgcagccataaaaaggaacaagatcatgtcctttgcagggacatggttggagctggaacccatcatcctcagcaaactaacacaggaacagaaaaccaaacaccgcatgttgtcactcataagtgggagctgaacaatgagaacccatggacacagggagggaaacaacacacactggggcctgtgtggggggcggtgagaaagggagggcattgagaagaatagctaatggatgctgggcttaatacctaggtgatgggttgatctatgcagcaaactcccatggcacacgtttacccatgtaacaaacctgcacatcctgtacatgtaccccagaacctaaaataagaaaaaaaaaaaaaaaaagaaattctagcaggcatgaagtagtatctcatgtggttttcatttacagctccccaatatgcatcacgttgagtgtcttttcatgctcctatttaccatcggtttaccttctttggtgcctgttagaactttacccatttaaaaaaattattttatttattttcttaagttttcagagttctttacatatttggcacataggtcttttatcagatacatactttgcaaatattttctcccagtctgtgacttgtcttttcattcagcatttttggaagagcttaacttttttaactttcatgacaggcttaccatttaaataaagaaattgcagtcattccttgcttaacaatttgcatatgttctgagaaacgcacccttgggcgcttgtgtcatcgtgcgaacatgacagagtgcacttacacaaacctagatggtctagcctactacacacccaggctgtagggtctagcctattgctcttgggctacaaacctgtacagcatgtgactgtactgaatattgtgaccattgtaacaacgatggtaagtatttgtgcatctaaccttagaaaaggtacaatcaaaatacagtataaagataaaaaatggtgaccaggcatgctggctcatgcctgtaattccagcactgtgggaggctgaggtgggcagatcacttgaggtcaggagttcgaggccagcctggccaacatggcgaaaccctgtctctactaaaaatacaaaaattagctgggcgtggtggcacacacctgtaatcccagctacttgggaggctggggaacaagaatcgcttgaacctgggaggtgaaggttgcagtgaccgagatcatgcccctgcactccagcatgggcaacagagcaatactctgtctcaaaaaaaaaaaaaaaaagataaaaatgtggtatacacctgtgtagggcacttactataaatggagcttgtaggaatggaagttgctctgggtgagtcagtgtgggtgaatatggaggctcaggacgttactgctgctgtagacttcaacactgtacatttaggccacatccaatttattaagtctttatttctttaatagtaaattaaccttagcttactgtaacttttttactttataaacttttaatattttaactttttgattcttacagtaacacttagcttaaaatacaaacattgtacagctgtacaaaaatattgtttctttatatccttattgtatgagttttttctatttaaattttatagttttttaatttttaaagcttttttgttaaaatgaagacacacacacattggctcaggcctacacagggtcaggatcatcaatatcactgtcttctacctccacatcttgtcgcactggaagatcttcagggacaatgacagtgatggagctgttataccctgtaataaaaatgccttctcctggaacacctcccgaagggcctgcctgaggctgttttacagtaatgttttaaaataagtaggagtacaccctaaaagaatgataaaaagtatagtatagtaagcacataatccagtaacatagtcgtttgttattatatactgtacataattgtatgtgctagcattttatgactggcagtgaagtaggtggtttataccagcatcactgcaaacataagaataatgcattgctctacgacatcactaggtgataagaatttttcagctcttttgtaatcttatgggaccacccttataaatgtggggtctaccattgctcgaaaagtcattatatgaaggccaggtgcagtggttcatgcctgtaatcccagcactttgggaggctgaagtggacagatcacttgaggtcacaagtttgagaccatcctggccaacaaagtgaaaccccgtccctactaaaaatacaacctttagttgggcgtggtggtgcacgcctgtaaccccagctactcaggaggctgaggccagagaatcgcttgaacccaggaggtggaggttgcagtgagctcagatcactccactgcactctaagcctgggtgacagcgagactctatatcaaaaaggcaaaaaagaagtcattagacagtgcctgactgtattttattcacagtatcaagcactaaaaaacctatggcaaaaacaagcacaaagcaaaagcaaaacatgcctgtagccacattaccccttcccgccaagacagtgtcacaggaaccatattcatttgcacacctagggcaaaaaccccagtcaaatataagaagtaatgatttccaagaccatgagcatcaggcaacaaaggacagtgatcctgagctatgagaaatgaaggaggcaagccctgtcattgccccagcttactgtcttgagagtttccaggctgtggtgccaggagggtggcctagatagccgacccagaggagagaattgcagaaagaaagatctccagagatgtgcccaccaccctgggacccagcagcgtactgaccagcccgtgtaagtaaccaagactggaggacaaaaagggggatgctaagatcttacgccggcttcagtctccccctaccccacacccctgaaccactaaatgattcttcgtatctctgccctttccccctcaaaggaagccatttgcaactacgattcagaagaggacattttgcactacacgggcttctccgagccatgtaatcctcaaaattgagaaaatattctaagaggttggcattggagtcgccgcacatggaacttgactttgttgtggttttctctttagtttgaaaaagatccagtaatctggtaagacagcaaagcagggtgaccacttcctggagtgcttctggttttggggttttttgtttgcccttggatggcatgcggagaaggtagtactgcccagggaagtctggaagcttcctaggtggtgacttgtgtaccctgtggaagaagagggtgtggactctggcccccgcagcctaaccctgtgccccaccagtgtcggattcagaaccacacgcttgagggcacttgagagacctccgtgtttatgccccaacttatggattcggggatggatgagtttcgttctttaacatatatctagggcctgccgtgtgcctgacattgttctggatgcttgggatcccacagtgagtaaggaaaatcccactcttgtggagcttacgtccctgcagaggagacgcagcatcagctagtatgcgtcaggtggacgttagttacccaaaggagaataaccctggccttggccaggcatggcggctcacgccggtaatcccagcactttaggaggctgaagtgggaggatcacttgagaccatgagtctgagaccaggctgggcaacatggcgagacctcatctctacaaaaaataaaaataaaaaaatgaggtatgatggtgtgtgcctgtggtcccatttacttgggatgctgagactgcagtgagctatgattgcgccactgtactccagcctgggtgacagcgcaagaccctatctcaaaaaaaaaaaaatttttattctggtttgcaattataatttttcagaggttgaagaggcttggcagtgctgggtttaaattagttgtgcaatttagtgcttttcccgtcatcatagatgctgtgggtttcaaatggcctcaagtcccggctggattttattctgcggatgacacttgggtaggggagtagataaagaaaagctggtgttgagagaggattccagctggaatcctctccctgtagtgctgtgggagatgtttctgcctgcgcgagatattattcatgagcaaaaggagaaagttgagccatttcaaggttccttctggccttgaggtgctgtgggtccgattgcaagcctgtgggttttctcctctctcccaggactcttcagggaggcctcagctctaccagacctcccagtcccaaccttcactccttctccttcctccccttccttggagaaaaatgaatctgcagaaatgttaggagacaagaagcaagtacacttgacccttgaacaactcggggtttaggggcactgaccagccccctcccatggaatcacatccacatataacatttgactccttaactactgatagcctattgttgactggaagccttaacggataacatcagtagttcatcagcatgtatttcgtatgttttatgtattatatactgtgctcttacgataaactaagctaggggaaagaaaatgtttagaaaatcataggaagagaaaatgtatttactgttcagtggaagtggattgtcataaagatcttcatcatcgtcttcgtattgagtgagctgaggaggaggaagaggaggggttggacttgctctctcaggaggtggcagaagtggaagaaaatttcctgtaaatggacctgcatggttcaaacctttgttgttcaggagttgactgtatacgccttctgatcatttgttttttcccaagacggtcttgctttgccgcccatactggagtacagtggcatgatctaggctcactgcaacctccacctcccaggttcaagcgattctcctgcctcagcctcctgagtagttgagattacaggtgcccaccaccatgcctggctaatttttgtatttttagtaggatgaggttttaccatgtcggccaggctggtctcgaacttctggtctcaagcaatctgcccgcctcggcctcccaaagtgatgggattacaggcgcgagccactgcgcccggcctggcttctgatcattattaaggacttcacatgattccccttagtacttcaaagtcaggtagattttgataaggtccttgggcgctagttttataatttcaggtcataagggttcgtcctattttctcttgcaaggaaaatgaatgttggggagagaacgttgtcgtctgaatgcttttatgccgtctgcagtaacctctctgagtctggaaccattttccagtaagaagtaggtgacaggctatcaaaataaagagtaaccttttgaaagcacttcagtgcagcactgtgggctttttataatcttgacttgtgttttgtgagaggagagggctgagctaggtttgtgctctgctcctccccctccccctctccccaactgtctttgatctgtgaagcttgtctcatccttagccaagtctgctggaactttatccagagcaggaaaaggggaaatagttttcctttcttgggtggatttgtatttatataaacccttagcgagcaaaatggagccaagtggcacacgcgtctgcagggaggcgtggtgggacgagtgagtggcgggaagaggcggctttgacttgggtcacatggtgtcagacctttttagggtcagtgaggagaggatggtgtaagtccttgtgcacattttcttaaggacatacttacatgtaggaccattgtagagcaacaaagggcagggtgtgtgtgcatctcactgtatgtctatatcaccaagagcagctgtctccaaccttgttcggcaccacagactggggttggtgggatggtttcatgatgattcaagtgcattacatttgtcgtgcactttatttctactattattacattgtaatagataatgagataattatacaactcactataatgtggaatcagtgggagccctgagcttgttttcctgcaactagctggtcccatctggtggtgatgggagtgacaaatcattaagcattagattcttacaaggagcgcgcaacctagatccctcacatacaagttcacagtagggtttgcccactcttatgagaatctcatgctgccctgatctgacaggagatggagctccggtggtaatttgagcaatggggagtggctgtaaacagatgaagctttgcctgctcacctaccactcacctccctctgtgctgcccatggacgcgtaccagtccatggccctggcgttgggcacccttgctatagagtcattcctccaacccttatttgcgggggatgctttccaagtaccctactggatcctgaaaccaccaatggcaccaaacccaattgccatcaattggaaaacgtttccggtcatatcttttgcccacaaatgtaatgtctttttcatcttaactaagcacttagcaggtgctgtaaccataccttttgcagtttgaggtgtagcagcaaaactagcatggatttatttttcctttttcacagtttcacagaatattcattctcactgtagatctggtaatttcagcatgcaattttttttctttccttattaagtcaagacctttcagctttttactaaagcacttaacagcttctctttggcagatccaaatcgccagcatcactactcttacactttcgggccattatgaagtaaaataagggtgacgtattaagcactgcaacactttgacagtggatctgataaccgagaaagtgcctaagtgatgagcaggtggggagcgtttacagcgtggggacactgggcagaggagggttcccaggggagcgtctacagtgtggggacactgggcagaggagggttcccaggggagcgtctacagtgtggggacactgggcagaggagggttcccaggggagcgtctacagtgtgggggcactgggcagaggagggttcccaggggagagtctacagtgtggggacactgggcagaggagggttcccaggggagcgtctacagtgtggggacagtggacacaggagatttcatggtgctggggggtatggagctggacaggtcgagatttcatcatgctactagaatggtgctagatttaaaactgatgattgtttatttctggagtttttcatttaatattttcagacccagattgatggctggtagccgaaacctttggaagcaaaaaccacagatgatgggggaccactgtatatctaaatatatcactatatatagtgatacatacagatgaatgacaagttcaagttcattttgctttttaaattgttactaagagaataatgttgtagaaggccttagctctcctttgcaacattgacctcggaagttttagctacttacagtgtgtcccactattaatttacttccttgaattagtctcagcctttcacaccagctctggccacttcttgtggatggtgaggtttttaagtgtgcatgccatccacgcgaatgccttcttttcattgtagggggtacagggaaaactttccctttgctctcagaagaaggttcagtgaaaatcaactgatgaaaggcaaattaataagaataagaagattactaaggcaaataaatttattaacattcaaagggaatcacagtgggatacagaagctatacgctttttcataggggagggaagagatgagaatgtagacagctcttttgagaggcagtaagtgaggattagggagaatgaatggaccacagagaccgaaatgaaattgtaagtgattctctttggaatctgaatgggcctgagaggcagacattatctcgggaaaatgtctgtcaggtgtggtcacattcgtcaggctttttttctgagataatgagattccagggagggcatagaaagcatttatgtttcttttggtgagcgctcttggtcagataaggacgttccaggaatagtccctgcccttgtggtttggggaggcacaagacaaggttagagggaccttcattctgaggcttacttcaggggccgctcagctttcaaaagcgcccagcgtgctcaggtgccatattttgaggaatgattttctatacccccaacatcataaaaccacctcattgaagcttcaagtggtgcctcatggttcctttctgtgttttctttttttttttgagacagagtctggctgtgtccccagggctgtagtgcagtggcacaatctcggctctctgcaacctctgcctcccgggttcaagcgattctcctgcctcagcctcccaagttgctgggattacagatgtgtaccacctcgcctggctaatttttgtatttttagtagagatggggtttcaacatgttggctaggctggcctcgaactcctgacctcaagtgatctgccagccttggcctcccaaagtgctgggattacaggcctgggtcaccggacccggcccctttctaggatttttagaaattccagagaaatctcatacaaaatctagagaaagcatctattgttcttgtgttattgcaatttgtatagtatcagggttaatctgggactgatgaagatgctgagaacagtaagtttaaagaactttgatatagaacaatattttactttgctattgttctgtcttttagaaccaaaaataaagcccttcttagtaggtgactcagcttcctgcaacctcgctggggaaatttctccaaatattaatgcatgccacgtaagccaggttcacttgctggccctggatgtttattctggcccccagttatatttattttgtgtctggtagagcctcacacttcaaagtggaatgctcctgaagtttctacctggcctctcatcccagtgttgtaatggacacttggggaaggaaactccccagggactctggagatgccaagactctgacgcttttgcagcaggtgggcgtcccgtgaggaagagtggcttggaggaggggagatgggctctcctgttgcaggtattagaaacagagaaagcaggaggaagaggaattgcaaataaccaggcatgaggaagacgtagggaacaatgctacagaggattggatttgtatgaattatttttaaaacaaaacaaaacaaacaaacccccaaacggccaggcacagtggctcacgcctgtaatcccagcactttgggaggccaaggtgggcgggtcacctgaggtcacaggagttagagaccagtctggccaacatggcaaaaccccatctctactaaaaatacaaaaattagccagtcatggtggtgcgcgcctgtaatcccagctatttgggagtctgaggcaggagaatctcttgaacccggaaggtggaggttgtagtgagccaagatcatgccactgcactccagcctgggcaacagagtgagactctgtctcaaaaaagaaagcaaaacaaaacaaaaaaccctccaaacaaaaggttgtcatgaaagggaaatgcagttgacccttgaacacacacgagtttgaactgtgccggtccacttacagaaggattttcttccacttctgccacccctgagacaaccagaccaacccctcctcttccccctcctccccagcctcctcaatgaacagacaatgatgaggaagacctttatgatggtctacttccacttaatgaatagtaaatatattctctctcaagattgtctcaatagcattttcttttttctagcttattttattgtaagaatacagcacatgctatatgtgacacacaaaatatctgttaatcagctgattacattattggtaaggcttccagtcaacagtaggctttttgtagttaagttctgggggtggtcagaaatgatacgtggatttttgactgcttggggtgttgattgttcaagggtcaactatataagcttgtaatgtgagggaagagactaaattctggtagagatttgaaaaatagtagcagttttttccccttggctttctgtggttgaacgtttaccaaatgcattggaagggccgttgtgatctgaggcctcagctttttgatctagaagagacctgactgatgatccctcaaggggcccttggaccaactgcagctcttcttggtttagcaaacctgagatcatttagtcatccccttctccctcctatctttcaaaccaaaaaataattttaacaaagctttatgtaattagcaagcaaacattactgtcaggacgatcgtcttctgccaggagttgggctaaacaaggaaaagctgaggtcatgggctccaggtggagcacctgccatgaaaggaaaactgaaaggcgcccgtcatccgtgcccagtgtgtgggcctggcacggcttccctggcgttattcattgggagaatctgagaaccattgtgtgagtcgcagaagtaatcaagagtgtggccttttttcttccttctgcctataactatcaccactttggaggatgcttggaagaagtggaagaagccaagtgctgacactgagtttgtttagtgttgcctagtgaccaggccatgaatactcactgaagataggtgctgagggctttctgatttaagggcatctctgagaggccccaactggcctggtttatttaccctaccgattgtactctgtgactgctaagacttcacaaatggtttccaaagcttcaagacgctgaagggtgtttatgaatgttgtttttttgtttgtttgttttttgtttattttattttattgaagtttcagcattcaatatcaaaaccggacttgagaattccacaaatgcctgaaaatggaaatttccttacattgttaaattgcccagaactcagtggattcctacattttgaagagttgcagagatgtgtgctgaaaatgaaaacggttctaggagagggtcataatttttgatggtgtaagtttttgtagctgtcgttggaaccataccttacgatatattcaattatcaagtgagcctatgagtttgagtcgttttgaaaaggaatgatatctgtggggcactggttccaggacccccatgggtaccaaagtctttggatgctcaagtccctgatatccagtggcatggtatttgcacataacctacgaacatcctcccggatgctttattttattttagtttagttttctgagacagagtctcactctgtcgcccaggctggagtgcaatggcacagtctcggcttactgaaacctctgcctcctggattccagtgattctcctgcctcagcttctggagtagctgagattacaggcatgtgccacgatgccccgctaatttttgtttttttagtagagccgaggttccaccaggttggccaggctggtctctaattcctgacctcaggtgatttgcctgcctcggcctcccaaagtgctgggattacaggtgtgagccactgctcccagcctcctcccttactttaaatcatctctaggttacctataataactaatacaatacaaatgttatgtaaatagttgttatactatttttgtttagggaataatgacaagaaaaaggtctatacatgttcagtacagatggaatttagttttctttttctttcttttttttttttttgagacagggtcttgctctgtcgcccaggctggagtgcagtggtgcgatttcggctcactgcaacctctgcctctcgggttcaagcgattcttctgcctcagcctcccaggtagctgggattacaggtgcctaccaccatccctggctaattttcatctttttagtagagaatgggggtttcaccatgttggccaggctggtcttgaactcctgacctcaaatgatctgcccccacccctcggcctcccaaagtgctggtattacaggcatgagccaccacgtccagcccaggtgcagtttaaaaacaattttttcgacctgcagttggttgaatccgtggatgcaaaactcactgataaggagggctaactctgtaattgagccaagagcaaaccttgttcacaggaagaatgcaacatccctacagttttggggaaccactctttgaatccccaaaaccccttaagagtatatgtggcttagtggtagaatatacctgtgggtaccccagctgacttgttagtggctatgcaggaagattgttgccaaatctaccgatagcctgcataccttgggtaagtctcttgcaagttcagcagcaactcagcccctttaaggatgttccacctgccttccccatgaattcagcatcccgtgtgggtggccttccagggaccacagctgttgcctcatcatgtttcccagaaagttctgtagcctgctttccgcacagcctgctccttcaccccccaagatagcttcccagggaatttgttggcacccagaggacagtcccctgcctgctagctttggccagctgatcatggacagtctggcctagggcagtccagccagcttctccaccatgcaaggagctgctccataccctacccttcattccttgtaactgggtagcttataaggaacagaaatctgtttctcacagtgtgggaggttggtaagtccaagatcaaggcaccagcagatttggtatctggtgaggggtttctcattcacatatggtgtcttctcgccatgtcctcacatgcgcttgtatgaactctttgtgtatttagaagagtaagcctttagagaatcttctcgtgactacagtaatagggtcaagtacttactaggtgccagatacagtgttcagtatgtttcgtgtatgtgttacctaatttaaacatcatgctatccttgacacaggatatctggtagtgatgagtttagtcagtcctactgtcagagttcagcacagccacttcttcctgtgaccattggcaaactacctcttgcatctgagcctcaatttcctcttctgtatataatgaggataataattgtccctcccttctggtgttgttgtgaagactgagatggtacataaacaacattaagccagtaaaaagtgctcgctcaatgtcagttgctgctgtggtcatcttttcttcttcctggattaacttaggcttattttgcagtttgacatacattacaccatgatggtaaggtaaagtgcacgcatcgttctccattctgataacaaaagttgctgggtccttcgtctaagtgttccccactctgaagtctttcccagtcctgtgaatcagtatgaatctctccttctccgaactccaccagcatctcctgtaaatttccttgggggcctcatcatacaggactgtagttctttgcacacctggcctcccctgtggacactgggatcctccatggtggaggctgtgccctcaactctcagacccctgcgtcttcttcagtcctcacccacagtaaggtctcaatagttagttactcagtgaaataatgcactttattttgaagatcaagtttatgttcaatttgagaatgattagcttctgttttgctagatagcacacaaataaaccattcttcatatgtgagttaagatcattttgaaaggaaaaagctgtttttcttatgttcttaatctaggaactgtgcacgtttcttaaatcctgaggatactggcaccgcgtagtaggttgttggagtatacaaacatgctggaaactgtggactgttctgcttgctgctcagtatttgttaacatcaagtgaatttttcacatgtgtgaaacttctcagtgccttccaccttcgtgctctgtttccatggatggcagtcctgctagagataagacccaaacaaaaccagttacctggctctgtgtgacgtggacagtctggggtacagttagagttgataatggaggcttaatagtctgctgtacattctttctttctttctttttttttttgagacagagtctcaccccatcgtccaggctggagtgcagtgtctcaatcttgggtcactgcaacctccacttcccaggttcaagcgattctgctgcctcagcctcctgaatagctgggactacaggcgcgtgccaccacgccccactaattttttatatttttagtagaggcggggttttaccatgttggccaggatagtctcgatgtccggaccttgtgatccgcccacctcggcctcccagagtgctgggattacaggtgtgagccactgcacccagcctgttatttcaaattctctggcaaaatgatctgaccaccgaaagctgtgacatactagccaagaagcctgctgcaccaggctggtgccagggatgggtgctgaggacaggggcttggcatctgctgttgttattctgagtgtccaggcagataaaagcaggtggagctggggcctgtgtggaattccaaccaggagagagttttcaggggaaaccaaagaagctgcatctgtgttcaagccctggggatgattttaggacaaaagtagaacttgaagataagcaggcaaggagctaggtgagggcagtctcagaagtaagagtgttaagagactggggtgcccacagcaacttctcgttggagtcctggcccctgtggtgcatggtgggtgggttggtttacagacctgcagctctctgtgggacttggagcaaatctgttaaactcagagggcttctgacttactagttgatgtttggactggatgccttccaggttccagtctagctcgaacatgctgttacttgggttcattttattactttgataagcatttaacatttacatttttaacttgcatttttatatttgaggatcttttcctagctggtgtttgaagtgcatttttgatatccacatagccatgctacaagctaatgatgctaaattaacttttgtagcagtttgctgtttacaggagtttggttaaggaactcaaattacattcacttaatattgtgcgacactatataaaaatgtacacgtcaggaaattaatgtttttcataaaagtatgccgcttagttcattaattaaaaatagcgtttttagattgctcatttaggaaagatgagttctggcataaagaagcagtccctgctttggggaggcattagcctgggggcaaagagtaagggccccagaagtgggttcccaagttcacatcccaagtctgctgctggttagctcctgactctgggtacatcgcataacctccctgagcattagcatcctcatttgtaaaatgaggataaacccatctagggccattgtgaagattacacgaggtgtacatttaaaactgcaggcccagtgctgatatgggcctgcgctatcagtgtggcctttgcgggggatgagacatttagaaatacggtgtttttgttttcttttgctctttgagacggagtctcactctgtcgcccgggttggagtgcagtggcctgatctcagctcactgaaacctctgcctcctggattcaagtgattctcatgcctcagcctcccgaatacctgagattacaggtgcccgccaacatgcctggctgatttttgtatttctagtagagactgggttttaccatgttggccaggctgatcttgaactcctgggctcaagcgatccacccgtctttgcctcgcaaagtgctgggattagaggcatgaaccactgtcccagccagaaatacagtactttgaagcaaaggaatttcatatcattatacgtcagcagatacagtggtccccttatccatggtttcactttctgtgatttcagttacctgcaatcaactgtggtccaaatacatgtgaatgcagcataataatagtttttgagagaccatattcataaaagtttaattattaatacagtatattatcattgtcctatttattgttgtaaatttcttactgtgcctaatttataaattaaactttatcataggtatctacttataggcaaaaacatagtctgtatagtcttcggtactgtcctcggtttcatgcatccgctggggtcttggaacgcatgtctgagggataaggggggactgctcttctttggagtctctagaatttcttttctttttttttttttgttgttgttgagacagattctcactctgtcgcccaggctggagtgcagtggcgcaatctgggctcactggaacctctgccttccgggttcaagcgattcacctgcctcagcctcctgggtagctgggactacaggcacctgccacaaatgcctagctgatttttgtatttttagtagatgtggagtttcaccttattggccaggctggtctcgaactcctgaccttgtgatccacctgcctcagccttccaaactgctaggattgcaggtgtgagccaccgcgcccagcccggagtctctagaatttcaagtcagcagtagaagtggttggtgcagagagttgaagttgtaattgcagtagtgtctttccccagttggtgtacatttcacatccttgatttggttaattgactttctagaagccagacatggtggctcacacctgtaatcccagcactttgggaggctgaggtgggaggattgcttgaggccagaagtttgagaccagcctgggaaacatatcgagactcctgtctctacaaaaataaagtaaaaggttaacatttagccagatgtggtgctgcatacctgtggtcccagctatttgggagtctgaggtgggaggatcacctgagcctgggagattgaggctgcagagagctgtgattaggccactgcacttcagcctgggtgacaaaccaagagcctgtctccaaaacaacaacaaaaaatttagttcctaggtttaagtagggcagtttgaacaataatgtgtcccatctgcagccaggagctgtttcttgagtactctctgagaaagggcagggtgccctgggtatatggatgagagaatggaagtcatcactgcttttagagatgtaatgatctagttgaagagagattacatccagggcatgcagagtaatagcgttcctttaagtattgtggtgatccattaggttaattatgtgtttttgctagactcgttagatagtgttgtgtcgtgcatctgcttcacacatacctatcagggcaatccccttgcccagaggaggctgggctgatcttaggctgtttgtgtttttaacacttttagtctgctgtgtttccagatcatttatatagggctttgttgaatggttgctgtggtctgcttgagtcccatctgccccaaatcctaattatgaacacctccttggcagcccttgcttcggtgggctctggggactctggctcagtcgttgatatctagataaagatccctggagtcagtctgttaaaaggaaggtgagcagagcagtgacagatgctgtctttgtctagtgtgggccttcctgccataaccatgaaaattttctccacggtgacgcagaggaggatttaggcgctggagccggcgcccaggcagttctgctgttcttggttgcacatttgttctcacatccttcgttgcttcacctctgcccttctccccctgcccccatccccgggcagtgctgtctttgtaaaatgagcccatttttagtgcacatctccctaacacgtttttctctctcctcctacaggggagttgctgagtcagcccagaccggaaggagtggcagagatcatttgccccaagaacggcagcgagcgagtaaatgttgccttggtttacccacccacgccgactgtgatcagcccctgttccaagtgagttctcaaagtccctctggccccgggacctggctcctgatcccagctccatagatatgaccacaaaaatccaggttaaactgcatctgcacaaaccttgcaaagtcctcctgaacagacataattcttctggatgacatcagcatcatgatttatgcagcaaaacaggaacttttatttcctcttttttgtgatttttttttttttttttactttagctaataaagtcagaacattttttaacagcctttttgagatgtcattcacataccacagttcacttacctaagtgtacagttcattggttttcagtttatttgcaggtatatggaaccaaaaagaacattttttttgttgttgttttttgagatggagtctcgctctgtcacccaggctggagtgcagtggtgcgatctcggctcactgcaagctccgcctcccgggttcaccccattctcctgcctcagcctcccgagtagctgggactacaggcgcccaccaccatgcccagctaatttttttgtatttttagtagagacagggtttcaccctgttagccaggatgatctcgatctcctgacctcgggatccgcccgtcttggcctcccaaagtgctgggattacaggcgtgagccaccacgtccggcctttttttgcctttttttttttttttgttttgagacggagtcttgctctgtcgcccaggctggagtgcagtggcgccatcttggctcactgcaagctccgccttccgggttcgggccattctcctgcctcagcctcccgagtagctgggactacaggcgcccgccaccgcgcccggctaatttttttgtatttttagtagagacggggtttcaccctgttagccaggatgatctcgatctcctgacctcgggatccgcccgtcttggcctcccaaagtgctgggattacaaaagaaaatagttttttgacgggcagtcttaactctgtcattgcagaatgaagttggctctcacatcaaaaaccagcgcaggcccattccatgagcaaagcctgcagaaagtcagtaataggccgttttctgttgcatggttctgattgcggagtcagtccctgaaaatcaagggctgtgcagtttgccaccaccttgccccaaaatggacttgaagacagagaacgcacacatgccaagtaactttcagatagaacattgggttactactattctagataacactcatcctgttggtttgggttttatgtatgtgtgtttttcgttttgttttgtttgtattaagaaccaaagaggccgcttttaagctgagatgaaatgcctgttacttcaaatcctgaaaagcagcagccacagatcttcttgggtcagatctcatgatctgggtgatgtcagcaccatgatttctccagcatagtattcatatccatgcagcaaactcgactctttcttcctagctggccacatggaattttttaatgaaaaaattatgtatgaatctaagcctgtttttagggagcttggaaagtgcgcctttgggaattgtgacctgtcatctcctcttgggaaacttgctgtccggctgcattccaggcagtgtgacaggcatccatctcacccctcacatggcagcttccctgcctttggtgtgctccctgcaaagcgagggttcccagtggcattcttactcattagctgctgcagtagaagtagagggcactcggctcagtgccccgtttctccaaactgggaaactcattacatagaacatccctaatctatccttgctggaaaatatcaccgaacacccaagggaaactgttatctaatgctcttgtattcagagtactatttaactatcatgtgcatagtttaatttatcactgaccctaagacattgtgaatcttgaagtgcttcttaaatattaaaataggattacagaataactgttaaaagtaattgcacaattacttttgcaccaactgaatattaacctgaatatcccctgtcctgaacatatcaaacaacggaaattttattgtttctcttttaatttctttgaaattgtacatattggtccctttctttcagatacacctgggtgaggatggataaggggatattatatgttttctttttcttctgtctcttttttttaataccccgcaagttcttaaagctcaaggggatattacagaaccagcaaggtatgaaacagaggaaacaaaaattcaatatactttgcattggcgtaaactttccagagccaagagagacatgaacctattgttttgccatagccaagtgccgtcgaataggtgcgatagaggtaggagttaaaatatccatttgcgctagaaaccttcctggcaccaagccagctttatcagtgttttcccatgggcttcttgtactgccgcagaaagaccacgtttataccaacctgaaaaaaatgttatcagcctctctctcgacagcgtattgaacctgaacgaacaagcagcctaaagtcatgggtaagcggcggtacatggcgccagacatccaaatgccgaggaagcctctttaggcattgaaccacttttgacctagctatcagaatcattttattttgaaagaggttaaaaaaaaagtctcatgaaatggatgacagctttgcaatataattctcaactctaaatgaaggaatgttctctaagtagggaagtttcatattcctggcaagacgtttcttggaaaattaccatattttagtgcagctgcaaggggtaaatgatctcttgtgtgactttatagaaaagcacacgtagatgtgaagcctgtgctcgagctgcccagtgttcccccaccttcaccgccttaagcacccacagtttacatccatgaacacatggacaaaaacaaactcatgtggaggccgggccaggctccggggaaggtcccattcatgggtggttgacagtggattggaagcgggagatttggggggatcggttaggatagctggcaaagaatctgtgcttaagtcaacacagcttgggcctgagcctgagacttggggtctcagcaggcactagacattggaagtccggggctattgcactggctttcaactccagccgaggtaacttaagcaggtcaccatagaggtcaggcttttttttttcttttttgacaaagggtctcactctgtcacccaggctggagtgcagtggtgcgatctcagctcattgcaaactccacctccagggttcaagtgattcttctgcctcagcctcctaagtagctaggactacaggcgcacacaaccacacctagctaattttttgtattttttggtagagacggggtttcatcatgttggctgggctggtctcgaactcctgacctcaagtgatccatctgcctcagcctccgaaaatgctgggattacaggcatgagccaccgtgcccagccaaggtcaggctttcttaatcagacctgttaagttagaatttctcagggaagggaccaggcatgagtcactaaaaaacagaagaagccacccagatgagtctaacgtgtgtacacgactttctgatggttcagttccagtccatgcctctaagggtgggttccctggccagtggggccttaggactgctctgtggtcaatacctgctctgcagcacaaaggcaaaactgtccatgctgtctgctctcagcctcagcacagtccctcccactctcaggtaaggtgaacatatcactcactgttcaaatcaggagaggattgagagtgatgggacggctgtcagtcatgttgggatgatgggtgccctagagaaagctcccaggtagaccagaataattaccctaggtgattgctggcttttgtggggcttaggtggctgatctggatctcatgatggtttttaaaaagacattccaagctcttctttggctggtttagccctctcctttattggtcaaatcagagacttgtcatttaactgcctgtctttgactaatggtgctgcaatgctttctttataaagaagaaactgtagatgactgttacctgattggccttttttaaatgaattccaagcttttctatttcttattttaaacaatttgtagacattttattcccccatggggagagacagagaataagaagtaggtagtgatatttttttttttgttttaacaacatgatttactcttataacttgtctcagtggattggtggttgaggtctccaccagcgtttcattgggaagaggtttcaggaacaggatgaaatgcctccccttctgcacctcaccctccagggagaaacaggagctgagtggcttcttctcccccttgctgattatcagatagaaatgtgagtcatttccatgctttgaatatcttgagatgattttcaaggatatctgcatttaagatgaggtgaacattcacctagtagcaaatttgcctgggtcgctctgaaaaattctggcctcctcaaggatacagattgtgacagatacatttttaaaagctttattgatgtataatttccataccagaaaattcacctgtgcaatgattactaacgtatttgcagagttgtatttatacaaccatcaccacaatctaattttagaacgttccttcaccccaaaaagaaatctcctgcctatttgcagttaacttgtgtcttatccaacacctagttcatgcagtcagtaagttttttttggtttgtttttttggttatttttttgagatgaagtctcactctgtagcccaggctggagtgcagtggcgtgatcttggctcaccacaacctccgcctcctgggttcaagcaattcttctgcctcagcctccagagtagctgggattataggcacacgccactgcacctagctaattttttattttttgtattagtagagaaggagtttcaccatgttgaccaggctggtcttgaactcccgacctcagataatctgcccgccttggcctcccaaagtgctaggattacaggcgtgagccacgcgcccggccaataaatatttttagtgtcactttcaggaatggttttgcaggctggtgtgttagtatgaagcagatttctgagcttttgttttgggacagagtctcactccttcacccaggctggagtacagtggcatgatctcggctcactgcaacctctgccccctgggttcaaatgattctcctgttatccctgccgagtagctgggactacaggtacatgccaccatgcctggctaatttttgtatttttggtagagatagggtttcactgtgttagccaggatggtctcgatctcctgaccgtgatccgcctgcctcggcctcccagagtgctgggattacaggcgtgagccaccgtgcctggccgatttctgagttttaaagaggttctcataaacacgttatccttggcacagttcagtctaaaggcagtggcttgtcttgctcctgccactgccagccccctatttcctggatggtggagaggagctggagctgcttggagagctcctcctttagaacttcttcatggcagcctaattaggccctagatatttcaggggtactgagccttgacattaggagtcaaaagatagggcaaacctatacttcccgtgggcaaggtaggaagcaagtagaccgcattatcttttaaagcttttatttgtgaattcctgtctctgtccagctactcttcaggttgagacccaatattccatttcccagggagtgtgagcttctctggacaaatggcagcttgctggttgcgtttcatttctagggttcctgcagaatgcttctctttctccttctaaagagctttagagcaaatccgtcctccaccaaactgaagactctttgataacctgccagataacccagtttatctactgatttttgggtaaaagaccaagcaaattcaacaggtcatcatatgaaaatgttttaccttgaggcattactggaatgcgacccacattctaacatgtggtttcttaatggactgacccttgaatatacaggaaatgggcatgtgtcactcttatttcctgatggttgacgtttctcctgcagcgataccgtatctgtctgtgctccgatatgtggggaatggtgggagttctgagactgaagaagttagttcattctgattttggctgatcatgtgttaacagaattagcaaaaaaaaaaaaaaaaaacgggtggggtggtggtttgaaaatggttgagctaagctttctccttttttaggaagtactaataataatagaggggaaggctgagttattgcatttcgaaatacccttttaaaatcttggattattgcctctatactgtagagttcccattcaagcaagatccccactaaattccagttacttgctagctgtttgtaagtattctcagaagtaccgtggttactttgcacaggaattttggcagtaacatcgttttgacataaagacatttaagaccagttgcagtagcctttcataaaaagcaggatgaagtctgtagcctttatatcaccaaataaacaggccacgtatgcctaacagcacacaaattagcatgaacttgataaaatatttttaaaaagcagtggcgtgatatgaattaggcttcatcacaatggagaatttttcactgaccacagaattttaaaatatagagggtgaggatgggatggtattttataagaaaaggccacatgtggaggttgcctgtggggtgtttcacattgatttgcattgatttgttttgttctatgcaaggagtgaggcagctctttgccttgctgttttaacaagctaggaggaattgtgtttctttaattatttagtctcccgtcagccacattgatactggaatttttccctctctgcttaggtatcttcatactttcttggaaaattaagtggaaaagatagtgcttcttttccttatgccatcatttttactgtacccaaactgtgactttaggagcaccaatttttaagggtaagtctccgtgaaacagagagaatttcttaaataggtaaggccctcttgaggactcagagagattaggggggatatgggggtgttgggatgaagagattttggagaacaggaatcctagacaaaccttatacatctctagaatcaagttgcatatgggaattaggaagaagggaactgcttgattcttttgcttaatttactatgatattgcatagacagtgatcttagatccttgttcaaaaaaggaagtcatttttgaaaaatgttaatattatgcagaaataaaacatcaagtgggtccacaccttcaggaactacacaggaaagtaccgggatggtcacaagtagggaaagggagggactgggggcaggaggggagaggggaggaacgggcaaggccgggtaggcaggtctaggacaggcttatttgaataatctcagtggccctggggcagaggggttgccttagtcgtctggcacctggctcaggggtgattagggcaggtggatggtggcctggagtgtgagagccagtaaaggaggtgttccaggtgtgggttcaggattagttggtttgtattggaagagtatactccgggcaaattgttttaccatctctaggaattggctaatcctaggaggggcagtccctccagagtttgcaaggtccggagtaggaaagcaccagaatacagaaaataaaagacatggttaatacaacatgccatggcttcagtttcagcctaagtgtctcggtaccttgcgtcataatttctttgttgcatcctggaagggcagatttcaattccctaacctgggaggactcgggggctgggtgccccccaggctggaccctcccttcagccccagacctctgtttccaatgtctcacgtggcatcatccctggatgtctgtaggcttcacaggtgtacagctgaatttattgccttcctcccgcaaagttcttcctcagtctgtgacctgtcttgggtaacagcgtagctttgtaccatcggctccaagctaggagtccgtaagcctcattgccttcctctgctttcttccctatatgtagtaattctccaacaccttttatcccatctcatctgtgtcgtgacatgaatgaatttgacccacatcttcagcttcagcctcgggcttccctctagggcccaacccccccagccaccacttcccccgtctctgccaaggttcctgtgactgagtctcagctggctgcctgctctcttatctttttgtccttcaaaccgacaataattgtcttttaacatcagacctcatcacatctctccctgttgaaaagccttggatggcttcctggtgatcacaggctcaagttcaaactcctggccgtggctcacaaggccctgcacaatcagacccagccactctgccaacacacagatactcccttaccatgggaggtcagccgtggtgggccgtggctgcctctcagtccactggctggctgctgcccttctctcctacccagttaaggcccattggtcgctgaggccaaggtcatatgtcagctcctctggggagcctcccgtaaccatcctaactgtaaccagtcactctgttcttcatgtctcctcaatactttttgtttctttgtttgagacagagtcttggtctgtcacccaggctggagtgtattggcacaatcttggttcactgcaccctccgcctcctgggttcaagcaattatcctgcctcagccccccgagtagctgggactacaggcatgcaccaccacgcctggctaatttttgcatttttagtagagacagggttttgccatgttggccaggctggtctcaaactcctgacctcaggtgatctgcctgcctcagccttccaaagcagtgggattacaggcatgagctgccgcacctggctctcctcagtactttttatatacctcttttggtaatgatctcatagtatcttggctactttttacctgtggctttttcatcacatctgacccatcattcattcaacagatctttgttgagtaattatcctctagtaggcattgggccgggtgttgaggatacataaagaactaaatcaaatcctgccctccagaacctaatagcctctttggagaagataggaatcaaagccataaccaggcaaacttatcagagtctaattataattgaaacatggtacctgccatgataggtgtatgaacagagtcttgtaagcacagggaagaaagaactctaccaggaagaatcaggaaaagttccaggaagtcgtacttgagatggatcttgaagaaggaggacaagtttatggagctagagaggtggggagaaacagagaaggttggtgattttgatggttgttttctctaagatcccaaatgtggaaaaaggcatatagatgtgaaacaattttcaagctggttgaacagtgggattttccgtctaggtgtccttgattaggtattcttgtgtttctcagtcttacgtgtagcccggggagcagactgtctgcatttctgaaggtctgtcagattcagtgggaaaatgtttatgtaacacatctcccacgtgaacccaaaactcacaccaccaaagttagctgctaggttgagacgtgtgtttttacactggcgtcctccttacagttagattgattatattattagttgaatttgaggcagttttcaaaaccctctcttctgggagtttactatattaataggcattcaaaaaattctcgtggcagagtgccttagaaatgtgaaactctttcctagggctccaaatatccaacttctctttgagctttggagtcagatcaccctagtgaaaggcctggctctgtcactcgctagtatgcacccttggggaagttatttcatcttttggaaccttagttcccttcctagtaagatgctgaggccgggcgcagtggctcacacctgtaatcccagtactttgggaggccaaggtgggcggatcatgaggtcaggagatcaagatcatcctggctaacatggtgaaaccccatctctactaaaaatgcaaaaaattagccgcgtgtggtggcgggcacatgtagtcctagctactcgggaggctgaggcaggagaatggcatgaacccaggaggcggagcttgcagtgagccgagattgcgccactgcactccagcctgggcaacagagcgagactctgtctcaaaaaaaaaaaaataataataatactgagtaagatggagcttacatggtgggattattaggagttgaagataaataatgcactagagtgaacaacctaattcctggcatgtagttagtaaatgagaggtttttggtttttttgttttgttttgttttgttttgctttgctttgctttgttttggtgatgtcgttattatcatgcttgaatgagcccatgactgaatcttgtatggactggagaagtgtttaggcagatgctgaattatcagtgtccatgaaatcagcgtctctcctaatgagagatgggggattggaggaaacgaatcgtaactcctttttcctttcctttcaatgtctttgtatattttattaaaagttgctaaaaaaaaaaaaccactttcaaaaacatcccatcacatgtcattgtagggaagcaaaaatgagaaaaacacttgatattttttcctctaaccattttatcggaactgaatcccgctttatttgctgaggctgcagtagtttattcattctatattgatcagactccagatttgcgtggacaacttaacttataacattttaagtaaaatcatgcattttaggcagacagacatctcactttttagtatatattccttcttctagaggattatttggtgtgtgtctgcgtgtgaccgtgtgtgtttattgaaaggaaacagttccgtgtttagagttttgggttgttagttagaggtctagttaagctataaaattacagtggaataagtgatgacagccagttagtacagttccctcttatagctgaactgagcttaacacaccaacagaaatgtttggcaaatagactgctaaaatgactctttcctttgtggggacattagttgcctgacatttacatgtttataatgagtcctggaagtagaaatgaaaatatgtgcagaaaatagatttctatcatcacttccttttcttattgagggtagcattgtccagtacgtttttgtcatctctgtgctttcttcttgtccacccatacaggaagaatgttggtgaaaagcacagaaaccagtgacgtttgtggctgtggaatttccatggagaaaagagagcatctgaacacctggaccatcttttgcacctggcagaccctctgcactcaccccagcgtgttctgtgaacttgagtgacaacgcgtgcttgcagggtgctttttggatgactggggaagaggtggggagggggtggtggggggaagcatggacgagaacatggagcaaatgttttacaacctgaacctcagaactgtgatcctccaaggagcgcgctacttgaagaaaagaaaaaaaaaaaaaaaaagtcgaatggcttctcagggattttgttttccgtgcacatataagccatagttacagtacaggtggcagtatttagagcactcagatttcagttctgttaaatgtgaaagagggatcgactgacgttcattgctgttccataactagtgtaaaatatgtatatgtttatctttatttttataatatgcaaatacatttaaatttatacagtttgaagcttctagcgttagttcacactgggtgcaatattctgcatgagaactgtgccaagatggggctgatttcttattttagtataagacttttttgttttttctttattctttaatcctcttcacattaaaaaaaaaatctctctgttagcccatggattaagtgttggttcatagagattgccaataatcagaaagaaccttaaatgtgcatttaagacagtgtcccttcccttcttttcaatgaaggtccctgcctatataaatcatctggcacgctggtgggaaatcctttgctcttccaacgtgttattagtgctgggcagagatggggcacactcaggggccaaagaggacaaaaagtccatgcaaaacttgagtcttttaatggcttaagataatcaggagtcagttctgaatcttacaaagtgctctgcttaataagtaccttacttagcagagcactttgcaaacatattacttattagcagagctctttgtagaccttccacatctggctgtcagatcttaaggttgtgaatttaggctccagttatattcactggagagcataatcccacacgggttatttataaatacagagcctctgattggacggtctcctgccaagaactagtaatacccttgttttaaaatcttcacaaggtaaaacttaaaaagccaaccaaacaaattgctctccattctacttttaattgggccaaacagcatatgctacagtagtaacatgtttttcggagagtgtaaaaaactctgtttacatttgcctcctccgtgggttgatcgaaaatgtataaaactgactgcttctcgccagcctcagacaagaagagtgagttgctggtactcgctactcttttacttcttttgtaaagtattgactcttggaaggctacagtatacaaagtctcaacatgttttttaaaagaaataaggagcaagcgactgccctgctagaaatcacaaaccgatttttgtagaatattttgtgccccaggcattaatttcactgactccagaacctgcagttcagagaatgatttcttatgatgataaaaatcgaatgggatcagacgatgtttgcatttttttaatacttgaataggacacctcaagtttgagatttcattttcttttagaacacagtcacaagattaatctggtgaatccttttgtcacagttctcgtgtgtgtgtgcgcgtctccgtgtgtgtgtgtgtgcatgtgtgtaaaactgaatggtcacatttaattgctttttggaccattgaatagttgggaagtaagaattttttaattggcatgagacggttcctcaactgttaaattaaccaactttgacctgtctttagaaaaaggcttatttgtatgattttgggctaactccccggggaccatattaaatgacaaaaatgctcctttgggtgacacaccctacaaagtatttgctgttacgaacataaacgcccacattcttaatatctaatatttttgaccagtgatgttttatgctgtcatctgaaccctagagaagcagtgtcagaggaaaccttggtgtcacatgtgtcttagcaaaagggttaccatgatcgagggtcatgtgaccaaaagatgctccagagaagcttgagaatttgtttcaagttgggaggagggttggagatacaaaaatcactctgctctacaggactcttcagctgtctatgcaagaaattccgttttctctttcagcacctggaaagacacagcagcccaccgaggcgataggtgattcactaagcacaagaggaatgttttctaagcaaggcgtcccttgcctctcaaacaaatgccctccaagtttgttagggtttctattcctgcaacttgtggtatcaaaaccacttcctggaattgtcaaagcactgccaaaataaatgtttttcccccttctaagaaaaaaaaaatgacagtgctcatatttgacacttgtgtattggactctcttttgaatgaataaaaaggaaaaggggtttggtgtaattcctgatggggtgcgtgttgtttttcatgccatggtttgtgaattttaattgtggtttcccatttcgttgttgtaactgggcagaaattaaaaaagaaaaatcaataaaaatacaaagaaatggttaaacagttgtattcccagaacttaattatttcagattttgttcatttgtttttacttttaattctatcagttaaggaatgacttttatagttttagtccttagtggtactgttggagctgtgggaggtgggtggtggtagctctcatctgtttggtctccgaagagaaaactaaagaatccctgttttaaaactgcctctgttttcaggctgaggatataacttgaagatcagctctcttaaatcagaatcttttttttttttttcaatgatccactatattcctaagtcacagctgttgaatttatggtagctttggaagttcccctgatctttctttcaaaggctcttagcagaagtcctgctacatactgcctcagggtgccctatttgcaaactggaagagcaggcccctcaggtacccatcagaggatttagtactccatattgtttaaataaaggcaaagagaagataaggaaggaccaaagccagggtgttaacgtggtgaatccataacgggtctgcagcaacctcaattcttgcctcctcagaagaaagaattcaagcgaggggcataagacagcaggagagacggaggcaagttttagggcaggagggaaagtttattaaaaagctttagaacaggaacgaaaggaagtacacttggaagagggccaagcaggcggcttgagagagcaagtgcacagtttgacctttgacctggggttttatacgtgggcatttttccgaggtctcccctgattcttccttggggttggccgtccacatacgcagaggcctgccagcgcttgggagggggcgcatgcgcagtgtattactggagttgtgcgcatgctcacttgaggtgttcttcccttactagttgaatgttcctagaaggtcctataccagtcaagcgccgtccttttgcctcttaatgcgcatgcttcagcccacgcacccaaatcctgagctcttatccgaaagctgctgatcaccagcttcaggtgttttctgtctgttgggagcctgcctttccctggcaccggctgtcaccaattattttagagagacagtgtaacaaccacctgaccatctcacctgatggttgctggggggcgttcttctgccctgcttatgtgtgcctgactacctactgtaacaagaggagccctgccctgaagacagcgcaatacagggaagaagggatcgcttcagaccaggagggcctcactgcaagactcctgacaaggcaggtagaaccgtggggtgtgcagaattcaaagccacttttgccaacagaacagaggaaagcaggaggcaactagaatttccaaaagaagtgtcacaagaggtgcgtcccacgtgggagaggtgtggctggccctacggctgcatcccgctgagaggtgacagcgtgctggccctcctcacagccctcgctcgctctcggcgcctcctctgcctgggctcccactttagcggcacttgaggagcccttcagccaccgctgcactgtgggagcccctttctgggctggccaaggccggagccggctccctcagcttgcagggaggtgtggagggagaggcgcgagcgggaacccgggctgcgcgcggcgcttgcgggccagctggagttccgggtgggcgtgggcttggcgggccccgcactaggagcagccggccggccctgccggccccgggcaatgaggggcttagcacccgggccagcggctgcagagggtgtactgggtgccccagcagtgccagcccaccggcgctgcgctcgatttctcaccgggccttagctgccttcccgcggggcagggctcgggacctgcagcccgccatgcctgaacctcccaccccctccgtgggctcctgtgcggcccaagcctccccgatgagcgccgccccctgctccacggcgcccagtcccatcgaccacccaacggctgaggagtgcgggcgcacggcgcgcgactggcaggcagctccacctgcaagccccggtgcgggatccactgggtgaagccagctgggctcctgagtctggtagggacgtggagaacctttatgtctagctcagggattgtaaatacaccgatcagcaccctgtgtctagctcagggtttgtgaacgcaccaattgacactctgtatctagctattctggtggggccttggagaacctttgtgtctagctcagggattgtaaacgcaccaataagcgccctgtcaaaacagaccacttggctctaccaatcagcaggatgtgggtggggccggataagagaataaaagcgggccgcccgagccagcattggcaacctgctcgggtctccttccacgttgtggaagcgttgttccttcgctgtttgtagtaaatcctgctgctgctcactcttggggtccacactgcctttatgagctgtaacattcacctcaaaggtctgcatcttcactgctgcctgagccagcgagaccaccaacccaccagaaggaagaaactcccaacacatccaaacatcaggaggaacaaagaaactccagacgcgccaccttaagagttgtaacactcaccacgagagtccgcggcttcattcttgaagtcagtgagaccaagaactcaccatttccggacacacagcaaacccaagcactcactccgtgccactgcctccctcctcctggtgaaggtcgtgcaattagcacacatcaatttgggccttgtttttctttatcaagaaacagttctttgctgagcaggccacgcagaagtacctgtcagtggtgacaattagaagtgcattacttatcacatatgttgttccctcctaaggcaatttcccctttttgtgagttttttgaaagaacttccaggttcactgaacttttgtaaaccaaaagttgagtgaggcaggtttcaatctatttgaggtttatttagccaaagtcaaggacgcgcctagtaaaaagcacagatcacaggagcatctgtgacctgtgctttttccaaaggggttttgggaactttggtatttaaaagggaaagagcaagcaagagggaaaaatagggagggtaggcaatgcggcggatggttaccttcttgtgaggctctgatcagcttcagtgaatttacattttacctatgaaaagagggagtagaggaaaaaaacaattattcattgtctccagcttagtaaatctacattttacacaagataagctcagtaaatctacattttacacaagataaagttaacgtttaaagagggagtagaggaaatgaggctgtgacatgaggttgtgaaattacagctgtctgggaacagaaggaacagcagtttttgcgtgactcagttcccatgctgaagtttccctttgccatcctgagtttgggatcctgagattctattttcctttcactctttgaacacagagtgcctgacacatggtggcagcttctgtgccaaattcaaatgcccagggcttcctttgcccatggctgctggtgccccccagtggaactggcagtgacaaaggccatcacctggtggaaatgctgctcctgctgccaagtcagaagcgggtgtggaaggactggaaggggtgttagaaagcagatgaccttctgaagtgatctgtgttcgacggcatgagaaatttcaccaggtaacagaaaccctatttgaatatttgtaacctctttcagggaagcaatactttcttcatctttaaaaactaggaatattttttaatgaaatgaattttattctaaatgctgagaaggattcagactgcttaatggaacatttgcgtctcctgaggtacaaatacaggctcccctttaaaatgattctgagatccaataagaaatgctgcattaaagaaagcttaaaagaggctgggcatagtggctcatgcctgtaactccaccactttggaaggccaaggaaggaggattgcttgaagtcaagagtttgagaccaaactgggcaacatagtgagatccccatctctaccaaaaagaatttttttttaaatcagccaggcgtggtggcatacttgtagtcccagctactcaggaagctgaggtgggaggattgcttgacctcaggagtttgaggccagtctgagcaacacagtgagacctcatttctacaaaaaaaaaaaaaaaaaaaaaaaaaaggccggtgtggtggcacatgccccagctactcaggaggctgaagcaagaggctcacttgaccccagtaggtcgaggctgcagtgagccatgatcacaccactgcactccagcctgggcaacagaatgagaccctgtctctaaagaagaaaaagaaagcttaagacagtgtttgctgcaggactctgagaaccatttagataccaatacaaaaggtgaatccccaaaagctgagagaatgtgcagcatttccatgtgtatctgagcgtggaaggaagacgcctctccccagagctgtctggacatccccccagaccagtttttccaaagtagggccatgtactccaatgcagtctcaggcgtttgtaattgaggcacagatggcatcaaatcatagagaatcacttgtcttttgcattatgtaggaggcagctaggtgcactgactccagactgcctccatttgaatcctggctatcctgagcgtctcaaggtcagataaccagatccacacatatttgtgtctttccacaatgtcagacttttgttgatgctatttcagtcacagaagccacgagctacctagaattaccaaggaggcgactctccttactattacccattcagtcagtagtcagaggtgtgaggctcaaaccgttccacaagtcagtcagcattgcaaaccatacatggtgtggtatgcttaatcgatatataaatgttatagattaaacattccacatcaaataaagtaaattttacatcaagagaggccaggtgcagtgaatcatatctgtaatgctagcactttgggaggccgaggcgggcaggtcgcttgaggtgacgggttagagagcagcctggccaacgtagtaaaaccctatctctactaaaaatacaaaaattagccaggtgtggtggtgtgcatctgtaatcccagctcctttggaggctgaagctggagaattgcttgaacctgagagccagaggttgcagtgagccgagatggtgccactgccctccagcctgggtggcagagtgagactccgtctcaaaaaaaaaaaaatcaagagaaaagggatgagggaaagagttaaccagtccaggaagagcaatatagacaaaaagaatttcctgcaaggtcttgcaaggaagagtcttttatgtgggcacagacttcagaggtggatgccaggtgcttatcacaagtgacagcaagacagtgtctgttaagatgggcgttttgagctggcgaagtcctgctctccagagtcgtttggtgaggcctgatagtggaaaagtgcgcctggttttgtccttatctggctgggtgcagtgtctattgattaggtgaacatctggtccctgtcggcatgatggcttttaaaatgtaagatggagtctttttctaagatggagttgcttatgttaatgctgcttgatctgctgcctctgccatttattctttcttgtccctcagagtattagtccgttctcacactgctataaagaaatacttggctgggcacagtggcttacggctgtaatcccagcactttgggaggtcaaggtgggtggattgcctgaggtcaggagttcaagaccagcctggccaacatggtgaaaccccgtctctacaaaaatacaaaaattagctgggcatgatggtaggtagctgtgatcccagctactcaggaggctgaggtgggggaatcgctggaacctgggaggcagaggttgcagtgagctgggatcatgccactgcactccagtgtgggtgacagagcgagactccatctgaaaaaaaaaaaaaagaaagatgaaaagaaatacttaagactgggtaatttataaagaaaagtttaattggctcatagttttgcaggctgtacaggaagcacgatggcttctgagacctcatgaaactttcaatcatggcagaaggtgaaagggaaccaggcacgtcttagggctggagtaggaagaagtgggtggggcagggaggggtgggggtggcatggggctacatacctaaacagccagatctcgaaataactcactcactatcgcaagaacagcaccaaaggggaaatccacccccatgatccagtcaccacccaccagaacccacctccaaccttgggtactacaatttgacatgagatttgagtggggacatggacccactatcactcagtttcctcttgtgtaaaatggggaaacaatctacctcatacaattgttataaatgttaaatgagataccatgtataaagtgcttatgacagcactaatcaaatacaattgttctattgcatagctctctctttttttttttttgagacggagtctcgctctgtctcccaggccggagtgcagtggcgtggtctcagctcactgtgagctccgcctctcgggttcatgccattctcctgcctcagcctccggagtagctgggactacaagcacccgccatcacaccttgctaattttttgtactttcagtagagccggggtttcaccgtgttagccaggatggtctcgacctcctgacctcgtgatccagccacctccgcctcccaaagtgttgggattacaggcatgagccgctgcacctggccgcatagctctctttatacagagaaagcaggcctcaagttcagagcctttaacagtgtgtagctagaatgtttaatttttgttttcattatatttattaattggctttttgcatgagtgataaaacatttgttttaaaaatgaatgcatttagaaagaaatacttaaaagtgtattagaaaaagttttaataagtgcagttgatacacagatgtagaaaaaatgtgaagatatggtaaaaattatgacagtggtatgtgaaagtctgcataatataatcaaactagacagtccgggactcctggtctaatgtgatcccactgattaatgcaacccgtgggagagaccaggtgatttgcctgagcaagtctgaagcaccatagaagcttttaaagatgactaggtgcagtggctcatgcctgtgggagaactttgggaggccgatgtgggtggatcgtttaagcccaggagttcgagaccagtctaggcaacatggcaaaaacccatatctaataaaaatacaaaaattagccaggaacagtggcatgggcctgtagtcccagctacttgggaggctgaggcaggaggatcacctgagccttgggaggtcaaggctgcagtgagctgtgattgggccactgcactccagcctgggaaacagggtgagaccctgtctcaaaataaataaataaataaataaataataaataaaaagatgcttcctccagttttaaaatttctgctagaaagaggcttattgggagattatggaacaattattatgttataaaactaatatttttaaaatttgaaaggtaaagtaagttgtgcattcttaacatttgtttcagcacagccttttcacataaatataactctgaaacttgggaaaatttgatttgtgaaaactttcatgtttttcaggaggtccttatgggtagaatactttttctgggaatgttttactgaagccaaactgaaaaagtgaacccacatgtttccctcattagaaataaaa

SEQ ID NO: 159 - DNA, 3650 bp, Homo sapiens
atggctgggatggacagtggcaacctgaagaccgcgaggctgtggcgggacgccgccctgcgtgccaggaagctgcggagcaacctgcgccagctcacgcttaccgccgccggggcctgccccggggccggggccgacgcgctcgagtcccccgcctccccccagctcgtgctgccggccaacctcggggacattgaggcactgaacctggggaacaacggcctggaggaggtacccgaggggctggggtcggcgctgggcagcctgcgcgtcctggtcctgcgcaggaaccgcttcgcccggctgcccccggcggtggccgagctcggccaccacctcaccgagctggacgtgagccacaaccggctgaccgccctgggcgcggaggtggtgagtgctctgagggagctgcggaagctcaacctcagccacaaccagctgcccgccctgcccgcccagctgggcgctctcgctcacctggaggagctggatgtcagctttaaccggctggcgcacctgcctgactccctctcctgcctctcccgcctgcgcaccctggacgtggatcacaaccagctcactgccttcccccggcagctgctgcagctggtggccctggaggagctggacgtgtccagcaaccggctgcggggcctgcctgaggatatcagtgccctgcgtgccctcaagatcctctggctgagtggggccgagcttggcacgctgcccgccggcttctgcgagctggccagtttggagagcctcatgctagacaacaacgggctgcaggctctgcccgcccagttcagctgcctgcagcggctcaaaatgctcaacctctcctccaacctcttcgaggagttccctgccgcgctgctgcccctggctggtctggaggagctctaccttagtcgcaaccagctcacctcggtgccatcccttatctcgggcctgggccggcttctcaccttgtggctggataataaccgcatccgctacctgccggactccatcgtggagctgaccggcctggaggagctcgtgctgcaggggaaccagatcgcggtgctgcccgaccactttggccagctctcccgggtgggtttgtggaagatcaaagacaacccactgatccagcccccctacgaggtctgcatgaaggggatcccctacatcgcagcctaccagaaggaactggctcattcccagccggcggtgcagccccggctcaagctgctcctgatggggcataaggctgcaggaaagactttgctgcgccactgcctcaccgaggagagagtggagggatgcccaggaggaggggacaaggagaagtgctacccaccgtcacctccccctgtgagcaagggcatcgaggtgaccagctggacggccgatgcctcccggggcctgcggttcatcgtgtatgacttagctggggatgaaagttatgaggtgatccagcccttcttcctgtccccaggggccctatacgtgctggtggtcaacttggccacctatgagcctcgccactttcctaccaccgtgggctccttcttgcatcgggtcggggcgagagtgccccacgcggtggtgtgcatcgtgggcacccacgcagacctgtgcggagagcgtgagctggaggagaaatgtctggacattcaccgccagatcgccctgcaggagaagcacgacgcggagggactgagccgcttggccaaggtggtggacgaggcactggcccgggacttcgagctgcgctctgccagcccccacgcagcctactatggcgtttcggacaagaaccttcgacggcgcaaggcccattttcaatacctgctcaaccaccggctgcagatcctctcccccgtgttgcctgttagctgcagggacccgcgccacttacgacgccttcgggacaagttgctgtcagttgctgagcaccgagagatcttccccaacttacacagagtactgcctcgatcctggcaggtgctggaggaactgcatttccagccacctcaggcccagcgactgtggctaagctggtgggactcggcgcgcttgggcctgcaggcgggtctgaccgaggaccgactgcagagtgccctctcctacctgcatgagagcggcaagctactctactttgaggacagtccggctctcaaggagcacgtcttccacaacctcacccgcctcatcgacatcctcaatgtcttcttccagagggatccctctttgctgctgcataagctgctcctagggaccagtggagagggcaaggcggagggggaaagctccccgcccatggcgcggtccacccccagccaggaactgctccgggccacccagctccatcagtatgtggagggctttctgttgcatgggctcttgccagctcatgtcattcggttgctgcttaagcctcatgtccaggcccagcaggacttgcagctgttgctggagctgctggagaagatgggactctgttactgcctcaataaacccaagggcaagcctttgaatgggtccacagcttggtacaagttcccatgctatgtgcagaacgaggtgccccatgcagaagcctggattaatgggaccaacctagctgggcagtcttttgtggctgagcagttgcagattgaatatagctttccttttacttttccacctgggttgtttgcacgctacagtgtccagatcaacagccatgtggtgcacaggtcggatggtaaatttcagatctttgcctatagagggaaagttcctgtggttgtgagttacagacctgccaggggagtcctgcagccagacaccctgtccattgctagccatgcatcattaccaaatatatggaccgcatggcaagccataacccccttggtggaggaactgaatgtcctacttcaggaatggcctggactgcactacaccgtgcacattctctgttctaagtgccttaagagaggatcgcccaatccacatgcttttccaggggagttgctgagtcagcccagaccggaaggagtggcagagatcatttgccccaagaacggcagcgagcgagtaaatgttgccttggtttacccacccacgccgactgtgatcagcccctgttccaagaagaatgttggtgaaaagcacagaaaccagtgacgtttgtggctgtggaatttccatggagaaaagagagcatctgaacacctggaccatcttttgcacctggcagaccctctgcactcaccccagcgtgttctgtgaacttgagtgacaacgcgtgcttgcagggtgctttttggatgactggggaagaggtggggagggggtggtggggggaagcatggacgagaacatggagcaaatgttttacaacctgaacctcagaactgtgatcctccaaggagcgcgctacttgaagaaaagaaaaaaaaaaaaaaaaagtcgaatggcttctcagggattttgttttccgtgcacatataagccatagttacagtacaggtggcagtatttagagcactcagatttcagttctgttaaatgtgaaagagggatcgactgacgttcattgctgttccataactagtgtaaaatatgtatatgtttatctttatttttataatatgcaaatacatttaaatttatac

SEQ ID NO: 160 - protein, 1036 aa, Homo sapiens
MAGMDSGNLKTARLWRDAALRARKLRSNLRQLTLTAAGACPGAGADALESPDQLVLPANLGDIEALNLGNNGLEEVPEGLGSALGSLRVLVLRRNRFARLPPAVAELGHHLTELDVSHNRLTALGAEVVSALRELRKLNLSHNQLPALPAQLGAHLEELDVSFNRLAHLPDSLSCLSRLRTLDVDHNQLTAFPRQLLQLVEELDVSSNRLRGLPEDISALRALKILWLSGAELGTLPAGFCELASLESLMLDNNGLQALPAQFSCLQRLKMLNLSSNLFEEFPAALLPLAGLEELYLSRNQLTSVPSLISGLGRLLTLWLDNNRIRYLPDSIVELTGLEELVLQGNQIAVLPDHFGQLSRVGLWKIKDNPLIQPPYEVCMKGIPYIAAYQKELAHSQPAVQPRLKLLLMGHKAAGKTLLRHCLTEERVEGCPGGGDKEKCYPPSPPPVSKGIEVTSWTADASRGLRFIVYDLAGDESYEVIQPFFLSPGALYVLVVNLATYEPRHFPTTVGSFLHRVGARVPHAVVCIVGTHADLCGERELEEKCLDIHRQIALQEKHDAEGLSRLAKVVDEARDFELRSDHAAYYGVSDKNLRRRKAHFQYLLNHRLQILSPVLPVSCRDPRHLRRLRDKLLSVAEHREIFPNLHRVLPRSWQVLEELHFQPPQAQRLWLSWWDSARLGLQAGLTEDRLQSALSYLHESGKLLYFEDSPALKEHVFHNLTRLIDILNVFFQRDPSLLLHKLLLGTSGEGKAEGESSPPMARSTPSQELLRATQLHQYVEGFLLHGLLPAHVIRLLLKPHVQAQQDLQLLLELLEKMGLCYCLNKPKGKPLNGSTAWYKFPCYVQNEVPHAEAWINGTNLAGQSFVAEQLQIEYSFPFTFPPGLFARYSVQINSHVVHRSDGKFQIFAYRGKVPVVVSYRPRVLQPDTLSIASHASLPNIWTAWQAITPLVEELNVLLQEWPGLHYTVHILCSKCLKRGSPNPHAFPGELLSQPRPEGVAEIICPKNGSVNVVYPPTPTVISPCSKKNVGEKHRNQ

SEQ ID NO: 161 - DNA, 21261 bp, Mus musculus
ttgtatgggcaggtgagcagctgccagtctcaagaatgagacccacaggatgcttccttagaagagttgtgggcaggccgtgaagccaggaggcataaacgtgggaagagaaggaaggtggcggggctcgtgaccgttagtatcatgaacttttccaagatttctagactgtcacatttctcagaaacaagaaaaaacacacagaaaaagctgtgtcatgtggtggttgccacccctctgcaggtgcccagtcagcaactgtaggccggcccttggtgctgctccacagaaacagaaacagtcagctgtgtccttcctttctcacattcctgtccacaaagtcctcaagtaactccagccagggggagtgtcctgctcagcagctgaggggtcgccgcctttactccaaggcactaggcttctcctggatatcctttgtctcccatgagctctgagaaaggtccgcttcaacccttgcttttcacagccagcctcccgccttgggccagctggtgagtctgtacctggggaggtcacactttctttggaaagaacccgccattatgagctggctagaggaaaatgtccatgaggttctgcaagcggtggatgctggagaccctgctgtggaggcctgtgagaacaggtgagctgagcctggcaggtccactagaacctagctcagggaggaaccctgctggcctgagtcccttccgtgtgccctcctgggtctttatcgcagacactgggcctcaggtttcagtttagcttttgaaggagccaccagtggtcctgggcatggttgttgctgtgaagtgtgtgggtgttgtgaacttgctgtctgtacagatgtgaggtgagtgggctggtagcacagcttcaacccaagagtgacaagggaagctttcccagaagtcagacaagccagtgcataccggggctctgcagactggctatgggtgacttggcactttgcaccgtgggcgccagtttatctgctgttgtctactctggcctcaggcggaaagtgttgtaccagcgtgcgcccagaaacatccaccgccacgtgatactgtctgagatcaaggaggctgttgctgccctaccctcggtaagaggggtgtggaatgtgtgccggtcatagaatacagctacccactggtcggcctgtgtgccgtatgggttggaactggtgcagaacgtctgcccccatggccagtttctctgggtcttcctcaccatgtgactacctcggtgagctattccagcatggtgtcacactgtctgtgacagagacctaggtcttcctcacagaaccctgcagtagtccctgtaacacacgcccctgcagcagaacctcggctctgccctcacagatccctgtgtttggcctctaaggtgtggccaagggtggatcatttggtgaaccagcagctcagcgggaccctggctcccatccctagaccgtggtctgcagtcagcacagtccatcattggcaacatgagtacagatagtgccacctgtgtaacgtgccctttgccctatgtccactgactggggcaaaatgtcacatgttcccccagactattctctaggagagactgttccacccagacctaaagtttcttggagcagaaacggccacttctgccaggtgttgtcactgcctcccggcagataggtcagctctgaggtgagagcagctgaagctttggaatgcaaaggtggccagcactgctccagaatctgttttgtgtcctctcctaaggatgtgaccacacagtctgtgatggggttcgaccctctgcctcccctggacaccatctactcttacgtcagaccagagaggtaccgcccctgctttgtcctcacgcccacacaacccactttggtactttggggctcgctggggctgcccttacagactagaaggaaaatggcaaacatgggctggacaggccagtccactggggagtagggaaacagtgtgacacggagctcctcgagtccccagaggtctgagcacttccctgtgggttctgtagcaagttgagaagtgcagaataagaagccacctctggcctggtgcactgcagcagacagcagacaccacgcctagaaccaaagatgggcagcagtcacatttgtgtggaacctgtggggaaaacgtctaagaagcacgtgccacactgggaagtgacagtcacctgctttgtagaaaggtgtgccccaaccaaagggtgacaactagccctctgctatgtgcaagctgtctcccaagagcacagtgtaaggtctagtgagtgctgaaggaaggtcgtgtggctttgggggtgggggggtaagcgctgacgtgggcatgcctgttgtgtgcatggggcagcgttagaatctgggtcatgaaagagctctcttcccttccctcctagccttcacggctgccctgcctgggtccattgctcccatgtctgtctcaggcaagagccacaggccttctagaccctgacaggaggtagtgagtagagacttccgttaaagttttagattaatatgagaattttcagtgtgctcagaaacatcctaccaggctgtcatagcccagccattctagtcttctaccatgctcatggggtccccagacataagtgtgaccacactgtgctatagagctgtgcttggcccctgcaggggcctcccagggttgcccttacctttcctgtcatcttttgtgactgacccgtcttccccagcatcatatactgtagtcaccttgtagtctctccatgtgacccagcagatgaggtccctaaagagccagcatctggggctccctccccacttcccttgttgccctcgggcaggctagtagtcagcagtgctgaccccagatcctgatgtgcagtttagggcccagagcctgagttccactcaaaggctgcctgtccccagcagttaagagagtgggtagggacagctgacccgggctggaaccccacagtgtctgttaactttaattttctgacccctttccctcctccctccctccttccctccctctctcccctttcctttcccttgcttcctttctctctctctctctctctctctttctttcttttaattttcaggctgagtccagtcagccacggaaacacaatcgccctcttcttccggtccttgttgccaaattacaccacagaggtatgttgattaagcacgctggtctttcccctcccaagttaacatgggcaagtcctgctcagggtggaggcagaaacgggtgagactgtaccctgcctgtggtgccatgcttataagtggggacttggcctgctggagttgcgtggctattctaaggtgagtggtgtgggctgagaggcggctcagcatcatggtaggttggctttggctaagtgagcgcatctggctttctagagcagctgcttcttcttctgggcagggactttgggaggggacaggctcaatcttggggcctaagttgcctcagccgttgaacccaggatctcaagtctacccagactcaagtctatccccacttagctgtgtctcattgttcagggggagaggctggaggaaggagtggccgggggtccgaaccgcaatcaaggcttgaacaggctgatgttggccgtacgtgacatgatggccaacttccacttcaacgacctggaggtgcctcgggaggacaatcctgagggcgagggggactgggactgaactgtccagatgctgtgcccagagccgtgcagtcacgttcccgaattcatttctggttggagttaaccagttccgagtagaaatgctgaccatgccatcacccgtgtcttttgttttccctctgaagggagtgggttatactctgggtgagcttcctccagtgtcctcagaaacagtcccagaagcagtgcgccccacactgggtgcaccctatcatgtgcctcacacttcagcatttgtaacatggtgcatagaagggttgtcccagggtctgcagtaccaggaccctatctgctccttgctagaggcccctgaaccttccacacatgctacacccagcatgtttgcaacactgaggtcaaacccagggcctggcacatggtctgctgctgactgacagtctcagcctgggaaccttagaggaaactggaagggctggaagtgtcgcagctgggcagctgctcccttagtatgcactgcaaaagccagcggtgctggtgttcgtgtgtaatctcagcattcaagcagagagggggacaagagggttagaagttcaggatcaccctctgctacataattaagttcaaagccagtctgagttatatgagatcccatctcaaaagagatgcatgaggggcctagaattcaaagagacgttaaaaaaaaaagaaattgtcctaagcaggtaaggaatactttacagagattaaagggtatttgatctagggatgagtggggaaccctgaccaagaacccgagtccagtggcaggaacaaagaccatagccaggcaaggccggaggtctgtgtctcataagctgtttgtggaaagctccaggctgctgaggtgttacagctgtgtcaggtgtctcccaggcagcactgacggtttgcatcccacaaagcctagcggaggctctagtctgtggagcagagtcttagctgtgcaatgacagcgagggccccctaaatcttggtccattgatgccttcctgggagtctacgtgtttcagactggatgattgggtttggagtacacataaaacacgctttaggactgagccattctgatgtaacggtactggctggcaggcccgatggcctgaattcagtccccaggactcatgtgctgcacagtgagagctcgctcctgtagcttgtcctctgacctccacacaatacactgccaggtgcacacctacagaattacacccaggaaatggaaaagggacagtttggggttaaagcactgtgcagaggcccaggctgtgaacttaaagcacacatggagggtgactcacaactacccatgattccagctccagtgtacacttaaggaggtctcttaataggtgctctggggcaaggggccctggatgtgactgagcaggggcccagagcactgccccttcagcagaatattgagggctgacttgtttccatctatcagcctaatgtcatagcccattcctaagggggccatttacaggagggactccgtgttcaacgtacatgcctggtaagaggtcacaggtcacatgaattggtgctgaatgtctttttttctccagcatgaattggcaaggccatgaagtctggatacaggctctacaacttctgctcgtgggtcagcaggggcctgggagggcaggcctgaggggcctggggagggcaggcctaagggcatggctcccaccagttgcctcacctatccctgggtttggtgggatgatctacacccagtcctggggagggttactgctgagatgggcctcattcaatgtgagtttccaagttggaatggcctgtggtgagtttcagccaaggggaggaaggactgcctaggaatggatgtatgttgtggaaatgacaagcaagcgcggaaaacctggcatcctgcctcttcctttcagcagctgtaagtccatccggatgaggatgtgacatctggagctgcagcagctattctgcaaccacgtgacaacgaattccaaaatgaagagccatgctctaggaacagtgaagcagaggataccccaggccttcaggaacgtcccacctgcaggcctgtttcctgagaggccatcagatgatcggcttcagaagtgttgctcagccttgcaactgaattcatttctaatggtgaaaaataaaaccagtccttcacaccacctgtggatcatcatcgggaaaagtaactttctgagacagagtctcactgtgtagcccgtagtggcctggagcttgctatgtagaccaggccgccctttactctgtagaccaggctggcctcggagatccgcctgcctctgtctcccaaatgttaggattaaaagagtgcaccaccacacctaacctgcatgtcatctcaacagctttaaagtctggcctgtcacccaggtaggggtgacagtgtgtcccgctcctcccgtacctccctggcccctttcccaagaggcgcctgcctatgtgttctgtgcagaattgttggtcatttgtgcattttcatgtagtcagggagaaaacctgtttgctgcctctcagagaaagttcacaagaaatgaaagactttgaaacaaaaacatggtgatatggcctttttaactttgttttttttttgtgtgtgtgtgggtgttttgcctgagtatgtgtctgtgcactgtgtacgtgcccacagaaaccagaaaaggacatacaaagaggctgttggatcccttggaactggagtcaatatccctttttcctttctatttctttttgttgtttatctatttgcttatttttcgagacagggtttctctgtgtagctttggctgtcctgtcctcctatcctggaacttgcattttatgtgaggctggcctggaactcacagaggtccgcctcctctgcctcctaagtgcttggattaaaggcatgcgctaccatggctcagcaatcacatttcttagtcagcttgtgaatggtgaaaagcaaacctgtgtcctctggaagagcagccagtgctgttcactactgagccagagccatctctttagccccaggcatgggcttcctgggaacctgtgctgtcctgtgtgaccagagccagaagggacatgctcacattgcctgagggctttccagatctaaagacagggctgagcctctccccattgggatgccggctgctctttgcctcacagagagatgcccccttagccagtctgcaggcagtcccccctgctaagtaggtacatgctcctgtgtgccgtgtgtcacgtatgtctcccagggccactgagaagtcagccttgaagcatgagcttgaggctattcggccccatcacagcatagccaaagctggttctcccggctctgctccgctgctcccttccctggaggttctagcagttgtaccatcaacgtccaaacgagtcctgcggcgtgcatagtccccctcctctcaacactcagcagcaggggcttgcagggaggatgtggctgcctctgccagagactctttggttctgcctccctttgaagttagattgtctggagggtaaactgtagttgtctcaaagagttcattctgaagccagaaataccaacgtctctgaaaggctatggcacaggaagttagggcagggggggacacttggtctttcatgtcccagaagtgaaaagtggcctgcagtcccaggatgcctagttatcatgtggcttcagaggctaggcccgcatgcctccacagccacggctctgaccatcccattggacctaagacctccactagaagcagaataaggcacaagttgcaggcggcagacagctgggtgaatgtgacagtgtcagccctgcctctacaggcttccgtggaggcttgggacactcaggccacccagagtcactatatcctcctctgtccctgtgacacaggacacctgagggtgtgaacagtttgtaaatcaggtccaccatccaccagtgtgcagggtggtttggctagatctgctaaagctgaagagtacctgtgtcatgtctgcagggttgtactggtcggggtcatacacataagcacatgtgtgtgtctgccagacggtatacaggacctaccaacagctagtcatgatgaggctggccacaggctgccaaatgtccagcatgggccatcgacatggcggacgctgcacaacctgaatgttttaatcacctaactaacaaggtgccttagtgtgaacaaagtataagcctgaggattcttttctctatgaggttctgagacagacagtggatagtcctgaggcccagggaggcccaacacaactctgctgtaagttgtatcttatcaagcgatccgggaaaatagacctgaccacgtttgacttagagggtgtcacttctatttgtcatttattgcaggagtaaagaccaacgtctgttaatgtatgctttaagtgttgctctgtggcttgggaaccaccttgtgagcagacgttgccagagttggcaaagaaggaactgactcctagttgaacgtggtcgagcacacatttgatgccagcactctggcagcagagggaggcaggtctatttcaggttacatagtgagaccctgtctcaagacaacagaaatgactcttaaggggactgttacagacactgaaagtgccctccagcgaagccctgcctcactcccctgctgcctttcttttctttttttttctttttccaaaacagggtttctctgtgtagccctggctgtcctggaactcactctgtagaccaggctggcctcgaacttagaaatccgcctgcctctgcctcccgagtgctgggattaaaggcgtgtgccaccaccacagcccagcttctgctgcctttcttaagttactctcctcacctgtatgcagaaggggccatccagtgctactgagacagcattggataccatggagagagtccagcagcaaccaagggtgggttgctaccaccactgcgtgctatcctgaccactatgaatagtcacatgcccagctgctggcccacagaggctggagacagatctgccctgatgtggttcctggctccagggctagcatgtgctccacagcggaaatgagactcctcaagggaaggggtggggggtgagactaagaagatgggatgtgactgaccaaagcttgctggccaatagcctcggggccccctctagtcagtcagcttcctaccacacccagaactgtagttaagggaggcttcagcaagcttgggcccatgagggacttaagcatcagctctgccagagctcatctgagccccttggcatagggctctttcctgccttggccctgcctctacttgttgattctcaaagttcttggaccagcccctaaagctaccttgaagtcagtagctgagttgctgctatatgaacacatcttcagcttcaggtggaaatgccactgccattggcacacttctaatggagagtgggaatgaaggtgggaggtaggggtgcctcattcacacccagtggctgcctgaggcagcgcagcctgagagagagagaaaggaggtttcagacaacccaggaaagtgatttttgaagtgggcttggagctttaggtagggccactcagggcaggttctagtgaggttgaatgcctgaaagagattggtaagtcacaggggctttgaacacaaaagggagaggcaagaccctgtgttggagtccaaagctagttttccggtttctcggtgctgcctctgccccctagaggcagcctggggcactacacatccctggcacatgcccatcatgtggccaccctcaggaggaggggctccagggatgagttaaaagattaagagaaaagctcccttcttctccagagtcccgtctaccctggcttggcgagggaaaggaaccagacatatatcagaggcaagtaaccaagaagtctggaggtgttgagtttaggcatgtctctacctgagccacttgggaagagacagggagaacagcagaaggctaagctacttcacactggcagtgagagtccatgagcagagctcagggtcctcagcaggaagtgtctatgccatgccgaggctggcctgtccagccagaaagaacacaagtgtaaaggaaaatcggagcgtgcctgtatggaaagaggccggtctgagggatgtcagagacccccgacaacaacatgaagtgaatcagaagctgggggctgataccacctggagctgcagcctccacagaccgcttcctacttcctgacaagactatgtccactcaggagccccagaagagtcttctgggttctctcaactccaatgccacctctcaccttggactggccaccaaccagtcagagccttggtgcctgtatgtgtccatcccagatggcctcttcctcagcctagggctggtgagtctggtggagaatgtgctggttgtgatagccatcaccaaaaaccgcaacctgcactcgcccatgtattacttcatctgctgcctggccctgtctgacctgatggtaagtgtcagcatcgtgctggagactactatcatcctgctgctggaggcgggcatcctggtggccagagtggctttggtgcagcagctggacaacctcattgacgtgctcatctgtggctccatggtgtccagtctctgcttcctgggcatcattgctatagaccgctacatctccatcttctatgcgctgcgttatcacagcatcgtgacgctgcccagagcacgacgggctgtcgtgggcatctggatggtcagcatcgtctccagcaccctctttatcacctactacaagcacacagccgttctgctctgcctcgtcactttctttctagccatgctggcactcatggcgattctgtatgcccacatgttcacgagagcgtgccagcacgctcagggcattgcccagctccacaaaaggcggcggtccatccgccaaggcttctgcctcaagggtgctgccacccttactatccttctggggattttcttcctgtgctggggccccttcttcctgcatctcttgctcatcgtcctctgccctcagcaccccacctgcagctgcatcttcaagaacttcaacctcttcctcctcctcatcgtcctcagctccactgttgaccccctcatctatgctttccgcagccaggagctccgcatgacactcaaggaggtgctgctgtgctcctggtgatcagagggcgctgggcagagggtgacagtgatatccagtggcctgcatcctgtgagaccacaggtactcatcccttcctgatctccatttgtctaagggtcgacaggatgagctttaaaatagaaacccagagtgcctggggccaggagaaagggtaactgtgactgcagggctcacccagggcagctacgggaagtggaggagacagggatgggaactctagccctgagcaagggtcagaccacaggctcctgaagagcttcacctctccccacctacaaggcaactcctgctcagcccttcagctcattcagcctgggctctcctgctgggacagacatgaagtctctaagttaaaagaatgacagacaagccgggcggtggtggcgcatgcctttaattccagcacttgggaggcagaggcaggtggatttctgagttcgaggccagcctggtcttcagagtgagttccagtgacggccagggctatacagagaaaccctgtctcaaaaaaaaaaaaaaaaaaaaaaaaaaaaaaaaaaaaatgacaaacaagagctaagggggagcaactactcttggtggaagcttctgataagaggatttgtggccatgaaaacccagccatagccatgcagtaggcagcttaaggaagtgagacccttcctcagcacatggagcagaattgtagaatgtgcatcttgcaggaggggcctacccatttgcacaagcggtgtgggactgacctaaaaatggctcctgggaatcccaagaggtgggcacccaactgctcacaccagcaggctactctgtcaagtgcctcctccaccagctgcaggggaggctgttggcttatcactgaccacagcctgtgtggctctgagccaggaagcagttgaaatgctaaggtcagagggagggagcctccttgccatcttccctagctctctccagaagctgagtgaagtttgggtgagaggacagggagagtggtcacattagggagatgggagtctcagaagccacagctagctgcctgcctgatttaggaaaccacggtcccgtcttggcttcctctatgactacaaacttcagatcagagcaagcagcggcagaaaaagtttcctcgtgcctctatggtgacaagaatccctttgttcaggctccttctggttcatccatacactgtagcaggaccgtagcatctcagcccctgatatgacacatccgtaaccttggccagagcctgtccctttcctgcccccaccccaccccccatgtgtaggactttcaacctactttgagctctcctgagaagcccaggggtggagagtccctgaggcacacgtagggtggaccaggaccaggggctgaggtctgtttctatgggacactgcccttctgggaggaggtggggtggtctcagtgctctgtcagatttgggaattagacaagacctttcaggcgtatctgagtcccaggagagtagcacctggggtgaactaagaagcttgcacatccctgagcctttctgctgctacaacctgggattcctgcagcagagtctatcttgagtccccactggtactgaacacttctttgtcctcctccttggggtggcctctcagtctggagtgagatgccctcaaccatcaagtcaggaaatggcaccaggccaggacctagccacactatcagctccagccctgctggactgagattggaagctggttcccggcagggccagcctttgctggaagacaggaccatgagtcagcctttagcctgacaccatagctccctggggacacagagagctctggcctgatgtcatctgtcagagaagcatcccaggcctctggatgcttctaagcatcttctctgtccagacaaggagacagagacagatgctcacccaatacttcttgagccaggccagctggaaccacagaaagccacatcatggacacattgtgggggaggggcatctcttgagaacaaaagacccatttctaaactcggctaacttggatgcttaccctcagagaaagttgtatgcgcagccgctctatccagcgtgcacccgtgcgtgcaaactggacgaaggcatctgcaggtgtttttaagctttttagcggctcttgtgaaatgaatgtttgtggaccattgaagtgtggtactattgtctcagattcttcccgaagaattttctgtcactgaaatatcaaatagtcctcataaggtgtcactggtcctagatgaatattaaatcagtgttgtctgtgaatttgcatgccctcctgattctgcttcccaatgggccccctccacacacagtctccttacctaggtagctccagctcacctcgtgccccctcttcaccctcacttgtaccagaagcacaagggtaccaatgacatcaggcatggctcagacaaaaaaagactgttcgacatgctccactgagtgggttgtatatccttagaatttttcacagagattttcatggagcaggggtacttgccagatactgtgtgtgcatcctcacaccccaggtacatttgcaccctcggcgcagccctttgtggagccgcggactggtagccctctcttctccagaaaatagtgacctcagagttcggagctataatccgccaccgtcctgactagcgtccccaggtctgcacagaggtctcaagaagggtttcgcttcccctgcctctcccacctcaagcgactcggcggactcagagaatatgggtcttgattcttaagcacttgagagaaagaaagaccctcttcacaaagctgcagggtggggatggggcagggacaaaatggggaggcagctactggggtggggcactaaggggcctgggttctattgtccccagagcggattgcccaccggtggcccctcctccgaaggcgcggccagacttgctccgcattgtgcgggcggatctcggtgccggtgctgatgctgcagagcctgccgcattgtgcggcgctccagcattggcccgcagcgcttacatcagccagcgagggcggggcagcctcttataagagggcgcggcggaggctgccgatcctccgcagcctgctgtccgcctgccttttcgtctctagccgcgtgaagtcagcatgagggagatcgtgcacatccaggccggccagtgcggcaaccagataggggccaaggtgaggctgagccgtccggcgtcctgcgtccccacaagcgccagccccagggcggtgggtggagggagagaaaggcgactctgggagccgctagcggaacaaagggaagagcccagccccttgccccgctcctgggaccccggggtccccaatcggttcccctcaatcacgccactctgcactgcgcccaggttgcaggagaaggctgggggtaacccttctgactcgcattcccatccattctgcgcacccacacacaccatcaggtacaggggatgtggttggggggcgccgactgggcgtggccttctttgaggttgccacttaagccttgagtaagatgggtgtgtcgggcaactttgggtggggctctcccctaaaaccataatgactgtacatgcctggatccccactggagaactagacagtcttcagggagcaaggccgccctcatatccccaaccttgttcagctcacccagtttccttgccccaccctgttcctttgttggaggagttcggcctgaactccaatgaccttgatccagaactggactctgaaaatctcccatctctaactgtgcgctcccaaggcctcccagtcgggattgagcacagaacaaagccgactgcaaggattgcctcaatttcccctctattgttagcccgcatccaggtgttgaagccaaggcaaaagaaaaagaaaaagaaaaagaaaaaaacggggggggggcgcggggttggtgcagtgactccgcaatcctactatcattagtgaggtagctgtcctgtttccaagtccttaggagactgttccttacccaaggtcacacagcaagtggcagacagaactacttgattcctgcagaagcccaacctccacttgggttgcatttgagtgggtggggtcagctacctcaatcttctcccttctgaacaacatgaaacgggagctttgtccagatgaatgctggacggggcttagggatgctagttcccaaaggaggaggttgggtagacaggtcctgggagggaggggacgaagcaaagagtacctctggaggctgttgccatagaaaccgggcaggaacaaaaaagctaattaccacgggctgggccagtcacgtggctgacatgtaaattacaagtttggctcttgggtggaggttcctctagttaaaggggaagggaagcggcaccacagagactccctaatcacaggggagacagctgcttctgccctacaagggaaatttgggcggggttgggggggtggcgggtaggggggcatacagaggaagcctaaggcaaggggcctcagatcaaatcaggactcctgggatgatcgctgacagctgccctggcctgaagggagggtgagggctcattaatgtggtcacaggtgccaggctttccctggacgaacatctgctcctgaaagggcctggggtgagtgggggagggaaggtttgccatcggaaggcctgtttggtgagcttgctgcatctgtgctgttctgtgctctcctctgggtctcctgttgagtaagggcctagaagtcaggtccaccacgcccaggctccgtgtgttgcgctatggccacagaacatttctgagtgctggacccagctgaggtctcttatgctcctcagcactgtggcccataggcttgcccattttttttaatatttagggtttttatatatatatataattacgagtgtttaaatttttaatgccaattctttttaacaatgcaaataatgagtaaattttcttccatttccaccggctcccttcttagtaatcagtacaaggcgtttttggcaggttccatccagccctctgccctggaagatctctgagaccagactgaaggcccaggccctgtgggacgttacctgcttagtgtctgccccagggaaaataaacttccttgaccagatttacttcctattttggtagctggcccttgggtcactgctgcgagctacaatggagaaagttctccctagccacctgcagcaactgagggagtgggcacaaagagctgcttttttgcttatcggtctttgggtggtccctgtcttagcacaaaggactgctggcttcagagaggtgactgggtagaagtatgggctgggtggggacagggagagaagtgtgaagccaggagaatttcggggaagcagcagaaggggggccttagcaattcataagtttctcacccgctgtgagcgtgttaaagcaccaggcccaggctggtgcactgttacaccttgtgaagtgtggcatgggtgtcaccctcccttaaggctgagaaagatgagggttatggaagctgagtcactcagcttcagatcacaccatggatttgggcaaggcaggaattttagtctaggtgtgtgcagatgtgtcaaggcaggcggtgacatgtgcccccaccagcagcagatgtgactggtctaccctttgtgtgctccctttgttagggcctgagctcctagatgcattctcctataaaggggtgccctagtaagtgtctttacggagcttttgtctatgactcctgtctgtgccccatcagctgccagaacacacccaccccagtagaagtctctgaagggtgtgacccattggagagccaatgggcccggtgagaagggtgctgagagttttaggggaattgaacatcttacagggcttttgctcctgtctttgggagccacacccaactctgcttctgttcatgtcccactaccctgctgtcgttggcgaccctcgccccaagtgggtcagcacctcggacagcaaccccgcggtttgcagactggagcctggagtttcaattgggttcactgcaccgggtggttttattttctgtagtgatgctacttcatttatataattgtattaatttacatattaaatagtctgcggtaatatgttcttataatgtcttttgtgtgctattctatgttagtgtcttaatgtgtagctcagactggccatgaactcatggtcctccagcctccaccttctaagtactggtattattacaattgtattctactggactgggaagattttatttttgaatcatgttttattatttgtaatttatatgttgatatgtttctcgtgttaaaatcaaaacaccggatagtggagatgtggctaaagcacgtgtttagcatgtaagaagccattaggtgcacactcatagttccagttactggagaggctgaggcaggaggattgacaagattgcttcttgattctaaaaaaaaaaataatgataataaaataaaaggaacactgcagataaggtatcctactatatattaattttaaaatgtatatatttaatttaaatagtgtgtgtgtgtgtgtgtgtgtgtgtgtgtgtgtgtgtgtgtgtgtacatgcctggctcaaatactgatcagaagaggctatcagacctctgaaacttacacacagttgtgagccaccatgtgggcagtgcttggaactgagcttgagtcttctataacaacagccatgtgtccagcccatggtgcacaccacatttgtgcacacacacatgcacatgcccatactcacccaaactcagacacactcacacataattgaaactaaaataaaaattttaaatttatttattttatgtatatgaggacactgtagctgtcttcagacacaccagaagagggcgtcagatcccattatagatggttgtaagccatcgtgtggttgctgggaattgaacttaggacctctggaagggcagtcagtgttcttaaccgctgagccatctctctaacccaaaataaaaatttaaaaatacacaaaagagatgaaatccaggggctggtgagatggctcagtgggtaagagcacccgactgctcttccgaaggtctagagttcaaatcccagcaaccacatggtggctcacaaccatctgtaacaagatctgactccctcttctggtgtgtctgaagacagctacagtgtacttacatataataataaataaatctttaaaaaaaaaaaaaagagagatgaaatccagacccctttgatgagggatggcttctgagataggtccctcagaaagatccctgtatgttctagagtgatgatgatctgtttggactatttttaggcttttaaagaattttatttttttgaaagataattctatgagtgtgggtgtcttgcctgtgtgaacatctatgcatactatgtatgtacaaggccagaacaggagttggatgccctgaccctggagtcacagatgatggcttgctgccttgggagattttgtgagatttgtgaaccaatcctggtcctcttcaagagcaagaagtggtttttttgttttgtctgcttgttttttattttaaattttatttaatgtctgagtgctctgctacatatacatctgcctgcctgaagagggcatcaaatccctctatagatggctgtgagccaccatgtggttgttgctgggaattgaactcaggacctctggaagagtagtcagtgctcttaagcctgcaacaagtgttttggggttttgtttgtttgtttgtttgtttgcttggtttttttttgttttttttttgttttttttttttttttttttgagacagggtttctctgtgtagccctggctgtcctggaactcactctgtagaccaggctggcctcgaactcagaaatctgcctgcctctacctcctgagtgctggaatcaaaggcgtgcgccacgacgcccggctcaacagtgttcttaactgatgagccatgtcaccagcccacttaaaagtattttttactaattaaaaatccaatggcaccaaaatgtagaaaaaaaatgtgaaaagtctttctgtcagcacaagccgatgccccaggactggcacttgctgactgttttctgtcctgctttcacctctgagctgtcttctccacaagactgccacagagaggccctttgtctctagacctttgtatcaacaacttatctgccagtcactcccctgcctgaccagtgatgagggatctcagagcccaaggaggcagcccccctccccccccctccccgcaggcaggctgggtagtctgcatgtcctgataaaatgtcttcctgtgtgcagccctttcatcccctccctccctggcccccagaacagaaggctgtgttctcacaagagcctgttgtcatgcagtcagcccattgtacagagtgggaacaccaaaactaaggccctatggggcaactatgcaccctgcatctccgtactgtcttgcccctctgaaatgatggcagccccacgtgaggagcattgcgttcttgtgcaaggggctgagtgtagcagccagtgagccaaccatcctgggtgttgccaggctcctggatacggtggcatgtgacctccgacaagccattctgctgctggaaactgtggtccttcacagatccacctgtgggtcacactgcctgaggctaatgagctatcaagatggactctgtcagaggccatgacttgcccaggctctgagggtcacatgtaacagctagagccccatgctggacctgatctctctgcttcctgtgcttccagctgctctgggcagctttctaccttgtgtgtgcctcgagctgtgtagaacccacctgtgtcttgagtcctagtccattctagggacctggttgttagtaccaagacactcctagccccgcctaactatgtgacccttgagctgcattgccaggccaatgcccctcaatcccacaatccacttggctcaattcccaccctcactggtgtgacgtcattttccctataaattaggagatcaccccctcctctctctctctttttctctctctttcttctctcccccctctttctctctttttcctcttctctgcccttctacctgcttcgccacccctctgcctctgcacaataaacctctcccacgtggaaacaccttagcctggtctgctgtttggtttatctgctcaaaatatatatgtattaatattgcttgatattaattaattcataaaactggtaatgtcctccagatagtgcagagaacaggtatgcatatttactcttttctaaagccttatgttagatctagaaagatctcagagttttttaattttacactgagagctttaagacttcagaagaagccgggcagtggtggcgcacgcctttaatcccagcactcaggaggcagaggtgggcggatttctgagttcgaggccagcctggtctacagagtgagtcccaggacaaccagggctacacagagaaaccctgtctcggaaacccagacctcatgagagcacaggttcggtagagcgtcgatgtgtgatgagctctttctttccttctgtcctcagttctgggaggtcatcagcgatgagcacggcatagaccccagcggcaactatgtaggggactcagacctgcagctggagcgcatcagcgtatactacaatgaggcctcctgtgagtaccgctccacacccaccctgaccccggcaaagagggctcccatgtgaatagagtcctagcgtccatatccccacctttcttgatttaccaagaggctggcgggtatgactggaaacgaggcatccaaattgacaggataaagagtggttaccgggctggagagatggctcagtgcttaagagtggttactatggtgtgagatgaaaatatatttaatggtggtgatgaccttatgtagtctagggacaggcaggagactcaatgatacatccttagcaggggtcactgggggcttgattgaggctacttgataattgatacagtcttttaattttaattagatattttctttatttacatttcaaatgtcatcccctttcctggtttcccctccaaacaccccgtacatcccccctcctccccctgctcaccaacccacccactcccgattcctggccctggcattcccctacactggggcagagagccttcacggaccaagggcctctcctcccattgatgattgactaggccgtcctaattggtctt

SEQ ID NO: 162 - DNA, 1261 bp, Mus musculus
ttcctgacaagactatgtccactcaggagccccagaagagtcttctgggttctctcaactccaatgccacctctcaccttggactggccaccaaccagtcagagccttggtgcctgtatgtgtccatcccagatggcctcttcctcagcctagggctggtgagtctggtggagaatgtgctggttgtgatagccatcaccaaaaaccgcaacctgcactcgcccatgtattacttcatctgctgcctggccctgtctgacctgatggtaagtgtcagcatcgtgctggagactactatcatcctgctgctggaggcgggcatcctggtggccagagtggctttggtgcagcagctggacaacctcattgacgtgctcatctgtggctccatggtgtccagtctctgcttcctgggcatcattgctatagaccgctacatctccatcttctatgcgctgcgttatcacagcatcgtgacgctgcccagagcacgacgggctgtcgtgggcatctggatggtcagcatcgtctccagcaccctctttatcacctactacaagcacacagccgttctgctctgcctcgtcactttctttctagccatgctggcactcatggcgattctgtatgcccacatgttcacgagagcgtgccagcacgctcagggcattgcccagctccacaaaaggcggcggtccatccgccaaggcttctgcctcaagggtgctgccacccttactatccttctggggattttcttcctgtgctggggccccttcttcctgcatctcttgctcatcgtcctctgccctcagcaccccacctgcagctgcatcttcaagaacttcaacctcttcctcctcctcatcgtcctcagctccactgttgaccccctcatctatgctttccgcagccaggagctccgcatgacactcaaggaggtgctgctgtgctcctggtgatcagagggcgctgggcagagggtgacagtgatatccagtggcctgcatcctgtgagaccacaggtactcatcccttcctgatctccatttgtctaagggtcgacaggatgagctttaaaatagaaacccagagtgcctggggccaggagaaagggtaactgtgactgcagggctcacccagggcagctacgggaagtggaggagacagggatgggaactctagccctgagcaagggtcagaccacaggctcctgaagagcttcacctctccccacctacaaggcaactcctgctcagcc

SEQ ID NO: 163 - protein, 317 aa, Mus musculus
PDKTMSTQEPQKSLLGSLNSNATSHLGLATNQSEPWCLYVSIPDGLFLSLGLVSLVENVLVVIAITKNRNLHSPMYYFICCLALSDLMVSVSIVLETTIILLLEAGILVARVVQQLDNLIDVLICGSMVSSLCFLGIIAIDRYISIFYALRYHSIVTLPRARRAVVGIWMVSIVSSTLFITYYKHTAVLLCLVTFFLAMLALMAILYAHMFTRACQHAQGIAQLHKRRRSIRQGFCLKGAATLTILLGIFFLCWGPFFLHLLLIVLCPQHPTCSCIFKNFNLFLLLIVLSSTVDPLIYAFRSQELRMTLKEVLLCSW

SEQ ID NO: 164 - DNA, 22314 bp, Homo sapiens
  misc_feature (1)...(22314): n = A,T,C or G
agctcccaccttccagctcccagctcccagctcccgcctcccgcctcccagctcccgcctcccgcctcccagctcccagctcctgcctcccacctgccagctcccagctcccgcctccctcctcccagtttccacctcccagctcccacctcgcagctcccagctcccagctcccacctcgcagctcccagctctctcctgcagctctgaggtcagggctttggggctcacagggactggctgcctctttcagacccagatgctgagagatggggctcagggctaagtgggtctttcccctcacaggaagggagaggaggagaggaacagtgttatttgggggtcacagctctgcgtttgcaggccacgttctttcccatctccaccgaatgtacaagcgcttgcgtgtcggcctctgtggcaggtgcgagtgacacagtggaagcaggtgtgcagtgaagtggggaaaacatattaattttagaatgtagaaataaacataaaatcaaaactgcaccagcctggccaacatggcaaaccccgtctcaactaaaaatacaaaacttagccagctgggtgcagtgactcacgcctgtaattccagcagtttgagaggccaaggtgggcaaatcacaaggtcaagagattgagaccagcctggccaacgtgctgaaaacccgtctctactaaaatacaaaaaaattagctgggcgtggtgccgcacacctgtagtcccagctacttgggaggctgaggcaggaaaattgtttgaacccgggaggcacaggttgcagtgagtggagatcgtgccactgcactccatcctggcgacagaggaagactccgtctcaaaaaaaaaaaaaaaaaaaaaaattgggcgtggtgggttgtgcctgtagtcccagctactcaggaggctgaggcaggagaatcccttgaacccggaaggagggggttgccgtgagctgagatcacgccactgcactccagcctgggtgacagagtgactccatctcaaaaaaaaaaaaaaaaaaaatcctccagtaaggtgtttggaggaaggatggtggctgtgctgagacggagaggatgaatgtgccctcaccaggctcaggggagagggtccttgtgttccccagcagagtcacgatgtgccgaggccctgtgccaggagcagagcacacggcacattgagagaacaaaagccccatggccagaccgggagagcagggctgcggcgcaagagggccaactgccaggcggccggtgtgtctggctttcagaatccgggtcattgaaaggctttttaccttttccttctgggctggaaagtacttgccttacccaggccccgtcacccgcacagcggtcgtcgtgattatccctgccggcagggtgttgcagcattgaggaatcgcggttctttgctgcctccctccgctgtggagcccaggctttcgccctccctagagctcctgaggcctggccgctcagcgtcctgtagagccgggccggtagcccttcgcaccgtgagggtctccgcttaacgcaggccctggaagcttctgcctttgcgtaaggagtgggtgctgaaggagacgttgaaactgcagcttttctgaaaagcaaggcacctgtgcagtggccgaggatggctgtgggagcctcgctccggacgccacgcctgcctcagctgagttggtctccctcatcctgttcccgctgtccacagccccaccctaagctgatgaggaagcctcacgggccacccggggaatccagggcctgtgctcagctgctgctgctctgccccctggcggcccctccgtgtccctgcgagggaggcagctggcaggcagccccgtgagccgggttgggtcccacgagtctcagttcagtgtcgtttctgacttttcttgactttctttcaggctaagtcctatcagccatggaaacaccattgctctcttcttccggtcactgttgccaaactataccatggaggtaggttgagctcgtcccagcccctgcctccccagtgggtgcgggcatatccattccagtgcgaatgcctggagcctccttgaaccaggactgtgccagccggcacagggagcagggaaggaccaaggctgcattgtgccagtggggtgcccattctgccggggaaactggggcctgcccagatggtagcagatgcagggccgtgagtcagccggcttgatcccactctgtgcctggcttggtctagacacggcatttggttttgagagcttcctcctcacagggacctggggagggttcagggtccggtgctggggcaagggccacctcgggctccacagtgcctcctgcttgggccccgggcccctagtcccagcacagacagcccccttctcagacatgtccccttgctgcagggggagaggcccgaggaaggagtggctgggggtctgaaccgcaaccagggcctgaacaggctgatgctggctgtgcgcgacatgatggccaacttccacctcaacgacctggaggcgccgcacgaggacgacgctgagggggagggggagtgggactgagcgtccgcagaggtgaccgaaaagccgtatgatgatgttcccgatttctctgttggtcggagtcggccagttgcctgaagtagggaagctgagtgtgtcgctccctggtccactgtttctcctataaatgtaaatgggtcacgctctgccgtccgcaccttctcctttcgcaggcactgagcgccgtcccatgccctcggattcgaatcacactcagtccattctcctcccagtggcttgtgggtgaggtggggcccagaccccatgcttcctgtgctcccaggatctgggcacgggtggagaaggggccccacggggtcttcagtgcaggtccctgctgaatgccaaggccctgggtgcacgtcctccttgaacttgctgtggagttcgtcaacagagctgcgtgccttgttggtagagggtctcagggcagggctggagcagagaggcccctatgtggcagccggccttcagtcttgttcctccaagcaagtggggtggagatgttggggtcctttggctggatgccactatctgttgaatctgacaaaataattttcttttttttttttgagacaagagtctcactgtgtcgcgcaggctggagtgcagtggcgcagtctcggctcactgcaagctccgcctcccgggttcacgccattctcctgcctcagcctcccgagtagctggggctacaggcacccgccaccacgcctggctaatgtttgtatttttagtagagacggggttccaccatgttggccaggatggtctcaatctcttgacctcatgatccgcccgccttggccccccacagtgctggggttacagctgtgagccaccgcgcctggctctgccaaaataattttattagagaacttgagggcagtgcccagaattgaaggcgaagccccagaagcatgttttgcagagaagtgcccagggaagctctgagggcccatgtagcaaagatcaggggatagtcggtctgagggtgaatgggccactcggaccaagaccccagtcttgggggagggcttagctggagcaggtcctggcacagttgactgatggtgcacagaacccgtgcatcccacggccccacggtgctgcagctgcaggaggggcggaggctgcagccagacagcatcagaagccagcgtggttctggaaggatcgagaacaccaaggtgttagggctgcagcaggggtcctgtcccctggcacccctcaccgccctaatcttttacccttaggaggcagcagacacgaggggctgcccgaggctctagggcggccagtgaggcaggaaacatgttccagccccagctaggtactggtccgtggacccacctcccagaaagcccatcactgtgtaatcgtctaacctggggctcgccgaggcctgtgagttcatccttttggcagttcctggtgtctccttactctgctcagcatttcctgggcgggagcttagggtgcaggaccctccccaggacgacgagggcccagtgtccatgacaagagttggcccgagggctgagccacgtgtgcccatctcagacgtgggcctgagggtgcagccctggccctgtgctggccatttctaggagcggtgccctgaggtcccagctgtgatagccccacgctctgcaggaagagatcatgggggcggggagttggtgctgcggcctcgttcctctctgcagtgagtgaacgatgtttgtggtcagcaggagcctgtggggagcacaggctggtcctcctggtgtcccacccacccctttttccatgggggatctgcactcatctccagggaagatggttgggagataaccccagtctgctctaggtccccaccctccacagccagggtggtccgtggtgagcttcagccatcgagatgcgggagtctgctagagtcttcagggtcttttctctgaaaatgacaggctagcaaggagacctgggtcccctgcctcttccattccagatgccttgagtccacccaaataggggatgtgatgtttggagctgcagcagccgccctacggttgggagtcagagaagagccggtgttccagggacaatgcagcagaggctgagcccaggcctgctgtcctgagaggtggctggatcactgacactttggcagtggtgctggggtttatgtcatgacctgcagctgagcctacttccaatgaccgtgagatctgaaagactgttttgagggcgtagcctctgccatgattgtggggaatgctgtcctgtttcctcccttggccctgctcagcccagcgagaggctgaggcgcacgtggctccccgggtgcccacaggcagcgtggctcaccagccgggcccttttccactgagccagaaccccccaaagccttcaatgcaggcaccacggtgagcccacgagaaaccctgcttgccacctcccacacccccacccccaagttcaaaggaaatggtccctgaaccaagggctgagatcagctgtgggtccagctgtcctggggagctgtactggagcccaccacggtgggactgttggtccggcggtgacccccacctccatgtctgtggccgcagctggacaggccactccctgggccacagagatgttttacctctcgcagccctcgggcacacattgagcagatgtgtgtgtgtgtgcgtgtgtgggtgggtgcgcatttgtgtgtgcctgtgtgtgtgcgcatgtggtgtgggtgcacgtgtgtgcacgtgtgtgggtaaacattgtgtgtgcgcatacgtgtgtgggtaaacatttgtatgtgcacgcgtgtgtgggtaaacgtgtgtgcgcacgtatgtatgtgtgtacatttgtatgtgtgtacatttgtatgcatgtgtgcctgtgtgtgtgtgcctgtgtgtgtgggtgcacatttgtgtgtgtgtgtgtgcctgtgtgtgtgtgtgcacgtatgtatgtgtgcacacttgtatgcatgtgtgcctgtgtgtgtgggtgcacatttgtgtgtgtgtgcctgtgtgtgtgggtgcacatttgtgtgtgtgggtgcacatttgtgtgtgtgtgcgcctgtgtgggtgcacatttgtgtgtgtgtgtgcctgtgtgtgtgcctgtgtgtgtgggtgcctgtgtgtgtggggcacatttgtgtgtgtgtgtgcctgtgtgtgggtgcacatttgtgtgtgtgcctctgtgtgtgtgcctgtgtgtgggggtgcacatttgtgtgtgcgcctgtgtgtgggggtgcacatttgtgtgtgcgcctgtgtgtgtgggtgcacatttgtgtgtgtgtgcgcctgtgtgtgtgggtgcctgtgtgtgtgtggggcacatttgtgtgtgtgtgtgtgcctgtgtgtgggtgcacatttgtgtgtgtgcctgtgtgtgtgtgcctgtgtgtgggggtgcacatttgtgtgtgtgtgtgcctgtgtgtgggggtgcacatttgtgtgtgtgtgtgcctgtgtgtgtgggtgcacatttgtgtgtgtgtgtgcctgtgtgtgtgggtgcacatttgtgtgtgtgtgcctgtgtgtgtgggtgcacatttgtgtgtgtgtgtgcctgtgtgtgtgggtgcacatttgtgtgtgtgcctgtgtgtgggtgcacatttgtgtgtgtgtgcctgtgtgtgtgtgcctgtgtgtgtgggtgcacatttgtgtgtgtgtgtgcctgtgtgtgtgggtgcacatttgtgtgtgtgtgtgtgcctgtgtgtgtgttgcaggccctggatgccagacactgaataaacgcaggaagacgtctgtcttcattctcctcgtgggtcgctggtccagaaacacctggatggaaagtgctctgcaggaacggtgcctctgcctgtggcggggaccctggtgagcggatgggccagccccacgtgtcttccggccactcagcatgcagtgtttccaggggcactaagagaccaaaatcgagatatgattagctgtaggatgtcatctaatcacagatcatcccgaggctaatttatctcccccatgaccataacacatcaaaaagttgactttttgcagctcggctgtgcctcatcttcccacgaagccccgacaggcacatccagtgaggaaccacagtgggagtcctgtggcagggtcaccccacttccgatgccctccagctgcatcttggcacgaaaaaggctgcccagttctcatgccctttcaagtcccgggctggggggtagcagtggaggctggggttaaccgccgtccgtctcaaaggcctcattgtggagctgcaaacacgaacgtccttgaaatgtgaggggacagtgctctggggcaggggctgctcactggttcatggccagaggtgagcgggctctgggtctgggtctgtgaggtgctgtggacgtcgggggtgctcctggggcagggacacagccacggccctcacaccagtggagccgtcttccttcccgaggcagaggcttggccttctcacaccttgggacccttctctcccctgtgctcatgctggaagcacagcgtgagggggcaaaggtcatgggaggcaaaaggctgggctgaggccgaggctctgtggctgtggccggataccaggtcctgtggtggtgtgggcagggcgcgctctctcctctgagcagcctggggctgcgtgtgtgaacagaaacaggcctgccgatttgaagatggtttgaccaagtctcccaaagctgaagagaggtccctgcccatgtcccccgggtggcaatccacagacgcacctgtgtccatcagacggtatcgttgatagggagtctgaagccacccagacgtggtctgttcacgccgtggacaccacggtctgaggcagacggttacagccaccggcataggcgaatctcagccagagagagtgaactgggacaccattcacgtgatgggccagatgggctggcagcggctcgctggagccgtccgggtgggaacgctgtgtctgttggtctggtgctgcttatgtggctggttcaggtctgtcatccgtcaacctgcatatttatcactggtgcattttcatgtatgttgtacctcaattaaaacattttagggccgggcgcggtggctcacgcctgtaatcccagcactgtgggaggcggaggcgggaggatcatgaggtcaggagatcaagaccgtcctggccaacatggtgaaaccccatctctactaaaaaaaatacaaaaatttgccgggtgtggcggcacgcgcctgtagttccagctactcaggaggctgaggtatgagaattacttgaacccagtaggcagaggctaccgtgagccaagatcatgccactgcactccagcctgggtgacagtgagacttcgtctcaaaaaaaaaaaaaaaaaaaaattaaagcagatggggtgtgggggctcatccctgtaatctcagcattttgggaggctgaggcggaccgatcacctgaggtcaggagttcaagaccagcctggtcaacatggtgaaacctcatctctacaaaaaatacaaaaaatagccaggtgtggtagtgggtgccgtagtcccagctagttgggaggctgaggcataagtattgcttgaacccagaaggtggaggttgcagtgagnnnnnnnnnnnnnnnnnnnnnnnnnnnnnnnnnnnnnnnnnnnnnnnnnnnnnnnnnnnnnnnnnnnnnnnnnnnnnnnnnnnnnnnnnnnnnnnnnnnnnnnnnnnnnnnnnnnnnnnnnnnnnnnnnnnnnnnnnnatatattttttttttttttgagactgtatctctgtttcccaggctggagtgcagtggtgtgatctcggctcactgcaacctccgcctcctgggttcaagcaattctgcctcagcctcccaagtagctgggattataggcgtgcgccaccacgcctggctgatttttgtatttttagtagagatggagtttcaccatattacccaagctggtcttgaactcctgacctcatgatccgcctgcctcagcctcccaaagtgctgagattataggggtgagccactgtgcccggcaataataattttttttttttttgagacagagttttgctcttgttgcccaggctggagtgcaatggtgcaatctcggctcacggcaacctccgcctctcatgttcaagctattatcctgactcagctgggattacaggcacccaccaccacacctggctgattttggtatttttagtagagacggggtttctccatgtcggccaggctggtctcgaactcctgacctcaggtgatccacccgccttgggctcccaaagtgctgggattacagccctgagccaccatggctgacaataataaaaaattttaaagcaaaactaaagatttataaattgtaaaatgcggttgtaacaagtatttactgtaccagtaaatatgaaaaatattaatgtcctcacacacatggaggtggcttgtgagtggtgtgagcatttcatggtcagagtttggcagttgggcgagagacaggatggattttaactcgaacatcgcagacacaaaactgaaaaccctgatgcggtgcctgcaccgttgcctcctttcctgcagctgtaaatgggacgagtaattccatccccctcccgcttccacccttcagcacagacgcagtcttcagcaaggaagtgctgggaacgccctggagtgaacccaggaagatgcctgcagtgggtgccagggcccctctccaccgtccctgctgggcttcggggccacgcccgactgctgtgaacggcctgcggagcaccacgtgcgacggctggaggcgagaggtctgcctttgatgtggctgttggtgcagggcctgtggtgccttccgcagcggaaatggcgcgccgcccggggagggcgggagcagcgtcccgggtgcccctgtgaggatgagcgacgagatgactggagggtccctgaagacctcactagggtgcccccagccggtccgctcccaggaagcgacacccccacagccccagggctgcagctgagggggtcgccactctggctgggcgaggctgggcccttgggggcaggcgccagagtggcctcaggctctacaagatgcctgaaaacaccaacctctccagggctcactagcattggacgctttcacgctctgccctggccggaagccccctcaccccgcgcgatgtgcaaactcctgcagggctcactcagtttccagaactttaattattggaaagttctccctggtccagcccccaaatctgccgtgaacgttgacagctgagttgctgctccatgcgtgctttggctgagagcagaggggacccctgtcctccctgagctgctgacgaggggaggggtgaagggtggggcctctggagagggcaggtcccggggaagctccggactcctagaggggcggccaggtgggggccctggtgaccaggacagactgtggtgttttttaacgtaaaggagatccgcggtgtgagggaccccctgggtcctgcacgccgcctggtggcaggccgggccatggtgggtgctcacgcccccggcatgtggccgccctcagtgggaggggctctgagaacgactttttaaaacgcagagaaaagctccattcttcccaggacctcagcgcagccctggcccaggaaggcaggagacagaggccaggacggtccagaggtgtcgaaatgtcctggggacctgagcagcagccaccagggaagaggcagggagggagctgaggaccaggcttggttgtgagaatccctgagcccaggcggtagatgccaggaggtgtctggactggctgggccatgcctgggctgacctgtccagccagggagagggtgtgagggcagatctgggggtgcccagatggaaggaggcaggcatgggggacacccaaggccccctggcagcaccatgaactaagcaggacacctggaggggaagaactgtggggacctggaggcctccaacgactccttcctgcttcctggacaggactatggctgtgcagggatcccagagaagacttctgggctccctcaactccacccccacagccatcccccagctggggctggctgccaaccagacaggagcccggtgcctggaggtgtccatctctgacgggctcttcctcagcctggggctggtgagcttggtggagaacgcgctggtggtggccaccatcgccaagaaccggaacctgcactcacccatgtactgcttcatctgctgcctggccttgtcggacctgctggtgagcgggagcaacgtgctggagacggccgtcatcctcctgctggaggccggtgcactggtggcccgggctgcggtgctgcagcagctggacaatgtcattgacgtgatcacctgcagctccatgctgtccagcctctgcttcctgggcgccatcgccgtggaccgctacatctccatcttctacgcactgcgctaccacagcatcgtgaccctgccgcgggcgcggcgagccgttgcggccatctgggtggccagtgtcgtcttcagcacgctcttcatcgcctactacgaccacgtggccgtcctgctgtgcctcgtggtcttcttcctggctatgctggtgctcatggccgtgctgtacgtccacatgctggcccgggcctgccagcacgcccagggcatcgcccggctccacaagaggcagcgcccggtccaccagggctttggccttaaaggcgctgtcaccctcaccatcctgctgggcattttcttcctctgctggggccccttcttcctgcatctcacactcatcgtcctctgccccgagcaccccacgtgcggctgcatcttcaagaacttcaacctctttctcgccctcatcatctgcaatgccatcatcgaccccctcatctacgccttccacagccaggagctccgcaggacgctcaaggaggtgctgacatgctcctggtgagcgcggtgcacgcggctttaagtgtgctgggcagagggaggtggtgatattgtgtggtctggttcctgtgtgaccctgggcagttccttacctccctggtccccgtttgtcaaagaggatggactaaatgatctctgaaagtgttgaagcgcggacccttctgggtccagggaggggtccctgcaaaactccaggcaggacttctcaccagcagtcgtggggaacggaggaggacatggggaggttgtggggcctcaggctccgggcaccaggggccaacctcaggctcctaaagagacattttccgcccactcctgggacactccgtctgctccaatgactgagcagcatccaccccaccccatctttgctgccagctctcaggaccgtgccctcgtcagctgggatgtgaagtctctgggtggaagtgtgtgccaagagctactcccacagcagccccaggagaaggggctttgtgaccagaaagcttcatccacagccttgcagcggctcctgcaaaaggaggtgaaatccctgcctcaggccaagggaccaggtttgcaggagcccccctagtggtatggggctgagccctcctgagggccggttctaaggctcagactgggcactggggcctcagcctgctttcctgcagcagtcgcccaagcagacagccctggcaaatgcctgactcagtgaccagtgcctgtgagcatggggccaggaaagtctggtaataaatgtgactcagcatcacccaccttagccccttccagaaagtgcttgaagtttgcgggtggagggatgggggaggggaaggtgggcaggggtgagagtcgagagggaagaaaggagtcccggaaaacgtggctgcctccccaggtgaggaagccacagccccagaggccccaaatgcctggggagtgtggaggtcccaaccaggcttgcgctgaccctgcttctcggttttctctccgtgctgacaaaccccagcctataggaaggacgagcaggtgcagcagggccccagtcccctccactcttgacgctgtcctagctgcagaagaggcgggttcccagccttccctgtgaccacatgtgacctcagccgggacacatccctttgctggccctggccctgagtccctccagccatgatgagccgtgaatgggaccatccctgtccactctgagatgcctggaagggggctcagtgcaggtgggctgggggctgggtctgctgtctgcccagcactgccattctgggagtaggcaggtggggaaggggtcgggggtggagggtctgtgttcagccagtcctgggaaatgcttgatgtgaggcttctgaagatggcagtgaggcagaggcccagccggcggagaagtccctgggagtgagtacctggggatgaactatgctgcctggtgctggggagcagtggcgcccctgggccatccctctgctgaaacctgggcgtctcgctgaagagaccacctccatttcctctgcagagactgagcactcagtcagcccccttcctgggacaggctcaatggaggctgcagggccatcagccgactcctacgcaggctcagtcagcagccccctggccagccccacccctgactgccggcctcagaactgggagctgcttcctggcagggcccgcctctgctgggagaccggacggtgagtcagccttaagcccggcaccagacccctctgaggatggagcaggagctggctgccctgaggctgcaaaacttcttccctcgtggagacagggaggcacctcagacactcaccccggactcccttgaacagggacagggaggaaccccaggcagctagaccccagcagcagccacacgagcacactgtggggcagggaggggcatctcttgagaacaaaagatccatttctcgactttccaaactggagagcttcttgagagaaaagagagagacaggtacaggtccacgccacccacacacagccctgtgcacacagaccggacacaggcgtccacaggcaagttcgcagctgctcattttgtgaagtgaatgctgatttgggggccgggtggggttcgtctgtacatcgtgcactgtcagacccttcctgaaggatttttgttactgaagtatcagaaggcccttgttctaaggtggtggcactgtaatatctggcccaggaggaggtcagtgccgtgccggcgagtcctttgctcccttccttctctgaccagtaaacgcatctccagtcgctcccccgaggcccccctgcacgcagtctccgacctcagagagtgagtcagatagaagccgctgcccaccctcccccaccctggccgggttcttgcctggcttgtgcgtccttgtgacaattcctgacacggatgcgcaccgggcagtggcacgtccaggtgctgtgcgcgcccgggcccacaaagctcctttggacgctcatggcagccccttggtggaggaggtcgggtgcccaccccctccccgcccactgcggaagccggcgacccacggagctcgctctcggccgccgccacccctctgtgttcgcgcccttccgagctctgatccgacgctttgtttcttctcagtgggttcagggcctgggccagcctttacctacctcccccacccaaaaccggcaaaagctcagagcaccttgtctgccaaaagacagggagctgggatggtgcgggttggtctctaaaccggcgtggggaaaaaagaccctccgtacaaagccgcagggtggggctgtcgcaagggcggaaccgagagggtagctgggggcggggttcccagggccaagaggggccattgtcctccctggagcccggcgcccccacagccagctcctctgggagacagcccctcctttcgaatgcgcggggccctcagaccgcgcccggcccagcgctgggggatccttggctgcgggaggggcgccgcattgcgcgcggcgggcggggacgcgcggtgcggagcctgcgggccgggcggggctctgcggcggcgcctcccgattggccacccgcggtgacatcagccgatgcgaagggcggggccgcggctataagagcgcgcggccgcggtccccgaccctcagcagccagcccggcccgcccgcgcccgtccgcagccgcccgccagacgcgcccagtatgagggagatcgtgcacatccaggccggccagtgcggcaaccagatcggggccaaggtgaggctgcgcgccccggcctgtcccgggccccggggcgggaggagggaggcgccgtgccccgcgggccgcacctccagctgcccccgcccctgcgaacctgcaacaaagggatgcgcccagcgccgcgccgggcggccgggacgcggggcccccgccctgggactctcgcctgcacctctctgcccctgcccaggtgacctcgggctgtcgaggcgcagctcacgtcagtcgcgaagcctcagccccctccacacctgcgccccctccacacctgcaccccctccaccgggcctccgcaggtgcagctgggagccctgtctgggcgtggccctcttttttggggccgcggcatagccttgagtgagacgggtggggtaggcaggtttgggtggggtggggggttctcctcacagccgtgatttcctcggcccgaaccccccactggagtagccgaacgtcccccgagaggctagagccgccccgatttccccagcctgctccgacacccctcggcgtcctagctccaccctgtccctttgttggaggggttgggcctggactcgagatgaccttggtccaggaccaggctctccatcggcgcagccgctcctgggcaacccccgcggggcttgaccgcgcccacccagggtctaccagtctggggattggatgtgggaacaaagccgggctgtggggtgtggaggctgcaccgtggcgcgcccctccctccattgttagcccacctcgcagatgttggggccacgcagaaaggggcgttggtgcagctgtgcagggacccctgcctaaatcattaaggggacgtcgtgtcccctggtcctgggaggctgtccctggcccaaggtcacacagcaggtgcgagagagctgggctggcccttggttctcatcccctgcaggagccaacctggggctcgggcggggcgggttgggggcgctgcttgccaaaggatctgccctccgaacagtgttggggaacaggggatcggggggggaggctggctttgtcaggaccaaggccagggacccagctcagggctggtgcagcgctgattctgggaaggagggggtgcaggagacggtcctggaggggaaggggccagagaaaggcagcctccggaggctgttgccatggaaaccaggcaggaacaaaaagctaattacaacagggccagccacgtggctgacatgtaaattgcaactttggctccgggtggaggcgcctctgagggtgggaggcccagtagtggggagactctaatcacccaaggagacagctgtgcctgccaaggagagcctgggggaggggagacctgggggacagtggcctcaaatcaaaccaggactcccggagcagcctctgacagctgccttggcctgatgggaggggctgagggctcattaatgtggtcactggggccaagcctcccctgagcatctgctcctgggagggtcaggggtcgctggggggagggagggcaggcagccctggggctcctgggagggtcaggggtctctggggagagggagggcaggcagccctggggcccacctggggtttctccttctatggctgggatgggcccagagctgtggtcccacaaggcacttgtcaggcaagagctgggatctagaagtcaggtgcacatgcagacatcccctgaggctccacgggtagcagagggagcccttgtcccctggaccgtgtccttggctgccttgtgctctgcttctgaacactggagctcttagtttgcccgctactttttattccttttgagttgtttgttttttcttaatatatttctttttaaaaattaatacctggccgggcacggtggatgaggaatctcatgtaatcccagcactttgggagactgaaactggaggatcactttagcgaaggagttcaagaccagccgggataacatggtgaaactccgtttcttaaaaaaaaaaaaaaaaaaaattagcctggcgtggtgggccgcgcctgtagtcccagctacctgggaggctgagatgggagcattgcttcagcgtgggaggtcgaggctgcaatgaactatgaccgcaccactgtactccagactaggcgatagagtgagatcctgtctcacagtaataatagtatctgattctttttaacaatgaaagcaacagagaaggaaattttctcgggggcgggggcggcaagagcgtgttcctttgctctgctgcccttgtggaatcaatgggaagttccttggccgttctcggcctccactcccgcagctgatagggggtgcaacgcggctgcttccctgtctggggtcctcgggcggtgcctggctgggcaggaaggcccgtgcactctgggcagagggaagtcggggtgactcgaggccgggagcaaagccgggtcccgggcggtcacgcggcagcgcggacgactcaccgcggtcacccctgcgctgggagccgagcccccggcagctcgcggggatgcagtaagccgggcgcagcccgccgggaggatgagaaaacccgaagcccggaaagccgagcggccgcctgcagtcaccccggggggggcaggggcgggccgggctatgcagaaacaccggggcccgcgggacacaggacgctgccccactgccgcagagctgaatctggacccccgggctttgctttcctggggcctgtgctcctccctccccggggcggggttcgcctgcagcggcggaggggggagcctttgtcctccgcgcgggctgcggcaccgcctcctcgcggctgcggggcggggctgggggcggggcctggccgtctcagccaatgggaggcggagtccctggctcgccccgccctctcgcctgaaagacctgcggagccgcgggccgggcgggaaccgcattcgggtcctggaggggcttggaggccccagtctcgcagccccttcatcggggacccccgctcccacctgccttggccactgccctcaaagcccggccccgctttccccaggaccccaagcgctgcgcgaggtcagcaccaaggacagcgcccgggccgagcgcctggcctcgaacgccgggttctgctttgtgtttccaggtttttgtttttggttatgagaggaggcctggctctgtcgcccgggctggcgtccagaggcgcgatctcggctcactgcagcctcggcctcccgagtagctgggaccgcaggcgctcaccaccacgcctggccacaattttccttttttcttattttcttttagatggagtttggctcttgttgcccaggctggagtgcagtggcgcgatctcggctcattgcaacctccacttcctgggttcaagctattctcctgcctcagcctcctgagtagctgggattacaggcgcccgccaccacacctggcttattttgtacttttactagagatggggtttctccatcttggtcaggctggtctcaaactcctgacctcaggtgattcacctgcctcagcctcccaaagtgctgggattgcaggcatgagccaccacgccgggccgatttccttttctgtagtgatgttaacaatttagtttataaaattatattttattgtttattaaatatgtaacataggccaggtgcggtggctcacacctgtaatcccagcactttgggaggccgaggtgggttgatttaacttaaggtcagcacttcagggccagcctgggcaacatggcaaaactccgtgcctacaaaaaataaaaaacaaaaaaaattagctggacatggaggcacgccggcctgtggtcccagctacttgggagacagaggtgggaggatcacctgggggaggtgggcagaggttaaagtgagctgaggtcatgcccctgcattctagcctgggcaatagagcaagaccctatctaaaaaaaaaaaaggaacaatatattttattactttatctcaaattataattttattaattttaactacaaaagcaattaatatattctcctggttaaaaaaaaccttaaatattgcagataaacctggtgcccatctagccacctctctctatccaagtgggaacaaatttctttttctatccttctggtccattttttttaagtgacctgtgcatatggttttaaaactttaaatagtatctaaaacatttgaacaaaatgaagccaacatgtgctgaatgttttcatgtcaagctttgtgctaaggcctggatgtgggcaccattcacacgttcatctcacagatgagaaaacaggtcctgcgaggcacgcgcctggcccacagctgtgctcgtgctgggtcttgaatccactctgctccattgctcctgctgccctgtgcctcgctctgcagaggacttcccatagatgtgttactctctccacccctcctttacaggggctggtggttgtgggttccctggaaccataaatttggggtgtcccagtgctttggggagcaaggtccccgactcaagtggactgccagcaactaaattaatgggggatcctcaaagagagtgttagggaggcaagcagtaggtgggaagcttggacaagccccaaatgcctcagggacctttctgtattttttttttgagacaggctcttactctgtcgcctggactggcatgatctaggctcactgcaacctccacccccctggctcaagtgatcctcccacctcagcctcctgagtagctggggctataggcatgcgtcaccatgcccaactaatttttttgttttttggtagagacagggtttcaccatgttgcccaggctggtcttgaactcctggactcaagtgatccacctctcttggcctcccaaactgctgggattataaatatgagccaccatggccagctgatttttttgtttgtttgtttgagatggagtctcactctgtcactcaggctggagtgcagtggagtgatctcggctcactgcaacctccacctcctgggttcaagcaattctcctgccttagcctcctgagtagctgggattacaggcacccgtcaccacactggctaattttttttttttttttttgaggcggagtctctatctgttgcccaggctggagcacggtggcacaatctcggttcactgcaagctccgcctcccaggttcacgccattctcctgagtcagcctcccaagtagctgggactacaggtgcccgccaccgcgcctggctaattttttgtatttttagtagagacagggtttcactgtgccagccaggatggtctcgatctcctgacctcatgatccgcccacctcggcctcccaaagtgctaggaccacagacaggcgtgagccactgcgtctggcctaatttttgtatttttagtagagatggggtttcaccatgttggtcaggctggtctcgaactactgacctcgtgatccacccgccttggcctcccaaagtgctgggattgcaggcgtgagccaccgcgcccggccttttttttttttttttttaagatagggtttcactcttgtcccacaggctggtgtgcagtggcttgatctcagctcactgcaacctctgccccctgggttcaagcgattctcgtgtctcagactctgaaacaactgaaattacaggtgcgcgctaccacgcccggctaatttttgtatttttagtagggacagggttttgccctgttgtccaggttggtcctgaactcctgacttcaagtgatctgcctgcctcagcctcccaaagtgctgggattataggcatgagccaccacacccagcctgaatcatttttgtaatttaaaaatttaacgcaaaaagaataaaacttagcaataacaaaaatgcacaaaagatggaaagaaatccacccctgacctttgtggagagatgacctctgataacagtctcagggtgaacgggcacctctgataacagtctcagggtgaacgggcatcccgagacactgttagcagaggtggtccatgtccatgctgtccgcgttacaataattacactatgtttattcttaaggttttaaaaacatttatttttaacaaattttctttgaaaagctaccgtgtgcacgtgagaaaatctcaacaagaccacagggcacccgtgagaagaagctcctcccagtctggggcccctccccaggcacagccttccacacatctaccagaggcacccacgcatagagaagcacccacaagcagttttctttctttcttttatttgagacggtgtttccttctgttgcccaggcttgagtgcagtggcatgacataagctcactgcaacctccacctcccgagttcgtgtgattctccgcctcagcctcccaagcagctgggattacaggtgctcgccaccacgcctggctaatttttgtatttttagtagagacagggttttgccatgttggccaggctggtcttgaactcctgacctcagatgatccactgcctcagcctcccaaagtactgggattacaggcgtgagccaccgtgcctggcacaagcagttttctccccttccttccttccttccttccttccttccttccttccttccttcctctctctctctctttcctttctttcttccttcattccttccttccttccttccttcctttctttctgacagtctcgcactattgcccaggctggagtgcagtggcgcgatctcgactcaccacaacctctgcctcctgggttcaagcaattctcctgcctcagcctctcgagtagctgggagtacaggtgcgcgccaccatgcctggctaatttttgtatttttgggagagatggagtttcactatgttggccaggctggtctcgaactcctgacctcgtgacccacccgcctctgcctcccaaagtgcagggattatgggggtgagccaccgtgcccagctatgagtggttttgtttctatttatttattattattctatgagacagagtctcactctgtcgcccacgctggagtacagtggtgcaatcttggcttactgcaacctccgtctcctgggttcaagcaattcttctgcctcagcttccggagtagctggaacgtgtgagccaccacccctggctaatttttgtatttttagtagagacaggctggtctcgaactcctgacttccggtgatctgcccacctcagcctcccaaattgttggtattacaggcgtgagccaccgcacctggcctctatttatttatttattttgagatggggtcttgatatgaattcctagactcatgcttctcatgcttgctaccacccagtcctgcctcctgcacagcagtttccactaaagtcacccctttacgagaggcatcttttttttttttttgagatggtgtctcactctgtcgcccaggctggagtgcaatggcatgatctcagctcactgcaagctccacctcctgggt

SEQ ID NO: 165 - DNA, 2314 bp, Homo sapiens
tctggagagggcaggtcccggggaagctccggactcctagaggggcggccaggtgggggccctggtgaccaggacagactgtggtgttttttaacgtaaaggagatccgcggtgtgagggaccccctgggtcctgcacgccgcctggtggcaggccgggccatggtgggtgctcacgcccccggcatgtggccgccctcagtgggaggggctctgagaacgactttttaaaacgcagagaaaagctccattcttcccaggacctcagcgcagccctggcccaggaaggcaggagacagaggccaggacggtccagaggtgtcgaaatgtcctggggacctgagcagcagccaccagggaagaggcagggagggagctgaggaccaggcttggttgtgagaatccctgagcccaggcggtagatgccaggaggtgtctggactggctgggccatgcctgggctgacctgtccagccagggagagggtgtgagggcagatctgggggtgcccagatggaaggaggcaggcatgggggacacccaaggccccctggcagcaccatgaactaagcaggacacctggaggggaagaactgtggggacctggaggcctccaacgactccttcctgcttcctggacaggactatggctgtgcagggatcccagagaagacttctgggctccctcaactccacccccacagccatcccccagctggggctggctgccaaccagacaggagcccggtgcctggaggtgtccatctctgacgggctcttcctcagcctggggctggtgagcttggtggagaacgcgctggtggtggccaccatcgccaagaaccggaacctgcactcacccatgtactgcttcatctgctgcctggccttgtcggacctgctggtgagcgggagcaacgtgctggagacggccgtcatcctcctgctggaggccggtgcactggtggcccgggctgcggtgctgcagcagctggacaatgtcattgacgtgatcacctgcagctccatgctgtccagcctctgcttcctgggcgccatcgccgtggaccgctacatctccatcttctacgcactgcgctaccacagcatcgtgaccctgccgcgggcgcggcgagccgttgcggccatctgggtggccagtgtcgtcttcagcacgctcttcatcgcctactacgaccacgtggccgtcctgctgtgcctcgtggtcttcttcctggctatgctggtgctcatggccgtgctgtacgtccacatgctggcccgggcctgccagcacgcccagggcatcgcccggctccacaagaggcagcgcccggtccaccagggctttggccttaaaggcgctgtcaccctcaccatcctgctgggcattttcttcctctgctggggccccttcttcctgcatctcacactcatcgtcctctgccccgagcaccccacgtgcggctgcatcttcaagaacttcaacctctttctcgccctcatcatctgcaatgccatcatcgaccccctcatctacgccttccacagccaggagctccgcaggacgctcaaggaggtgctgacatgctcctggtgagcgcggtgcacgcggctttaagtgtgctgggcagagggaggtggtgatattgtgtggtctggttcctgtgtgaccctgggcagttccttacctccctggtccccgtttgtcaaagaggatggactaaatgatctctgaaagtgttgaagcgcggacccttctgggtccagggaggggtccctgcaaaactccaggcaggacttctcaccagcagtcgtggggaacggaggaggacatggggaggttgtggggcctcaggctccgggcaccaggggccaacctcaggctcctaaagagacattttccgcccactcctgggacactccgtctgctccaatgactgagcagcatccaccccaccccatctttgctgccagctctcaggaccgtgccctcgtcagctgggatgtgaagtctctgggtggaagtgtgtgccaagagctactcccacagcagccccaggagaaggggctttgtgaccagaaagcttcatccacagccttgcagcggctcctgcaaaaggaggtgaaatccctgcctcaggccaagggaccaggtttgcaggagcccccctagtggtatggggctgagccctcctgagggccggttctaaggctcagactgggcactggggcctcagcctgctttcctgcagcagtcgcccaagcagacagccctggcaaatgcctgactcagtgaccagtgcctgtgagca

SEQ ID NO: 166 - protein, 317 aa, Homo sapiens
MAVQGSQRRLLGSLNSTPTAIPQLGLAANQTGARCLEVSISDGLFLSLGLVSLVENALVVATIAKNRNLHSPMYCFICCLALSDLLVSGSNVLETAVILLLEAGALVARAAVLQQLDNVIDVITCSSMLSSLCFLGAIAVDRYISIFYALRYHSIVTLPRARRAVAAIWVASVVFSTLFIAYYDHVAVLLCLVVFFLAMLVLMAVLYVHMLARACQHAQGIARLHKRQRPVHQGFGLKGAVTLTILLGIFFLCWGPFFLHLTLIVLCPEHPTCGCIFKNFNLFLALIICNAIIDPLIYAFHSQELRRTLKEVLTCSW

SEQ ID NO: 167 - DNA, 79256 bp, Mus musculus
  misc_feature (1)...(79256): n = A,T,C or G
actcactttgtagcccaggctggccttgaactcagaaatccacctacctctgcctccccagtgctgggattaaaggcgtgcgccaccacgcctggctttgatttttttttttttttttttattacttgtggaatgaaaagcaaagcaaaaaatatgcagcaggaaatcaatctcgctgtggtctaatcacactgttctagggctctcggtgctgcgctgagagggaggaacctaagggtcaatgacggggatgggtacagtgacatcagagaggctaatcgtacgtccagagaagtcagacaagagagatggctctgcagttaggggtacttctagttcttgcagaggacctgggttgattcccagcgaccacatggtggctcacaactgtccataactctagttctaggatgtacatgatacacagacatacatgggcataccgttaatcctcaggaggcagaggcagacgcaggcagatctctgtgagatctgcataagagttccaagccagccagggctacacacagaaaccctgtctccaaaacaaaacaaaaacaaaagcaataaggccaagactgactgaggaagacggacatccatcaacggcctccacatgcatatgtactcgaacatgcgcacgcgcacacacacacaccaaaataaatagagcaagagaagaaaggcatgggagagaaaggggcctggcctgggattcagcatgtggcagtcgtcctccccctcctctgtgagggctcagcacagggagctgaggtcgtaggagtatcctgaggctctcagtgaatcctagcaatgtactgaaacagctcttgggcggctctgcagctgctactgaaggtgcatcaagccccagggtgggatgtagctaacagatgtcttcagatcactgggaatccactctgttcaataactgctatttttgttctgggaaccaaacatctgctctaacggctcctctggggacctagggcgaggctgtgatgtgttcaagggggaattatgtcacagcctagaaaagagggaaggagtcttggggattaagaggacatcagaggaggagggtccctgtgaagaggaggatgaagatccacatggggcagcaagctccttgtaatggacaaccagactggaacctatagccagccccctcccatgctctccctgtaggaggcacttaagatacctcttaaggaagggtgaggcagaagggtcctaggtggggaggaggggtcctatatggggaggaggggtcctaggtgggaaggagggtagtaggtggggaggaggagggtagtaggtgggaaggaggagggtagtaggtggggagaaagggtactagacctgtgtgagtaccataggactcctccccgagtctatctgctcctgatttggacagagataccaaacaggacatagattccagggcccaggtctgtgcaatcctttcgagaaggaggaaagaactgggcagccacagtcaaaagacactggctcacagagaggtaagggcccccagagctcttactgtcagtgggcaggaaacactaggctgagccacacccccagctgggcctgactctggggtgactatcaagagagagggtggctaatgtcaagcatgcgtgagtgtggcaacagaagtgggtacatagacaaagggtgggggaagggagggagggagcacggggagggagggagcatgtaggggttagaaagacagcctgtgtttaatgttgatgcgaaagacctttcttggtgcactgagagcttttcaggacacagcgctaagggtggggtgtgggaagggggcatgggatgaggatgcctgtgatgccggcaggagctgagggaggcttagttgtgttaagaaatgatattactaggggctggagagatggctcagtggttaagagcactgactgctcttctgaaagtcctgagttcaaatcccagcagctcacaaccatctgtaatgagatctgttgccttcttctggtgtgtcagaagacagctacaatgtatttagatataataataaataaatatttttttaaaaaaagaaaagaaagaaatagtattactctacagcgatgctttctggatctaatggggacatttctgtatgacagaatccctcctagggagattcaacatacacacacacacacacacacacacacacacacatctattcacctcagacagggaactcaagacaaaaccaaagtagagacaccactaaagtccaatttgaagtcaggtgtgatggcacacacctttaatcccagagacaggtagatagatctctgagttcaaggctagtgtggtgtatacagtgagttctaggacagctagggctacaggggaaaaacaaaaacaaaacaaaacaaaacaaaacaaaacaaacaagcaaacaaaaaaccaccttgaccattacattctccattccttgcactgttttaggaacattttcttaaaaaaagaaaaaaagccgggcgtggtggcacatgcctttaatcccagcactcgggaggcaaaggcaggtggatttctgagtttgaggcctggccccactgtctctgtttatgtccaacgccaggctgagcagagggaccactcttttggctcttacctgctaggctaagatcctgaggcttggtgtcagacagcacagctcacccttgtgcaaagctgtgcccaccagggggcgcgatgcgagtgtgtatgagggtgtgcacacatagcctctcttcctgtgagtgattctgtttctttgggaggaagccgtccatttccctgagttttaaagcaggtagctgggagtctgccttagcctttcacacctgtgctcactttaaggaaacgtttcttcccgtgtgtttgccccagcacaacaccatccaaccttgacttttcaaagaacccttaagttcccacttcagggatctgatgcctctagcctctgcgggcacctgcatccacatgcacatagccatactcagacagatacccacatacagataattaaacgctttttaaacaacatctcattgcaaagactggatgtagtggcccacaatgacagtctgggtacttgggaggtgagggcagaagctccagagttcaggttcatctctactgcatagaaagttcaagatcaccctgcctacctgcactctaccatctattacaacatttaaacatccagaagtgggggctggtgagatggctcagcggttaggagcgccgactgctcttccaaaggtcctgagttcaaatcccagcaaccacatggtggctcacaaccatctgtaatgagatctgatgccctcttctggagtgtctgaagacagctacagtgtatataataaaaataaataaataaatattttaaaaaaaccatccagaggtggtgtatagctttttctgcaatctttatggagatatgtcctggatcctagtgtggactcttcccctaggcaaagcctacactgaggctgctcacatgcattctgtgtttcacatctgcctatcttctgcagtcctttgatcttgagactaatatacaggcgcacacacacacacacacacacacacagcctgtcagcttgagggcaaagtcctagacttaggtggtacaggtccagctcttctctttagatctctgtgtgtggatggggagatgacaaggcagacacatcactttttgagaaaccctgtctcaggaggcagaggcagaggcagaggcaggaggatctctgagttcaagaccagcctggtctatagagaaagttccatgacagccaaggctacacagagaaaccctatctttaaaaaaaaaaaaaaaaaaaaaaagagagagagagccacaacattatttactttatgtgcatgtgtctgagtacactcatatgtactacatacatgcaggagtcagaggaggctggaagagtcatcagattccttagaactggagttagagggtcgtgggctgggctgtgggtgctgagaatcaaacccgggcctctgaaagagtagcccgtgcccttgactgctgggccacgtctccagccctctcctgtagacttctttagattgctcctgtgccggagagacagctcagtgggtaaaggcatttccaaccacaccagccaacctgtttgatatcttgttctcacgtggtagaaatgtaaaccgactcacacaagcatgcaatcctctgaactctacaagtccacacacacacacacacacacacacacgaataaacttttttttttccttttttaagaaaatgttcctaaaacagtgcaagaaatggggaatgtatggcccagcagtcagagggggagggtggaatgggcacagaagaacacagctggcgaagcagttttgaagcagagtgaggcagatgcatgccccagacggcggccggtgaagtggcccaatctctgctctcagggattgatctgcatatatcacagcacccagttgctaccagttgctactctctaattcaccccattcgtatttcttgctaaggtgttttcttattctcggatcctccaggcagctctcttgtaaactgtcctcagctcggatctcttctcttaccaccctgtttacctggccagctctccccaccacgtgacccgagcgtaactccaaggattcttcccacgcctgcagcaggtctgcagcgagctctgcagaggctgcgggccacgcatgcgtaactgtaagcgcacctgcgcctctgctggccagggaggctagacttctctaagcatcctgcggcatcatcccggtctggtcgcgctcggggctgaggtggagtgatgggcaatgaacctgattgggctcaaattcccgaggtgatctgattcctgtcgctgatacgtgcataacaagctgcccacatagccaaacctctccttctgccatagactgcttcctgggctctgcagcctccactgggcatcaggagatgagggctggagtggagtatctggtctgcatttacagccttatgactttggcctggtagcttaaccttggcaggccctgagaaaataatatcaccaacttaatggagtaggagtaagagcccaatgaatgctgagtattttgtgatgtctcaaactttcagccaatgcagaatacagatagctcacctctaatcccagaactcgagaggctgaggcaggaggattattgctagtttgaagccagtctggggttatctaggaagactctatctcaacacgcatcctctctaaatacattgtgagtgatgtctgcctgggagagattttacacagttggtcattgccctgtatcctcagagctaccctgagagagaagtttcacagatggggaaaccaaggttcagagatgtctggaagtctggagccgggtgatggattccacattcagtgtgatctcaaagtcagggtagggatctttattttcctgataggatttcaagtaagctcagtctgtccttgaacttgcttcatagccaaggatgaaggaaggtcatctcgatcacttgagctcttctgtcctttgcttccacatcccaagtgccaggattataggagccagcacccaccaaaatcaggctctgcggtgggtgggttcacggtctcatcccacttgctctctgaactttctttttaaaaatagcatccattctgaccttagccactgacagggaacaccccaagtacactcacatacagaaactcttttttctggtccttgtttctgctgaaaataaggagctgctatatttgctgtgatctctgaagaggttccttgtacagagatcgcaccccacctgaaagtccctgagcaacgcagcaggcccctctcctagagctctgcctgccaacctgactcttaggttctctgatgtaatcacaatggactctcttttcctggagaagtcaaagtcattcctattgctaggttttgcacctactgtagggggataggatgctctcccatccccccttgctacgcccccaatcctcccaaccccccccccccacgctttggttcaaggagccctctctgactgtagcccagccagttcttgggtcaggtgccctgctgtcagtgactttcacagtccctttcctgtttcagcactttccagcatgtgtgactcccctactaccatctgtctgggccatcagacagacccacaagggcaggggttatgccttacagcacgggggcggggggggggggatggacatctgatgctactctgttaaccctgattggcccacttgactgagtgaacgacaatccagccctcaacatcccaactcagccagaagggatttttcaaacttccaattcattttctgtggtagatgcattaactgaagagtctctgttgatacatgccagctggttaaggaaggagcatgtggtgtcacaactgtacccggggttccctcacatttacgcacactagctccatctccagatgtaccaatgggttctgtactgagacatggagagaagacatattgtaccttctgcctaggaaggaaacaaaaggtcctataggtgaaaactggagtcgaggccagatgtctgggttccctttcctgttcttgtgataaaacatcctgatgaaagtactttaaggaagaaaacatttatttttggtttacagttcaagggcaagtccattatggcaaggtaggaaggaaggtaggagcttgaggtggctggtcacaccgtgtccacagtcaggaagcagaaagcaatgcctattatggcacagctcacagcctagggaatgataccaaccattgtgggcaggtcttcccacctcaattagcctaatcacaatagcctcccacgggtatgcccagaggctaacagagtcaccagaacccttcacagacgtgcctggagccttgcctcatcaatcccagatcctgccaacatttatttttcatgacagaatgttgtcaaatcttctcatcttggtgccggtgtcttgaactaggacatacagtgtttgacgttccaccatgactcacttcacgaccttggaaaattcttccttaggctttcgcttcttttcttgttgtactgtataagacagtagctcagaattcaaattataacagagttgtatttctagggactaaggctgagcttagctggtagactgatggcacaacataaatcagacatggtggtgcatgcctaggtttccagcttgtgagaggtgacgagagaatgagggattgaaggtcatcctgagctacatatcaagtttaaggccagtctgagctacatgggcccctgttacatgcttggggagtggggagcagtggtggctaagccttcaagcccagcactcgggaggcagaggtagacggatttctgagttcgaggccagcctggtctacagagtgagttccaggacagccagggctacacagagaaaccctgtcttgaaaaaccaaaaaaaaaaaaaaaagcaaaagcaaattatcataaactatgactaaagccaggaatggcaaacacctttaaccccagcaccaggaggcagaagcaggtagatttctgcacattctaaaccaaacggggccacatagtaagtcctgtctaagtaaatagatcgatagattaaataaataaataaataaataaatgcatttgttttaaaaagtacttgaattactacttggccactactcaatacagcctctctgaatcccagggtcctcgtctataaaaaaaaaaaatcacttgatttctgaatgatatgcggaaagggtcccagatcacagggctgtccacacgtgtggggtactcatggacttcatagccatactttgtagcctatttgtttcaggtttttgagacaggagattaccatgtagcccaggctggcagaagttcacagaaagtctcttgccttaccctctcaaacactgggatgtttgccaccgtgtctagcagtcctttatgattaaaaaaatttttattatatgtatacgtaagtatgatgtatgtacacactctgtggcactcatgtggaagtcagacaattttagggagttggttccagagaactgctgtaaaagttttattatatttacctaatgtctgataccaagcgccactgtgcgtgtgtggaggtcagagaacgtgtgggagtctgcttgctccatgcactaactggattccagggggtcaaacttaggatataaggccagacgacaagtgcctttacccactgagccctctcaatagctctgcctttgggagtttgttgttgtcgttttgttttgttttgttttgtttttttaaactgggtatatgtagctctggcttgcctgaaactcactatgtagaccaggctggccaagaactcacagagtttgtcctgcctctacctcccaagtgctgggattaaaggtctgtgctgctatgccctcctttgtggttctttcttgtttgtttgtaaagatagcgattttctgtgtagccctggctgtccctcaacttgttctatagaccaggcttttctgaaacttgctctgtagaccagactggtctcaaactcagggaccccctagctttctgtctcctgagtgctaggactaaaggtatgtgttaccacacctggctcctttgtgatttttccttttaaaaatgtttttaaaaaagatttattcatgcatgtattttatgtatgtgggtattctgttggcatgtatgcacatcagaagagggcatttggtcctactagatacagtcacagacaattgtgagctgtcatgtgaatgctaagactttaactgaggacctctggaagaacagccagtgctcttaaccactgagccatctctccagccccatcctttgtgatttttaagttagttggacttgttcattttttctttgcactttattttattttccaccatcagggatcaaagtggagaccttgcatataacaagcaagtgctccacctctgaggtacgtctcctactcttgttctgtatttccaaagcaaccttcttcattagcaaagatggaacctcgaaaaccagtatgtgaccatgtagacaggaggaaggagatgctgagtccagagttgattctgtagtatttcctaattagatttggactttggaaactactggatttgttccatgtcttgtgcacgagtgcagctccagtatacagaatatccatagtaattcatatacatagcttatacatagttatgggagaataatattcattagtgactgatagataaatggtacaacagcaagcgcctcgggtgtgtttttgtacctgaaaatgaagattagaaatgatgttcggttattgcgcgaatttagtaaaatgatacctgaaaggtgtgtaacacagagcttagctctccatcaatggtaaacagaccacagagacacagggatagtgtcagtgtactgtaagcctatgttgtggctgggaatgggactacagttaataagaatctgctctcagagttcggttttttggcaggagaaaatggaaggctcccaaaaaagcaggaagagcatcacagcctggctttagggagattcccatgacctgggcagcccgtgcagggctggcgaggggattttaggaccctgaggccctggcgcgagcgtgaggcgcaggggagggcgctcccggagcctgcatcccggagggcggggtctcgcgcccgggccgcgcttctattggcggcagcgcgcgggtgacgatgacggctggcgcgaggccccgccccgcagccccgcccctcccgcgcgcgctggccgctacacagcctcgctttggcccgagtcgcgcccccgcgcggagtccgcgcgtcagtcggtcccgagcgcgactgcggggcggcgggctgcagacagcggggcgcgcggcccgggggaggcgacggtgtcgcgggaggagcatcggagcccgaagactcgaagaacgccatggcccccattggcctcaaggcggtggtcggagagagtaagtggcgtccgggtgctgccccggggccggcgaaacccgttattcaggcgccgccctcccgggagggatgcccctctggcttcctgcggccagcaggcttccctgactcacgcttcacccagatcccctcttcacctcggtcctcctcaccccagacgcctcctcagtctctattcctccacctctcttcatcccatccctcctcctcatacctcgccttcataaacatctcgttttcctttttaccttcatccattcacttccatcacgccatctctcccttcatcccatccctctcctctctctctctctccctgttcacctcccccacccgcgcctttatcccctccagcccaccaccctcctctgcagcatcacccttctgcaccccaactcttctccagacgtattcctttcctaccgtctcctttccttgccttctgcatatccagagctctcaattccgctcccccccccctttctttctgtctccaatccctccctctttcccaccctccctcgtgaatcgtgacgaacgaagcctggcctgcgtcctcctccctccctgcctccctctcccgggagcagggcgctgtccccggctgcagagacccacctgggagcggctgggcgcgcgccgccagggccactcctgccagctgggcaggggacacggggttttcctgtggcactgcttccgcaaggctctctccgcctccccttccccgggctggacttaaagggaggggtcttagctggtccgaacccttagaaatcccaagggaaaggggagcagtttcggagtgtcgcgggaggagtggccccagccagcgccgcagtctgcagtctcgctgcttgtgggactcagacctgggcgtcgctgcggggaagatgtgactgtttataggtttgcatgaaaggcacagcagacatgtttaaatttatttatttatttttttttaataatggatggggagcgtcgaagtgagggcgggctgtcggtattctcaaagatgggtgacctaggtagaaaaatagtgcctcttaagtattttggcacgtctttacaatgaaaccgcgtgaacactgctgtgactttggctatctttttagagtgagagagaaaatgaaagtgccttttccctgtaggagaggtggaaatttacagtttcccttttcagtgatcctgttctatggcagcttcctccccgccccccaccccccatcaaatgcagcataactgttgagcgtactaactgcctaacccttatcttttgactggtatgagtaggggggggggatactcttccctgatatagtacatcaggagaaattattataaaaacaaaaccaaaagtcgacctttttaaatgcttatgctagcacccgtgctgtaaaggctacttgaattgttttctgaggagaattggtggttaaggctgcaagtatccctagggattttctgtcgtcaacatcttcattttcacctatgggaaaacaattgaggcttggagcagttaaatgacttgctgaaatcactgttaattaattttttttaatctagtgtccgtttccttgtagtttaagtaaaaataacatccttgcattctacatacataaagttttctttataccccccttttcaagggctagaggtatgggatcgaatgttgtattccaggtattatattttgaatactacatttgaatgataaaatacttattaaagaatctcccccaagacagtctctacagtccaagctgctggcccagaaggcactatgtaacttagactggcattaaatttatcttaatcctcctgcctcagcgtcacaaatgctgaagattatagctgtgagccaccaacttcagcttattttttgttaatgcgagacaaggtctcactttacagccctggctagcctggtacttgctacccagtgcaggctggctttgaactcatggtaatcctcctgtctcaggctaccaaaatgttggggttccaggcttgcaccaccatacccaggtggtgaggtgcttgcatccttttgccaagacccttaggtgtcaccataacctctcgccttgcctcttttagaagtaagcatcagaaaaagttatatatatatatatatcagtatgcaatatggccaaaatttcctttgaaacaaagtgaaactgtggtgtgcaaaaataagcacaattaaaaaaaatgatgaatgtgtgaacaggcttctattcctgtgacaattgagttaggcgtgtgctttaggaaaatgtatcgctgaatacgattttaatgctaccttctagtttttggtggggtttctgctttggcttttttctccaaaaaataaaagtgagatgaagatgcttttccttttcactgtcttgagaactgagtctaatatagcccaggtacgcctagagctgccaggggctcagcatgagttaaaactgatcctccagcttctccctctggagcctcccaccactgtctccattttcagcagtgctgggattgaacctggggcctctagtatgctaggttagcactctacccactgagctacagctgcagctaaagcttttaaaaacccactatgcaccagtttaaatgtcaccttccttttgctctaagttaacattccatagtcaccgtcttagttggggttatcgtagctggaatgaaacaccatggccaaaattagctttgggaggaaaggatttttccacatcacagttcatcattgaaggaagtcaggactgagcaggcacctgaactcaggaggggatgcaggcctgctcagcctgctttcttacagagcccaggggtggtctcacccacaatgggctgggccctcccacttcagtcagtgattaagaaaatgccctacaggcttgcctacagccccattttacagaggcctttttgtaattgaggcaccctcctctaaaggctctagctgtgtgaagttgacataaaactaaccagcacagtcactatcagattttttcagaagtaaaaaatgatcctgtcctttgtttgttttggggggaagcccacatcacttaggatatgaataaacacaaaataaatgtagttttgagccccttacctttccctggaatctgccccaatctaatttagagccttgcacatgtgcagtaccagccccagagcccttctgggcccttctgagttgagcttcattggatagcccgtgggctgtaggtgtaagaagaggatatggattgatttagctacttattctatagacatttgtttagagcttgctaggaactatgggagtttcaaagctgaaagctaagaaaacatgaatctgctgtgccaagcaagcatggtggcatatgcctttttctccaggactccggaggcagagttccaggccagcctgggatacttagtgagaccctgtcttcaaaccaaccagccaacaagcccctagaaaccaaaccaacagcaaaatgggactaggtcgactgtgtggccatcagtcctccagaggttttctgctgcttccccagcatgctgtagaacacactgtgacttacttgtgtgttttggccttgcccaactggtctgtgtgtttcttcagtgggtcttgttcttgggcctgtcctcagtgcatgatgtaggcactgacacacagttaatgttggacagacaactcaggagaacgagaacaggctcagtaactagaattatgggagacccccatgccagctgggatagtgggttcttgtgccctgtgccaactttttactggggatgaatgaaggtcctcaggcctgcccagcaagagcctcaggagctgagtatcttcctggatttaaaggtttattcacttcaggaccacagcttcattttaagattaaacctatttatttgtttgagttgggagtgtgccacagacctgtggagggaagaaggctttcaggagtcagcccctccttttacctcgtaggcctcaaggatcaaactcagttcaaggtcagctgcaaatacctgtatccactgagccagcttgctgcccaggactatggttttacatttttttttttaagattaactctgtctatctatttgatttgctcaaaacaaagtgtctttgtatagttttggctgtcttgaaactcgaactcacagagatgcatctgcctctgcctcctgagtgctgggattaaaggtgtgcctgccaccaccgcctggctaagatttatttttgtgtctcttgattgtaggtgccgatagaatcctgaagggggcgccagatccaggggagctggagttacaggtggttgtgagccactggatgtgtatactaggagtcaaatgcaggctctctggaagatcctgtctaaacagacagacagacaggcaggcagacaaacaaaaacagatttcagattttctcatgctgttccctatagatagtctcttcctaccctcagctcctggcaaccaccaacctttttccattccctggagttttgcatcttccagaatatcatgccaatggaatagagcatgctctttttcttttgtttgtttggtttttttttttttttttttgaggcaggatctcactatgtagcattggctggcttggaactcactatatagaacaggctggccttgaacacacagagatccacctgtctctgtctcccaagtactgggatcaaaggtgagcactacttcgcccagctcttaaaatgggatttctggggctggagagatggcccagtggggacagtccctgctatgcaagcatgaggacctgagttctgatccccagctccaggtaaaagtgccaggtatagtcatgtgcatctgtaaccctagctagggcgtgggtggagagacagatggaccctgaaatacactggccaagcagtaacgcaaatctgagcggtaggcacagagagaaactgcataagctaaggtaggtactgatagcaagagacacattatgccagcttctgacctacatacaaacacacgtatcacatacacacgtaaacacacacacacacatacaaagtatatacattttttaaaacttgatttctgggctggagagatggctcagcggttaagagcaccgactgatcttctgaaggtcctgagttcaaatcacagcaaccacttggtggctcacaaccatctgtaacaagatctgactccctcttctggagtatctgaagacagctacagtgtacttacacataataaataaataaataaatcttaaaaaaaaaaacaaaaaaaacttgatttctttcatccagagcagttgcagtagatgctggctatctgagcaccagaggcaggaggattgcagcaagctctagactaccataatctgcatgaaaagttcgaggctgctcaagaccatgtagtgagaccctatctcaactcccctatcctcttttacatagcattttactttgtgtgtgtgtgtgtgtgtgtgtgtgtgtgtgtgtgtgcaagcacgtgtgtgtatgtgcacacacataccattgcacacatgtagaagttctgcattggttctcaccttctaccatgtggggcctggaactgaacttaggatcaccagtcctagtggcaagcacctttcccactgagccacctccgtggctcctttacttgctgcggagcccacagagcagctgcaccgcctcaccttccctctggatgtctgagggctccggttctacacttcctcgcccaggctctctaacccctcctctgcccctcccttccctccttccttcctctgacaggatctttgtattggttccaggctaaactcaattcttaggctcaagtatgccttctacctcatctccttcccttcctttgaatgtttgttttgtttttttcccccagacagggtttctctgtgtgccctggctgtcctggaattcactctgtagatcaggctggcctcgaactcacagaggcatgaactactatgcccattttgttttgttttgtttttggtgtttatttctagatatagttctgttttgaactggttgtcaccttataataatgtgatttacaatttaagttggggcaagtttccctaagtagtggtttagggaccaagtagcatccccgtgtcttcatcagttgtgagaggacttgcatcttccctgtatccaacaagggcttattgtgttggctgtacattgaatgttttttttttttaattaattaatttattttttggcacacagcacctctgaggcaaacaggtgcttggcaactgaagagctcaacagcagcaagaggctatgggaagctgacttccttggtccaacagaagaaactggatctaggctagaaagatagctcagcaattaagagcacgcagtgcgctgagccccagttcaatctccagcatccacatcagagctttctttagtgaattgatcaggccaacttttatagttacctctggcagtccagcagtcctaaatcgtgcgctctggtcccaagcttgccctaggataactgtctcaggaatgccagctttcaggttgatcagagggacacagcagctcttcctaagggtgcttggctagggattaagcactgtgaagtgctactgaaaatgctaactcctggatgagtctttattgtaagcattctttaatgtctttcctcttagtaaatgaagatgttaagagcaggtgtcttggccattggggatatagctggtatacccttcacctgttcctggctgtcgtacacccccatgaactgtcaatcagcctctcagcaaccaaccagagtctccctcatcattgcagttgctttgaacagttcacagacaactcgcaaggatgagcaagaaataggttctactgcaacaagcccctgtgaactctacatgaccctgcatcagctgttctcatttagggtaggaagggagcctggttgtgaaggtacaggttcaaattggtctccagaagtcagtctttctgtagtggcctttggagatgtcagaaaactcaagaactgtcaaacacacctgagttcactcagtggcctccaagggatttggacccaatgcctttgttcattcatccaccgtatagactgcctattggtattagaatctgtgcagcaaggtgatgggtgcggaaacctggtcctcctgccctggcctccaccgtgctgggattataggcccgtaccaccaagcccagctaaaactggttctggtgggggtccacgtagcacagcagtgacctgccctggctgggactctggataatgttgggatccccaggaaacaagtgaagataaggagatctgtaaagggaaaggctagctgtgcagaaagtggtctcagtggggcctgagtaaggcaagcagaagggctgaggttggtaggaaagacgaatccagtgttgcttggctggggaaggggagacagagaagccggaggtgggagggttgctagatttccttagcctggtactgttttaaaatccttattgtgtttatttttggaatgggaaggagtgggtatgtgccacagtatgtctgtggaggttgggacaacctgtgggggctggttttctgcttcagataccagggattggacccagggcatcatgcttggtagcacactcctttgccactgagtcatctctcaggatcttatgttgtttttcagaagtcctggagacccccatgcagatttttaagtcagtggaagacagggtcagaatggtttaaagcactctggttctctctggagattggatgggaggcagggagttaggagctgtggtggtgtcctggctgcggcagtgtttgggaggctgctaacctaggtctgagacagagagtggatgggggaaggaggtaagctgggagacgtcttacagatgttgacgggttacgtcacagccatcagatgcaagggatgaaaagagaaggctggaaatcagtcctagtttagcacagcaagtcctaaggtcgtattgttcaacaggaggcaagggcaagagaaacagcacatttgggggaacgttaccttccctaggcactatctctgaaagtatgctaagaggcagtgggcagggacagcaaagatcaggagaggtcacgatggaggtgcaggctgggggccatgcgatgaccttaagctgttggggacagtcattcagaggagaggatgggaaatgtgggagaacgagtgagggagacactgacactgactggcaggcccaaagggaacagccaggaggcctgagagtcagcggggagccagagctatcctgggtgaccgagcctttgcccttaactcgcagtgaccttgagccagctgcagttgttcagctcctgggcaaggccccactctccttgctggcaaggagcctttgaagtctggacccctgaggatgttcacctctttcttggtgcttcccaagagttagagtgaggagctgtctgtgctgacttcattgctcctggttgcttggaggaggaagtgtgaaggtgtggaaaggcagggtttgtgctgacatgacatcacacagatcaggcttcgggaggcatctcggaaccccccagtctgggctcttacccacagtagggactcagtgtataatgtctgttgagtgaatcacctcatcaggccttctcctgtgtgactttcagggacagacagcactagactggtgtttcatgccagacagactgacaaggacaagttgggagaactgcagtagtggggcagaaagacagctcacactgagctcacatacagtggtggcttttctcgaacagcctcatgaggttcctgtgacggcaggagggacagagctgctgtaggctggcagcccacagaggaagaactcacaggtgtgggggctctcagcagggaggagtgaccaagttctgacatgtcttcccaggtgacttctttttttatggtagcctaggagggaattcagagaccagcccttctcaggagaaaaatgaagtgtgggagctgagcagggttctgctgtgattttgggtcacgtcacactctggtctttaagcagtaggcctccaagagcaagcagggaagagtgctggtgcgcgcacctcaggatgctgtcccacgtcagggtgctcagacttccttttctttctaattatctatctggctttgctgtgttttccaggaggattcctcaagtttatcattccatttctctgcttaagtttatgtttctatcaaaatttcatggatgcaatgaatgcagtaatttttaggtctttctctttaacacacagacacagacacacacgtgtctaatctcaatttcctcctcctttttttttttttttttggtggtagttttatttgttttagtgtctgctttgcatgcaggaatttttcctcagatgttcagcaaactgtgttgtctgcttatgattaagagtgggagacacgggctggtgagatggctcagtgggtaagagcacccgactgctcttccgaaggtctggagttcaaatcccagcaaccacatggtggctcacaaccatccataatgagatctgactcctcttctggagtgtctgaagatagctacagtgtacttacatataaataaataaatttaaaaaaaaaaaaaaaaagagtgggagacactgacagcagttgagagctatcagctgggatgggatgtgttatgtgttgttgagagatcctaaaatcaatatcttttcatcttagactcagagtccccaaggaatgtcctcctgcccaagagaccacggtctagttataggaaatctggaaagtcagtgaatgaaaagactggtggtaagagggggatcccccttccccccagatatggattctttatgcagccctggctgtcctggcactggctctgtagactaggctacctcaaacaccagtctgcctgccctgctcccgagtgcggagatctaaggtgtgcgccgtcacgtccggcagggagaggttcttgaggacctgtgttcctagctcattcgttcctctctccacgttgaggcctcgagtgggaattatggaattttgagttcctttttaaaaaacataaagatattatgaatatgattttgttttaatcccatgtgtgggatttgggggtgctctagcagaggcatggctttgccagctgcaggtagtttctctgatagtgtgatatttggaattctgggaattttccagggtgtatgtaaatgcaagggccccgtaggtgaggttgggggtccttggttatttaggacggttgattagtttgttagagttgtgctccaagagaaataagaaagaaattagattcagagatctttacttcttttcctctctatccttctttcttccctttttagtgatagggggtgatgccaggggataaagggtgggaaaaagaagaaactacaaagtagcagagaccagcaacagaggcccataatcaccaggggtcttggctcctccaggccgaggggaagcaccattgttctggggtgttgaagtgtgttcaccagccatggccagtggtgaaaagtatgcagtctgcccatatgctctcctcttgagttccacaggcactgcgtgctgccagctccgaaagcctctgaggttctgtggttcagtttgctagtttttcctgcactatttactaagtcaaggtgnnnnnnnnnnnnnnnnnnnnnnnnnnnnnnnnnnnnnnnnnnnnnnnnnnnnnnnnnnnnnnnnnnnnnnnnnnnnnnnnnnnnnnnnnnnnnnnnnnnnnnnnnnnnnnnnnnnnnnnnnnnnnnnnnnnnnnnnnnnnnnnnnnnnnnnnnnnnnnnnnnnnnnnnnnnnnnnnnnnnnnnnnnnnnnnnnnnnnnnnnnnnnnnnnnnnnnnnnnnnnnnnnnnnnnnnnnnnnnnnnnnnnnnnnnnnnnnnnnnnnnnnnnnnnnnnnnnnnnnnnnnnnnnnnnnnnnnnnnnnnnnnnnnnnnnnnnnnnnnnnnnnnnnnnnnnnnnnnnnnnnnnnnnnnnnnnnnnnnnnnnnnnnnnnnnnnnnnnnnnnnnnnnnnnaaggaaggaaggaaggaagagagaaagagagagagagagagagagagagagagagagagagagagagagagaggagaaaatcagaccacagactgtaaaatgagatattagttaggagaactgcatcctgggaaaggaaggaggaagtgctcatcagacaggctggcttcctcacagcaggtgacaggccctttgggctactattttttccttctcactgatataaatagtcataaatctcagccttttagtgctgggtatgtgggtagcaaataagagctggactacaggttaaaaacaaatatttgggtccagtgtggtggcacttgtctttaatcttggcacttgagagacagaggcagatggaactctgtcagttttcaggtcagcctggtgttcatagggagttctaggccaggccagctagggtataaaatgagaccttgtcctctcctccccaaaacacacatacacacaccaccacatccccccaaacaaacaaaaaactacaagccaacaaacagaaaaaaccccaagtatctgtgatagcccaaatccaggaatgtcatgatgaactagctttccagactctgacatacatcttcaacaaagtggtcttgggcatagagccatgacgcagttagacagtgtggagatgtcaccaggcttctctgctactttcctgctgctcaatcgagggccgagaccaccccagcacccaacgttcactgcatgccccagcagaataccccagttatgcctgggtacctggagaggtctgtacagttcacagagagctgcctcctgtcatttcaagtggaaaagaacataaaatgtatgcataggaactttgaaaaaactgctgtttaggaggagcatggccgtccacacattgaaccccaggatttgagagacaggggtaggcagatctctgggagtttcaggtcagctcaaacaacgtagtgagctcctcaaaagcaaaaccaaagtcgtttggttttcctctcctgggtttttggaaacagggtccaagctggtcctgaactatgtagccaaagattactgtgaactcctggtcttgctcccctcccaccaggcttagttagcatttacaaatgtcttctagagaaggaaggcacgcagcaaaggcttattcagacaggttattctgaagaaggcctgcagggaaagcagctttaacttttctcagctatgacggtcacgagctaaaaattcaaaggaaaggtaaccggaaattaatagggtggagctgaggaggagttcccaggtgagggagctgggcaacaggaagcaggagtagtgccaagctgaagcaggacagatgacacagtggcagagacagaggcagaaggagagctgagaacagaagtcacttggtctgtgtactcagtggaagctcgcatccggtcctttctctggcatgtcagcattcttctcttcctggagccccgccttcttcccgtgcttgattctgagcccaaacccaaataggatgtttctgtttctttttttctgtgtgtgtgtgtgtgtgtgtgtgtgtataatctttagaagatttttagaattattgttttattttatatggatgtgtgtttttcttgtatgtctgtgagccatgtgtgtatctggtgcctgcaaaggttaggagattttggatcccctggaactagagttacggacagttgtgaactatcctgtgggaatcaagcttgggtcctctgcaagagcagcaaatgctcttagctgctgagcaatggttccaccccctttctttctggtatcttattgtaatcaattgcatggatttaggaaaagtattcctcccgaaactggatcgttctgtgttcttatctctaactagggactagttcctgcctctagaagctttcctgaagctttcttttctcatgtcagtgatgatacctccagaaggttccagaggctcagatggctgggtcagggtagagtcttggtactgttgaaattttggtcagattatgggtgtttaatagcacccttggccaaggcactcaaagtctccagtcaaggattccctggaggtaagtccagtccctgcactggcctggcctgcctgctgggttgctgggatggaggaagtctccattccatcacactttcttccaagtgtgctttccgtctaatgttggtctctgggtgaacaccacacaagaaatgtaactgggaaccattagatgccgtgtctactaatgtggctgctggccacttcttgggtctccaaggttcccagacttactgcttatcacacggtatgtgctaagagaaactcagtggttgatagagaaatacatgcatactggggaccagatggggtgttagtacatgaatgtccctgctgatgtgcaagagaggggcagcttcttttctttagcaaatacagactgtctccctcatcacgtaatcactgttgttccttccttccttccttccttccttcctttcttccttccctcttcttcctcctccgccccttctctctgtgatactaagaattgaaccctggagccaggtgtggtggcgcacacctttgatcccagcactcaggaggcagaggcaggtagatttctgagttcgaggccagcctggtctacagagtgagttccaggacagccagggctatacagagaaaccctgtctcgaaaaaccaaaaaaaaaaaaaaaaaaaaaaaaaaaaaaaaaaaaagaaagaaaaaaagaaattgaaattgtttctgtttctgtttttgtgtgtgtatgtggtttttttgtttgtttgtttgttttttgcagctccttgttatctgtgtgaagatttatgatgttacagctccttttatctgaggtacactgtgtttagctgtccttaggaagaacaatgtaatgctttttattttatttattattgtgtctgttattattttggtgttgattattgcagctggggccatgtccatgctaaggtcccgagggaagtcctccgagctaaccagcctgagagaagctagctttttgacctttggctcatgaaacaggggtgaacacaggatttgccttgaaagagaaaggggactctgtcctgaaacccgacccagccccgttttggtctccaatggcgggcaaccgaagctgtgcactgctcggtgctggcaggcagcctgtgtcatagacgccataaccttgggcatctgagtcttatgtagaatctgtaaataagccaccgtcaagccagcttcaaacccctgggccccctactttcctctaatccccgactaccccagaatcaaacttaagtgggctacacaggagctcctcaggagcctcagagaggggcaccctgttctcaccgtggctggtgctttggggtctctcttacgtctgcaaagtatagtttagatataaatagtaaattaaaatcttagataaatgctattttataagggtaagttgggggacctgtcatctgagggctctgtggagtagtcctgtgttaagaaacactgcattatttatctttttggtttttttttctagtgagtataatgcactttactttttagacaacctatgtgacgatttttttctctctctttttttaagaattatttattatatgtaactacactgtagctgtcttcagacaccccagaagaaggcatcagatctcattacgagtggttgtgagccaccatgtggttgctgtgatttgaacacaggacctttggaagagcagtcagtgctcttaactgctgagccatctctccagcctccaacaatttttttctttaaagcaatgcctctactccatgtaaatcatggtcaaaataagatgtcagccctgtttgtctaaagtcctagtattgtatggacagtaagcagcagtcagttatggcgacaagtgatggaaaataagattacatgaagagttttcccaacttccctaccacatagatgtatatcccaattcaatctaaacgccacagaggcaggcagaacactcagggagcttttcttttgcatcctagtacagaccagaagaacaaccacaaactggtcaagggctgtcaatgcatgcaaatctacctacccaccttccttccttctttccttccttccttccttccttccttccttcttcttttttcctttatttatttatttatttatttatttatttatttagacagtcttattatatagaccagagtgacctggaactcataaagatctgccttcctctacctcccaagtgctgggatcaaaaagatgtgcatccccacactggactctgtctaggctggccttgagctcattatgtagcaaggatcttggattctttcatgtttggtttttgagacagggtctcattttgtagccctggctgacctcaaactcacagagagccacctgcctctgcctcccctgtgtctggctgaacttggacttttaaaaaatgatttgtttgtttatttattgatttgtttttttgagacagggtttctctgtggatctctgactgtcttgaaacttgctctgtagaccagactggcctcaaactcaaacagaactccctgcctctcaagtcctagaattaaaggtgtgcaccactaccacctgcctctaattcttatttttgagattcttatgtaattacttcatttcctctattccctttcctccttctagcccctttcatgtactacccccttttctgatttgctttcactcaaattcataaactctttttcttcaattgttgttgttgtgtgtatgtgtgtgtaatatatatacacatatatacacacacatgtattatataatgtttttatacacacacacacacaaacataatggctttactatttttcatccaccatagtagtatgcaggagttctgtgactttatcttacaatgcttgggtttaatgtttcatttccccacctagacagttctttaattaaaataactgttttttatatgttcttttgaatcttcatgtacattttgttgtgtagttactagacagtttgattccccgaacctcaacattctactgtgtaaagtgagggtgattatacgtacccatgactggctgtgtgctttcaaggaactgcctcctacagttcctgtgtagccctggcggtcctggaacttaatctctagactagactgttgttattgttttgtttgtttgcttttttaaatgggagatttgaaaagaattttgtgatctagttttgcaaaatagttgccaggtgtggtggtacacatctgcagtcccagcactcaggaggcagaggcaggcagatctcttgtgagtttgagaccagcttggtctacacagtgagttccaggacagccagggctacacagtgagaccctctctcaaaaccaaacaagcacccctccaaaaaaaacccagaaaaataaaacaaaaatagggtttgtgttggtacagtttggtggtagaacataggtttgtcatacataagatcctgggtctgtcgctggtacaaacaccaacccagcaagtgagtacagagaggaatcctaagacggtgacagctctgacctaagcgtcactgtgtccctgcatttatatgacaccataggccgcgctgcatttgtgtaaggactaagggaagagttttcctgatccatctgctgtgcagacttgtactttaggacagccactgtttacctgtattgtccttgaagagtgaagacaagtgtctcagcagccccatgggaaaccctctaagacctctgttcaagctgtggactttgaacactggggtctgtgtggggatggagagcccctgggctgagtcacctcattcagctctgagcccagcctagaccactgcccgactcactcgcagaactccacgcctctgtgctatgccatctcagatgacagatgggatggggatgaagatacaggacaggaaggaagctgtcatgtttgaaggtgactggggcttgtgggagtcctcatcaagtcctgctaccgtgaagaccaggacatctgttctcatgcctaaaaatgtgttctccagagccacaaccctaactaggctctagttcactaagttcactaaagtctgtgcatgtagtcatgagtgtgtgtgtgtgtgtgtgtgtgtgtgtgtgtgtatcagggacacactgggtgttgttcctccagagctgaccatcttgctttctgagatggtctctgacagggacttgggcttcacctaagcagagctggctggcccacgagccccaggaatcctcctgtctgcctttccagcacgtgggttgcaagtaaatgcaaccctgcctggctttgtgtgtggagtatgaggttcccactcaggtcttcaagcttgtgtggcctgaggtggatggtggaaacgttttggtggagtacttgaccggttctagagggctctcagtctctctccctgaggagctctgcaaacttgagggaacaagatgggattatatgctagaaaatagcccaggccacttgattctccatgctaaaatgggctctaatccatgtttcctttttggtattggattaaagaatgtagggcatcgctaggattggctgttaataatacccaggacaaatatatgctgtgaggatttggggaacgagataaggctgtaggaaggctgcagatgcgcccgttaggcatgcctgagaacacttgtgctggctttgacttttctcattgtatctccacattccccaatctgaacgtctcctgagcaatctttttactgcatttaaattaatttttggtagcaaaagatatattcagcctgagtcgtttgttaagttcagataaagcagagggggctggactgtatgtagctcagtggcagagcacacacttacctcccctaccacgtcacaaccccagcacagccacaggcaggcacacctttcatgagcgagcatcctgtcctgcgagagtcctgcagttagcagaggtggttctgctttgggaatttagctgactttgaccaaaacctaggacacctgcactttgatgtgcccctccacactccaagagttcttccaacagatgacctcaaaggaatgcagaggaggccctccacacagtggttccagagcactgggttctgttttctagttggcttgtttgtctgtttgtacgagtagaagcacagagcaacactggggcataccagcaattaaagctaataaaggtaacattttgctctacgttttcccaatttgcctgtgcatgtatacttttaaaaaaatggttgtatgtataacattagaggtaaaagagaatgtgaatttcagcagagcagcaaagggcatcagggaaggcttggagggagggaaaggaagggaaaatgatgtaattacattataattttaaaaaggagaaaattaccaggtggtggtggtgcatgcctttaatcccagcacttgggaggcagaggcaggtgacctctgtgagtttgaggccagcatggtctacagagcaaattccaagacagccctgtctcaaaaattaattaattaaaaagccctcaagtcaagtattcccagtagaaggcaaggagttaaggcacagagaaaataaacttcagcatcacaaaacaacaaaacccagttgtatttgctctgaaaccttgacatgccagccttcaatgaaatacatagaattctagtgccctggatgtgattttgtgatttcatttacttaattggaaaaaaaaaaaagagttgtagggctgaagagatggctgagtgggcctgacatgaatcccatccctagaaccccgtgtaagatggaaggagagccaggcatagaggaccccataatcacagcgctcaggaggctgaggcaggatcattgcaaattttttttgccgggnnnnnnnnnnnnnnnnnnnnnnnnnnnnnnnnnnnnnnnnnnnnnnnnnnnnnnnnnnnnnnnnnnnntgctgggattaaaggcatactccgccacgcctggcaggatcattgcaaatttgagattaatctggactacatagtgagcccaaaaggtaaaatacaagtccaggctcctggttttacttaaaactgtggtcacaaatcccaaattagcttttagaactgtccagaaatggtaaaatgtggaaattcacttccatgatctctggaaagatacaaggtgtctatttttctcaaatcttccactaacacttatcccctcgcccccaccccagctgataacctcatctccaccagcccatcacagcatcctgttgtctcagccccttccacccaggtcaggtggtccatgtccctctcctagaaggggaggcgggatccggatccaccctttctgttggatcttcttttgtttttgccaacgccaaatgttctgatatctcacatctttcagaacaaacaaagccttcctttgcgttcttatctctgttctcttagtttatttgttctctgctaccttttagcaagtctttctgaaaaggattgtcaaggtcatctctctatcctccctctcccgctagtctgttcttgactcactgagagcctgtcaaagtcagccaagctcatgtctctggagtatagcttggctgtcctctagaccaagctggcctcaaactcacagatggccacctgcctctgcctccaaagtgctgggattaaaggtgtgcgccaccactgcttgtttatttttatttatgtgtatgggtatttttgcaccatttgtatatagtgaccacagaggccagaagaagaagaaggtgtcagattccctgggcctggggctacagttatgagtcactttgtgggaactgagaatcaaactccaagtcctctgcaagagcagtgagttctcctaaccactacgccatttctccagaccctaaagttttagttttttatttgattttatttgattccctagaattggagctatagatggttgtgagccactatgtgggtgctgggaatggagcccaggtcctctagaagagcagccagtgcgcttaaccactgagctacttccccagccccacaaaatacaatacgattcctggtatcctcctactgaccatgtctcctctcttttgtacccctcgaagaatctttgcctctttccctctcttcctgtcccaagtgctagggtttgttatgcaatatgtgtcacatgggcccgcttcttccatctccatccacagtacctcaggttaccttccatgggtccacaccactcatccgataaaaagaagttcaattcccagcaaccacatagtagctcacaaccatctgttaatgggatatgatgcccttttctggtgtgtctgaagacagctacagggtattcatatacattaaataaataaataaataaatagtaaaaaataaatccaccgggcatggtggcgcatgtctttaatcccagcacttgggaggcagaggcaggcggatttctgagttcgaggccagcctggtctacaaagtgagttccaggacagccagggctacacagagaaaccctgtctcgaaaaaccaaaaataaataaataaataaataaataaaaaaaaaataaatccatcaatggatgaatccactgacaagctccaggtctggtgactgcttacctctgaattatagcacatcggggaccaagccatcaacccatgagtctgtggtctgcctccatcctaagcccacacacctcttcagccccaagctgatgttaagtgtcttatctttgtcccctacaagctttttgagtgtccctcttttctctctatctggtggctgcttgttagtcaggaccaacttcctggggtggccttgctctgtccatttgtgctgtgacctggaccctggcatactctttttgaggcacacaggagacgctctgggtgctgctttctttgagtggttgctcccatcatgagcctgcgaggccgcgagagctggctgaagcttgtgtcgctcctcctgtgtctgctacactgggggcccccagccagtgctcactgaaggagtgaaggcgtgaacatgtgtcttcctatttcattatttccaatgggtacacactagtcttttaaaggaatataacctaatttgctcaaacactttctgtccagtttttcactacaccacaaaataagtaaattaagtgtctacaggaaatatttttgagtaagctatggactattgtgctggcctttagaatcctagggatctggctgggacagagctcagtgacagagcacttgcctggtatgtgtggggcccgagttccgtcccctaaaaggaccacaaacaattaagtcctaagaagtagaagtatttctctcatgttaatcttatttttatattttaattttgggttacataaggctatttcatgtaagtacaaagagtactttgagcatatcctcccatccagaatgcagttttactaccataggaaaataaatatataaagtaaaagaaaacaatgaaagatgatctcagctctatgaagtttcatagaaaagctagtatgaaatgaactagaggttaactaaatacatttaggttggcaagattacaaatgatttttccttgtttccctttttcggtactggggattgaacccaggacccacggtgtagcacactcgggaggagcaacaagcttctgccagctcccgaggcctcccaggctcatgatgggagctttggagatggtttccaatattacctaggctggctttgaacttgccatcttcctacttcagcctcttgaaacaagcattagatgtatttttaatagtatttatctctgttttttatttgcattattttattttgtgatgctagggctcaaacctgtgccttccactgctgggcaagcactccaatctccaagctacacccctgcctgtgttttcttcttcttcttcttcttcttcttcttcttcttcttcttcttcttcttcttcttcttcttcttcttcttctttttttttttttttttttttttttttttttttttttgaggtagactagccttgaactcggcccaccttggcttaacatttaacatcttcttgttttgcctcccaattgctatggttccaggcaagtcccacccaccacaacttgctatttttgtttttaataatcagaagaaaagttcctaaaaacttgagaacacttcatgagaggatggattcttgatggtcagaagcagagttaagaccctctgtgtcctagaagggtgggcaaggaccttagtgctggagtcacctgctaatgtctgctgtgaaccttcattccaggataatgtggggcctggcttttcagaggggcaggtcatatttcctacaaggcctctgtgatatatgcgaggcctctgctgccattcttgtggggctgtggtattgtagaaactcacaacgtgacagctgtgtggagcccatggtacagtgagcttggaagacctcaggcttcctgaccggagagttagagggggctcgtgggcctgaggcctggtctgagtcttttatttacttacagcagtgcttctcaaatctaatatcctgggggacgggggtggggacgacgactcccagctgtctccataggaaggctgtgaggtcattggcctccttttcatgctctctgagccctttccagatgtcacctgcttccagacagattggcttcagaagcagaagggacagacagctgtcctctctaaaggcagacgttaggagagctacaaagatgtaagacccctgcattctccctgtatgggtactgttcgttcactaaaatattatttatgttaacacacactggtttattgttataaatgaatcagttactttttttccagttgatttttgtcttcagaacaatatcttcctatactgttcaggctagcattctactacctctgtgtctcagactggcctcaagttcagaatttgcctacttcacccccaaggttctgggtatgcaggtgtgtgacacggctggctagctgcagtcttagggcccactgtcatttacccgcatagagagtctctggggtcttgtgttttgaaaagcataaagaagactgcactttatttgaggtcagaatgtctacgaacccaggaaaggcctgcctctgtggtgggtggctgagtggctctgtgaacggctggctgaactgcccgcctggggaagcaagcctgggaaagatgctctagtaggcaggcgtggacgcctaggaaattacagtaacatattccctctctctctctctctctctccctccctccctccttccccatccttctcccttcttctctctccctcatcttccctccttccctctctccctctctctccctctctctccctccaccccgctccttttttagagatcatgcatgatgtgatcaagaaggtgaagaagaagggcgagtggaaggtaagtaacaagcagctcgtgacgggaagggtgaggtcatggtgaggagagcaggggtggaagacagcggatgaagcatgtgctgtgcaagtgtaaggaccgaggtcacgtccccacagccgttcagggatggcaggcaggatggtgacctgcttgtgaccccagcactcaggaggttgaggctggctgactgggcgagtggctaagtgcactagcagaatcagtgagttctgggatcactgagaggccccggcccagtaaacaaagtgaggtctattgaagaggacacgtgccatctgtgcatgcatcccctcacatacacatgagcacacacatgcaacattctccctaacctcacacacagaagaaacaacgaaggcagagctggagttgcggggaggtgatagaagtgagttcctggcccgaggatggctggtgcatgagcgtggttcagaagtctcttcctggatatggtgagctggtgagctggctcagcaggcaaaggtcctctgaggtcagcgtcactctggccaggagctagtgggactctcggaacttcctcatgggctgttggaggggctgcactgcccacttggttcagatttccctggagtcaagagcccacacatgcccaggttcactgggcatgggagctgactggccaaggaggactttgaagctcagttctggcgcttctgtttcggttctcccaggttctagaggggaggccatctggtgggaactcgctggcatgtctctctgtcaccctgtcctttaggcaggactttgtagacaccagaattcccagctgcctccgcagatgaagccaaggggctgccatacagcagcagaacctttctggctgggacagtctgtggtgatggctcccacagtcagggcctctctgtgctttatagcatgagggagaagaaaaagcctttttacgctgttcctgtgtgtggggtgagaggacatagcaaagatgaggcaaactctgcaggatagaacacttttgtgcacctagtctgtgcagtctatgtgtgctggtgaatgtagatatcctgatggtagctgtgctgagccccatgaaccaccctgtgtggacactagccagtctcccaggagagcgagttaggacctgagaataccacagtgttggtgctctacatgattctctctctttttttaaaaattatttttatttcatgttcattggggttttgcctgccacatgtctgtgtgaggatgtcagagcctcttactggaactggagttacagacagttgtgagctgccctgtggatgctgaaaattgaacctgggtcctctggaagagcagccagtgccatcactgagccatctctccagcccctgactccctcctctttattgccttttgtgtaaatgcttaggggtattttgatagtttatgacgtcacgtcagtggcagcaaacactgttgtcagacggtgaagttggaggtaaaggtcagtgtctatctgagcataactgtgggccacagggaaggaagactgtctccacactccagagtgctcgcttggaagccagtgagggaagaagggcagacactgcagccctgagctctcctcttccttccaggtgctggtggtggaccagttaagcatgaggatgctgtcctcctgctgcaagatgacagacatcatgaccgagggcatcacaagtgagtatgctctctccaccttcccttgcggcatgcgctactctccctgttcattactgtaccgtgaatttacatacttctagcaacccctgtggtaagacgataagccctgactggagcccgcacagaatgcagtgctgggtgctctgtaagggtatgataaaggaatgccgaatagaagggctaggtggagaaagaagactggggctggagccatggctcagtggttaagagtcttgcagaggatacaggttcagttcccagcacctacattaggggaatctggtgccctctgctggccttcatgggcacaaacccaaagaaagacacacctatatgcatactttaaaaagcaagacgacactctacccagaagaggggggaaacaaaaccaaaatacttaaggaaggaagagacccaaatagctgacatgtatgtgagaagtttccaccttcatatcgatgagggactccgtgtggggttgataagctcagtgaagcgtcggaaactgcagttcccagtgtgatgtcatgccaggccacacagctgctccaaaaagcacttggcaatatttgctagagtttaaggtatgtgtgcatgtggcccagcaggctcagagtcagatgtgtattctgaattaactcaggtatgtgctcagcaaacatgaactggagtgtccacagactgttgctcacaagaggcccacacagaaacagccaaaatacccatcaagtatagaaaggtcagggctgctgatccaatgtggtgggcaaggacatttgctgccaagtctgataacccacttgtgatccctatacccacacagtggaaggagaaaacctacttccatagatttccctccaacccccatgtgcacacatgtgcacacatgtacacacacatacacactaactcagtcaataaacaattagaaaaaaaaagaggagatggttagttggatatgctggcacatggctggaatctcaacactcagcagtcgaggattatcataaattcaagaatggcctgggctatgtagtgaggcttgggttcagcctgggctatgagtgacatgctgtgtataaaaaaaaaagagtagaatgttcatggtacagcatatcttacaacaatggaaacaggcagcctcttactgcccacggttacttcactgagtccaataaacacaagtgccagaaagaaaatggctaaggagatgggttagtcagtaaagtgctggttgtataattatgtgggctagccttgtgtggcagctcacatttataatcccagcactccagaggcagaggcaggaagagctctgaattcaaggccactctggtctatattacctggtctgtgtctgtaaagaaaatttgtaaaccaaagcccccggccttgcttcatcctggagctgttagaagaagtgcagttatatgaacgatgtgtttgcaatgcctattaggggtgcatccctccgtggcctgtggctcagtgtacagagctgccagttgaaccttgaaccatgtgtacctggcaagtgctctacaccatgagctgtgtccccagctcaagagagttggtgacagatgaagccgtcatggaatttgaaaggaattctaggggatcgtttagatgagaagaaactgaaggggcaaagggtctgtcctgacagagtgcagcctctctctgagaacagctcaaaagctcttagtgtagttgggagggcctactattgtaggttccacagtttctaatactgtggtgaagtgaagcaatgggctttatttccagggaacatggtgcttaaagaaggggaagggctctctgtaggttgtgtgtgctagcctgagggcctggccagatagcttctagttctcttaatcactgtgggctgtgtgtctttgtgtagttgtggaggatatcaacaagcgccgagagccactccccagcctggaggccgtgtacctcatcaccccatctgagaaggtaaatccctgagttccccgctcaggctgagactctgggcttaggctctttggcacagagcgagggccagccatttctaggttaagcatgttgtcagaagcagggaaagtggggctcttatgcagggagaagtaaggcatgcattgagcctcaagagatgcagtagcggggcagagtggacagccagagctgggacccagtgcccctctccactgtctagttccctcacgctctccagtagatccacctctaagctttggcggtttatggcttgtggctactcaagtttttccaccttgttcagatcagattcttacaggaccattttcctcctttttgctgatagtttttgccagatgtttggttttgctgttgttttttattttttttaaagatttgtttatttattatatgtaagtacactgtagctgtcttcagacacaccagaagaaggagtcagatctcattacaggtggttgtgagccaccatgtggttgctgggatttgaactcaggacctttggaagagcagtcagtgagtgctcttacccgctgagccaactcgccagccctgtttttatttttgtcaacttgacacaagttaatctgggaaaaggaactttggttttggaaatgccagatcatccaccagatgatctgtaggcaagtctgtagggcacttccttgcttggtgactgatgtgagaggcccagcccagtgtggccagtgccactcctaggcccaagtggtcctgggtagtatgtgctttcaaaaataagctgagcgagagagcaagacagtcagcagtgctcctctgtagcatctgcctaagctcctgcctcaggtgtctgccctgccttccctcagcaatagacagtgatataggactgtgagctgacgtaggcccttccctttccaagttgcttttggtcacagtgtttagctcagcaatagaaaccccaagggcttatttatttatttatttttaaaatcccctggtcttcacatattgccttcactttcaaaatctggtcttcaggtaagtttctgccagaacatccctatgaatcttctcgaaggttctgaacagttttgtgagtccaggttccagtggcactgacactgccattctggagtgaaccacattctggagtaatcttacctttaagtgctcagagctggttgtgactaaacaccagaagtactagagacacacactggaaaccattgttgtagtacaagcagcccaaaaccagtggatttagtcagatttaggttgcactggcttctaaaattgaatttaatgtcccccttcccccctatttacagtctgtccactctctgatcagtgattttaaggacccgccgactgctaaatatcgggctgcgcatgtgttcttcacagactgtaagtaccccatgggctgctcctgctggcccaggttggcatttcttcacagttccatggaggctgagctggggcaggacagcagaagaaatgagcggtactacagttacttaatcttctctcttcagcagatgaacactgtaagacacacacacacatgcacaagtgtatactcacacacatgcacaggtatacaacatacatgtgagtgtatacacacacatacgcacaagcatatattcactcgtgcacaagtgtacacacacacacatacacacacacgttgagtgtatacacacacatgcacaaatgtataacactatcagaaagagaaggagaagtagtagcagttgttgtctttctgatgaaagctagcccaccaggctcctctgggagcagagggcttcctgctgagcacagtttccgggtgctccattacaaggccattcagaattctctggagcccgtgggctgtttctgtgaggtctttggaccataactgttccaatgggctggcccagagttgcctttttgattttgtgctgggttgtgtgtggataagttttccgagtggagcagccacagcgacagagtggtagcctcgccactcttctccctcggggtaacaccccaacccctgctgagactgcagaaaaggaatggaacccctcctggcacctcaagctgtttttccaccaggagcctcctgtgctggctcttggttccatcatcaaatctgtgtgctttcttcctcaccctttctcaacgcctgcttgtgtgctctcctttgcctggaagcagcacctagtctttattggcttgggtagcgcagtcagctgctggctgctgtgttgagggccctgcaggtacttttccatctctggaactcatggacgggatgcaggtattactaggtgcctttttagaatctgagtaaaaataggtgcagtgacatcatggctgttgactgagctggcagatgaatggacggacagacggatggacagaaaccccactgttttttctcattcttgcagcgtgtccagatgccctatttaacgagctggtaaaatcccgagcagccaaagtcatcaagacgctgacggaaatcaacattgcgtttctcccctatgagtcccaggtgcggtctgtttctgtgcggatgtttatttaagggaaatgggctgccatggtgtctgcccgatgatgtcatcccttcacccgcccttactgactgcagtggtctccgtgctgcccaagcaccaccgagcactgcccactcctcttcactgactccttgaataaccaaagtagcttgttcctaaaaggggacgaggaggaagggcagactctagagcacccatctgctgcataggaggctgtttttattggcagttaccccagcttgtcatgtgctgagagcagatggtcacctccatcataagctgttagcacttcatccacccttacccggaggttccaacagcaactccccgtggaaaaaaatataaagcttttatctccacaaaggtaaagctgattgagagaatatatgaaatttatttgagtatgttagagcttatccaaatgttttctcttggcagaaggaaccaaaaaccataggatttgtatgtgttctgtggtattgaaagatatatatggatctttatagatgagctcctaacactgtggggtagcctattgttaggcaggggctggatggagcttgggtggtagagtgcttctctagaaggcgcaaagccagctgcagttgggctttataaactgagtgtggtggcaagcctgtattcctagcacttggaaggtgcgtagaggcaggaggatcaggagttcaaggctgtcctcagttataacaagttagaggtgaagctgggctatatgacaccctgtccaaaaaaaaaaaaaaaaaaaaaaaaaaaaagaaaagaaaagaaaagaaagaaaagaaagaaaagaaaagggaaatagggtggggaggagaggaaagagaaaaagagaggggacaggtacaatgtgaacatcagagctggctcagtgcctttttgcttgccctgaaacctgtctccccctggagagccgaatatgcttacctgcttctctataccccagcatcgcctaagtaaacgcagtccagggttagcacataaaagcattatttttcagaaagcatgagaaagtaggaagtttaaaaatcagtttttaccaggcacaccttttgtcccagcacttgggagacagaggcaggcagatctctgtgagtttgaggccagcctggtctacagagtgagttctaggccagccagggatgtgtagagaaaccctgtctcaaaaataaaactaaataaataatacatacatacatacatacatacatacatacatacatacaaatcacgttttaagttgaacttgttctcaaccctgtaacccagcacttaggattctgaggtcagagaagtacctcaaatctaatacgagcctgggctaagttgtgagtttcaggtcagcctgaaggacagagtaaggccttgtctccatcatcaccaccaccactttcacagggaggtgcaggtagtttaacaagtgagaacttgagagaatcctgagagttggttggcttcatcttaaagagagagtcgaacttccacagccctttacagaaaggggtgggaggaggaggaggaggagagtacttagagcagtttgctggagacaggatatcattaaacctataaaaagctcccttatttgcccacagttgtggcacaatctccagatcatgcgttgtttattgaaagcaaactcagactggcctatgaacacttgcactgctctccagcatcgctcacaggacacgctaggtgcacacaccacaccctaagtaagatcttgggcttcacccttcccttctcgagccttctgctggcagcaaacacctcacctccttgagacccttctcagacctccctcccctgtgagtccaggcatacacatgcacatgcacgcacacccacgtatgcacacccatgtatgcatacacacgtgcacacgtgcgaacacacacagagccatctggggcattctttgcctgctttactctttcctcagctgtttacagttttcaaccccatatagtttatttcagagtgtttaatgtctgtcgtcccctgctatgtgacagactccttgggagcagagatgttttggtcactaacagttgaagtgcttggcactggaataaacaaaagcatgagcaggccaccagggtggcagatggacggatggatggatagacggatagctggatggacagacagacggacattccagctgctcactgataggacttacacccctgcctgctctgtcgctccaggtgtattccctggactccgctgactctttccaaagcttctacagccctcacaaggcgcagatgaagaatccgatactggaacgcctggcagagcagatcgcaaccctgtgtgccaccctgaaggagtatccagctgtgcggtatcgggggtaaggcaccatgctagactggtctgggtggcatcttttgtgtcccacagatacctgaggtcaatccctagaactcatgaaaagatggaaggagagaatcagttcacaactcatgtacacatgtgtgccatgttcatgccctaacacagatcacaaaataataaataaataaatatatatattatcacaatgattttatctgttagcacattcagaaaagaacataatacatatttggttgttgaataattaaaatataaacctccatgccattgcaacgcatatttcctcatttttaatctctttaaaatgttttcaaaccaacctctctttgcagaggttttgaaagtaaagtacaaagtcaggcttggtgggacgcatctgcggttatagcacttgggaagccgaggcagacagatcaggagttccaggttgccctcagctaaaagagagagaatggggtgggggtggcaggtgaataattttctaaagggcagtctttggatttttttctgacaatttatttatttttatgtttattggtgttgtgcctgcatctgtttgagtgagccagatcccctgcactggagttacagatggttgtgagctgcacgtgggtgctgggaatggaacccaggttctctgggagagcagccagtgctcttctaaccatctctccagcctctttctatatatatatatatttgagacaaggtttctctgcgtatccctggctatcctgaaactttctctgtagcccaggctgtcctcaaaactcagaaatctacctgcctctgcttcctaagtgttgggattaaaggtgtgcgccaaaatatccaacactaaatctatctttaaagattcaaagactagggggctggagagatggctcagcagtaagggcactagttgttctccaaagagtctgggttcaattcctgccacccacatagagctcacaacttcctgtaactccagttccagggatctgacaccctcacacagacatccatgcaggcgaaacaccagtgtacataaaaatcaatgaatatttaagaaaaaataaagagatttagttttattatctttataatattataagatacaataaaggtatactgtaaattattacaagatataataaggataataagtattatccttggtggtacgtgggtatgtgtctgtatggtacatgttagtacatgtgcccacagaagccggaagtgtcagattcctctggagctggagttataggcaatcataagccttcctatgtgaatgctgggaattgaacttggatcctctggaatagcaatgtgtgttcctaacctgtaggccatctctatagtctttgggttttatgaagtcattgattcatcacttgctgtgtgccgagtgctgggagactttaagctaaagtcacagcctcgccctcagaagctgcaggtggggggcaggtgctgctggatgcagtacctgtgtagacagcgctcaccgtggcttgggaagccagtgccttcaagcagcagaccaaagtgacatccagagccagagaggcccgtcagcctaggtcagggcgaggctggaggctggtagtgctatgtggcaggccttgaagaatgggttcggtcgcagcagatgggtaagaaagcgtgcaggcatttgcgttgacacttgctgttgctgttggcacaagcaatggctttgggaagtcaaagtgtagtctggaacagtagccatgtaggacaggtttaatttcatgagacctcctgaggggttgggacgggggaaaaaaatcagttttgaagaagatgaactgagctagggtcaaggcaaggagaagcagaagagccaggtcaccaaaggcctgggctgtgatggcagccatggtctgaggagcaagggctctgtgcatgtcaggcccagcagatgtgagaggctcatggctaccattgtgtggctctgagaggctcatggctaccattgtatggctctgagctgcatgcttttgaaggccatggtgggacctgcccttgttttctggactgctgaagcttgggactataggaagaataccagtacgagttaagaatggggcccaggagctgggcagtggtggtgcacgcctttaatcccagcactcgggaggcagaggcaggtggatttctgagtttgaggccagcctggtctacaaagtgagttccaggacagccagggctatacagagaaaccctgtcttgaaaaaacaaacaaacaaacaaaaggaatggggcccaggacatcttcctgacatcataacaggagcagagctatggtggcactaaggtcgtggagtacagccatatcatctaccggaggcaagggggtttgagtggaggaaagattatttctgcttctacatagacaaggagaggaaatgagaaaggtcgtttatgggctgggtcctgtaccaagaatttcatttttctctctaaactacatatataacacagggatgtgtttgtttgtatacttttgagacagtgtctcactatattagggcaagctggccttcagcttgtggtaactctccttcctcagcctcccgagtctcactcaccatgcctcacacacatgggtacagtcttactgtaaaaaccctaatagcaactgtgctcctgccccctccccggccatccggccctgcccggtgttctgcctgcaggtacctgcacttggcacattgtctggtcgcacaggtggctcaccctgtctctttccttgtgtcagggagtacaaggacaatgccttgctggctcagctgatccaggacaagctggatgcctataaagccgacgatccaacaatgggggaggtaaggctggcctgggaccacgagggtctcattctgagtaaacagtatttttgcagcagcccttggcccagcgtggacctgtgctcactgagcatatgtaaggactgcttttcctctctctagtggaatgcccagtgcccctggggcaggctgatacatggctagggcagctagtttgttcctgcttgccagtgctcctggcttcagcctcgaatgtccaggaaaccccccagtagcaaaatagcaaaggtagcaagtggagagtggtgaggtcctcgcaccacagtctggtgtctgcatggagtccatgtgtgcacagttgtgtgcacttctaacacacacataggtttatgtaaccagcactggcatggagattcagagctgggggtagggcccagctcagcagcaaagtaaatgtttacccagcatgtgtgagaccctcactgattcctagacgcagagctgttccatcagcgctgtggacttgcaatcggacccctctgtgctgggcactccagacagctggtcaccggatgtgtaatgagctggtgctctgttgcaacgatcctgtggccccagcttcacagtggtggtagcaggccctcagtaaactggttcctcgcctggcattgtgggtgctcctgggaagcagcaggcacagtgccctttgctcttggtgggcttgctccccagagcgctctctcttcctgctgcctgtaacacagaggctccgctacttggtttgacttggatggcttttgaagcctctccctatttcttgccagggtcccgacaaggcacggtcccagctcctgatcctggatcgtggctttgaccccagctcccctgtgctccatgaactgacattccaggctatgagttatgacctgctgcctatcgaaaatgatgtttacaagtaaggattaagtgacaggggtcacaggactagctctgtggacaacggagttcctctgattaagaaaaaaggatgttttgtggttttttaaaaatgttttctcattttgtatgtatatatagcatgcatggatgtcatgtgtgaaatgtgtgtgtgtgtgtgtgtgtgtgtgcgcgcgtgcgtgagcacaagagtagacccataattgatattggctgtcattttttaaatcactttctgccttattgaggcaaagtctttaaccgcatgtagagtttgccagtttcccccaggcaccttgtctctgcatccctagttctagattccagatggctgccatccctgccccacatttatgtgggctctgggcatctaagctcctgtcttcatcaaacttccgaggcaagtgcttcatccactgagccttttctccagtcccccacaagcatggttttaatataaggaaaaatacgagcactgatagattccatttcttagataagcccatgaggtctctgtgggctttccctatccatgtatcattcctacatgcctgccaacaggacagaacactaagtctttctttcatagctcacatcacttcaattcattgcttcttagatgtgttgacaggttggttttctgtgtgtcttattcacacgttcttaattacagaccacaaaaaatgactgctgtaaaatatttcaacagagttcctgaacgttctgtgcagtggagctgctttcttctttataaaaagattacccacctgtaaccttggcattcaggagcctaagacaggagggtcatgagtttgaagccaggatggacaacttagtgtgagaccctgtctcacaacaaagaatggctttatgtgaaggttctggggctggagagatggctcagtggttaagcaaggccctgactttgatttccagcacacacatggtaacaaacaactactttaaactctagatgcaggggatctgatgccctcttctggcctccacagacaccaggcatacacggggtgcatggacacaaataaagcctcgtacacatcaaataaaataaatgcaactttgtaaaaatgaaggttccactggttatgggattgcacttctttaatgccagcactcaggtggcagcggtaggagcatctccaacggttcaaggccagcctgacctacaacagcaagttcctacttggttatgtatagccaggactacatacaggcacccactctcaattaatttactaattaattgatactaaaaatgaagattctgaaaatatttgtggttgtcagcccctgtctcttggttctggggttctggcctcctctgagcactcacaattccatgtgtaataataagctgtgaacacaaatggctggaaagcttttaggcaccttacatttgcagatggaggggcaactatgtaactatgtaactgtagactcacatagaactgccactgggcctggactccctctcccatcccccaacagacccaggctctgaagggtgaaagcacagctacaagttgctggctttgagctttctccttgcccagggaactggtcattttgtgctgttccagataaactgggcagcctgacaggtggctggtgttatgagccacgcctgggatcacctggcagtcgagagaacaggtgttatccttaggaaccagaggagacagacatctgggtgtggaagtgcacacctgtaatcccagcattcaaggggtggaggcaggagggtcaagagttcaagaccgtcgtagctatttatggagtctgaagctagcctgagatacttgaaatcctgtcttatgggggcaaaggtcatgccatgaggacgccgggcctatccaagtcctgtctcctctaggtatgagaccagcggcattggagaggcgcgggtgaaggaggtgctactggatgaggacgatgacctgtggattgcgctgcgacacaagcacatcgcagaggtgtcccagtaagaactctgctgcccctttcccagggtgggcccttaaccctgggctgagagtgaccatgcacactcagcaacctggggagtgagctcatcgccttggcaacattgcccacatgctagccaagacagacaggtccctcctgttccttgaatgtgtgcttctccagtttcaccagcttaaaaaaaatccaccctttactgggcagtgatgatacacatcttaatcccagcagtcaggaagcagaggcaggagggtctcagagttgcaggacagcctggtctacagagagagttccaggacagccagggctacacagagaaatgctgtttcaaaaaaaaagaagaagaagaaaagaaaaagaaaggaaaacaggaaggaacgaaggaaggaaggagggggagagagagagagagaaagagaaagctattgatccatgggatcggatgggatgtagcttagaagtaaggccctttcctgaccttgacaaggtcctggattcaaccaccagctctgcaaaaatagtgctttagtaggggtgggtttgttctgttgtggtgtttgtttgtttgtttttgagacagagtttctctgtttagtcctggatgactacaaactcaaagatcccccccacctctgttgggattaaaggcctgtgctaccacaactaatattggagtaggaatactggcccatatttcctgtcgttaaatttatttatcatctagttatatattacatatatttgtattttcccaacacaaaacaggagtgtttcaatgtgtgtgtttttagaaaggaagaaagaaactaaacacagtggacagtcccatgctgtccctttgccctggaatcatgtgacacacactgtcctggagatcagtggtttagagtgtcagtcagaactatatgttaaacgcatacctcagtgggaagagaatcaccacttagtcccaaggaaggctccacatggcttcagtggtctctgcagagagccctgggcactgtgttgagcatggctgcctccccccactttgcagggaagtcacccggtctctgaaggacttttcctctagcaagaggatgaacactggcgagaaggtaagcctgctgtgccacaggtcctggggtcagtgaggggtgccagtgcccaggcatcctcaggggtcagctcctcttctgtgtcctaccagggagtgggcagggccatagttcttccttcactaaactgtcaggctttgtttttgctttaagattgctacctggggcatgggtgtgtggctcagtgatagaatgcttgctgtccacacagaccttgagtttgatccccaacacgacagacgggtcctccctggaaccgcatgactttcagtgtcacaaagaactgctttctaatatctagagggttaagatttaccgtttaggagcataactgatcttaagccagaagaatcatagacttttttagcttggaactcataagcagggagctcctgagcttcccccggcctcctttactaatctcttaggaatgcccggcccagccaggtgcactgacgcttacctttcatctcaatcaggatggcccagcagctagcggcccttgctgccaagcgtgatgacttgagttcagttcccggaactcacatgttaggagaaaatgactcctgcaggctgtcccccgagacttctctaagtgggctgtggcattcgtgcatgtgtattttttttttaaagatttatttatttattatatgtaagtacactgtagctgtcctcagatactccagaagagggcatcagatttcattatggatggttgtgagccaccatgtggttgctgggatttgaactcgggaccttcggaagagcagtcggcgctcttaaccactgagccatctcgccagcccgcatgtgtattttcatacacacacataattaattaaaatataatttaaagagctggagagatgactcagagattaagaacaattactgttcttgcagaggacccaagttctgttcccaaacccatattggctcaccactgcctgtaactccagctccaggggatctgattccttcttccaacctccacagacacctgcattcaattgtgctcagtgcacacacaaccgtataattgaatacatcttttaagtccgtgagtggacacttgtaaagtctaatgtagctgctctcctgccatgtgcctccagcttcacaagttaatctgaagcaagttcagattaactgcctagaaggctaagccaggaggaccacagggctagtgacactgtacctccttccttgtagaccaccatgcgggacctgtcccagatgctgaagaaaatgccccagtaccagaaggagctcagcaaggtatggagaccccagcccagactgtctgactcagaagtgtgggacagctcacaccctgctgccccaggcaattcatgaaaatcttcagagcctagattcagttctcattggggaaagaagggaagggagactgcttcctactgctttcttctctttcctctatctctctcttttcttctttttcctcccttgttgttgaccggaggccccagttcctcactacacaggccttagctggtgcaggctgtcctcacctagctgctggcctccctcagaggtgctgagctgagaggggaccaggaggcatcagggcttctggtcctgaccataaaggtgcaaggacattacttgcctgtaaggtattgaccaggtgctgcggccaccctgctgagcggctccagccgctcctctcctaaaggaccttgacctcctctcctgcaggccgtggtttaccccactctcccagctaatgaaacctttattcccgctagtactggagtcctctgtgaggacactcagggtcctgggactcggtggctgtcctctgtactgattcttgtgcttcccctagtattcgactcacctgcaccttgctgaagactgcatgaagcattaccaaggcactgtagacaaactctgccgcgtggagcaggtacgatttcttcctttcctttttgcatggcaaaacttctgcccgacctattcacctcactgaatcttaacctctgaccttgaacatcttacagaatcgtaggatctagagaagggagagcccatgaccccgggttgtctcagctgtggggccagtgtggagccgctttggtgggtagggccaagatagttctggagtgctgtgcagtttggatcttgcatgcctggctctttccaaaggctctgtttttcctggagtgacagacctgaccgtggcagggttggctggtgtttatgctctgatgtgttttgatcccgctatgaccagaccagcttcaaagcccgggctgcagcagcagggcatgagtcttccagcttttctaacctcaggcctggatgggactctgccctcactggtacttggtgtccctgctcccagcactgatgtcattgtcaccttgtgtagagtaccaaaaccataactgtggcaaaactgctaagctgtgtggcaactgtcttgttgttgctttcaatccccttggattgatctcaagagatcagactcagggctgcggacgaggccctcgaacaccgagcaggttctgaggggaggaagaagatactgaaagatttcagggtgccaggcttggtggctcaagcctaggtatttataaatcagacagggtttctctgtgtagccctggctgtcctagaactcactctgtagaccaggctggcctggaactcagaaatctgcctgcctctgcctcctaagtgctgggattaaaggcatgtgccaccactgcccagctgcagatcaaatatttacattacaaaattacattagcaaaattacagttatgaagtagcaacaaaatgattctatggtttgggggccaccacaacatgaggaactgtattaaagggtcgcagcgttaggaaggttgagaactgctgtgctagtcagtaagaagcaagttcagattaactgcctagaaggctgagccaggaggaccataggttttaggccatcctggcagcttagtgacagcccatcacacttagcaccaccacagccatggtagagccttagcgggaagtctcatattccaggaagcatcaactcaggctcagtgtgagctgagagtctcacccttggcttgcagtaagaggctcagtggagacgtgcatgctctgtccagtagtgttggctgggtcggaagggaagcagccctccctctgaaagtaccctgcttctcaggcaccctcctcaacctcacagcttctccccaagagctcagcctgccaaagcaggagctggctagtccactgtttctcaacctgtgggtcacaagccctctggtggctgaacaagcctttcccaggggtcacatcagacctttacatcacgattcataacagtagcaaaatcacagttatgaaggagcaacaaaatagctttatggttgggggtcaccacaacatgaggaactgtgttaaagggtcatggtgttaggaaggttgccacccactgtgctctcagattaattttggaagcacaggttgttttgtcttttgaaagtgatttaaaaccataagtgttaagctggctgtagtgcggcagacctgtaatccaatcctagcactgaggaggcaggagccggtggacttctgtggacttgaggccagcctggtctatataatgcattctgggacagccagggctattttgtgagactctgtctctaaaaactacccaaaaaattgaattaattgcattttagtgagcttagagagtgtgctctagggctggcaaaatggctcagcaggcttgcagccaagcctgacaacccgagtttaatccctggaacatgtgtgaaggaagaagagaaccaactccccaagttgtcctctgacttccaatgtgtatcatgcatacacactaacacaataaataaatgtatgtgtgtgttttctttttttttcaattcactttctatcctaatatcattcccttctactcccaataccccctcacacagatcctttccccatttccccctttctctaagaagggggagtcccccccaggcatcaccctcaccccctgtgtatttttttttttttagtgagactgggtgtgatagctcacactttaatcctagcattcagaagggagaggcaggaggatctcagaggttgaggctagcctgggctatatatagtgtgtcccaggccagccagagctacatggtgaccctatctcaaaaacaaaacaaaaacaaattgggggagtgggtggtgctagtttcttcctgctggagcacacatctgctggagctgttgagaggactgggagggaagtgtgccttcctcagaccatgtcagaatgtgaggtcaccatttgggtaaactcttggggtactgataggaagaggagtcccagaaacccttctaggagtcccagagaaagcagtggctgtgtcagatctaaagtcagtgctctggcttgctgagtgcagtacgctgcccgtggggtatgtgacacctgccctggctgcccatggggtgagtggcacccaccctggctgcccatggggtaactgagtggcactctctatgggtgtccgtggagtgggtggcacacaccatggctgtgttcatttttgtcttctcacctcagtttcctgtcacctttctgtcctccacctcccaggcttgggagtccttccttgtttctcctcagcctgtggaaagctatagggagattaaaaccagaggtgaagctcagaagagttaaaccttagtgtgcctttcatgccaggagagccagggtggaaagaatccagccatgcaggggcccttgagatgcccaagttttcatgaatgggaagcgaaccctgagtccctcagctgggccgtgtatgtcacaggtggggtgccctggcatccacctacagtctgatcaggtactgtgcctgctttggaaggactctcagggctctcgtgcctggccatcttaggattctatgtcagcccgatgctgcaggagacttgttcacagcctgctcccacaacaccacaaagtcaggcatttgtagggcgtgaacttcctgagaactgtcaccttcccagacttgtcacagacataggaccagcaaggtgtgttttctacaggacctggcaatgggcacagatgctgagggggaaaaaatcaaggaccccatgagagccattgtccccatcctgctggatgcgaacgtcagcacttacgacaaaatccgtatcatccttctctacatcttcctgaagaacggtaggagccggcgggggtgaggaggaccagaggggcggggtgggggggagcagagagcgaacagtgcagatgccaaccagcagccctgggaagggggagaacgtgaggccaaggggcctgctcggcagccccaagtgcacaggcagcaggtgacacagaggagccacccagctctcccagccagcttgctagcactcagcctgccagatgcctctaggttgcatcattagtagtagagacctttcaacatctgacattcagcctttgggaggtagaggcaggggtattaggagttcaaggccaaccttagctacaaaagtaagtttaaggccagtttagactacatgagaccctgtctaaaacaaaccaacaaaacaaaattcccccaaacaaacaacaataaaaacaaaacaagccgggcagtggtggtacatgcctttaatcctagcacttgggaggcagaggcaggcagacttctgagttcgaggccagcctggtctagagtgagttccaggacagccagggctacacagagaaaccctgtctcaagcccccccaaaattgtttttacccatgtcgttgtacaaaaaactaggtaaggagtctttctcatctcgtaggcagggactgccgggatgccaggtggacggaacagactgggagggcaggcagccgtggtcagcacagggtggctccaggagagcggaaggctcttctgaccccaccatagatgtagccgaggaggagaagggaggccgaggttctgcacatggcggtggaaatggcagggcttgggtacggtgaccaggagccttgtttttcaggtatcactgaggagaacctaaacaaactcatccagcacgctcagatacccccagaggacagcgagatcatcaccaacatggctcacctcggcgtgcccatcgtcacggatgtaaggccaggccacaggcagggagactgtgggagggaggctggcatactgtatcttcatcacgttcatgattgacagcccattatgatacagcggtatacaacatcaagaaaggagagagagggagtgggagggaaggcgagagagggagagagaaggagaatgagtcggaatagggaggaaggacagtgaaacagttcaaagtcaggaatttgacatatccaggagtcacatggtcactaaagctgagctgtctctgaacttatccaaaacgggtcaccccaacttcccctgctgtatatcctgtgtgacacagactcagcatctcaggtaaggatggcaacattgtcaaaggcgctcttttgctctgcgtctttggcagtggggtgaccgagagcaaaatacagcagcctgttcagaaggtcaggtcagggctacatagtgtgctgtgagagagcaggcagactatctgattcagtgccttgaaccccagatagaaaaatccccatgttattacttccccttggaaacaggctgcccaccgggcagagttcacaaagccaattggggtcttttttcttctttctttcttttttttttggttttttttttgaagacagggtttccctgtgtagccctggctgtcctggaattcactctatagaccaggctggtttcgaactcagaaatccgcctgccttttcctcccaagtgctgggattaaaggcgtgcgccaccactgcctggctccaactggtgtctctaggagggactaggttccactgacctgaccagtgacctgcagctggcagggtttggtgtgttcatacctgggtcacaaaaggctcaaaacagtagaactgattcgtttaaaactgcccatgctgctacacagagaaactctgtctcaaagaatcaaaaaacaaaacaaaccctagaaaacccagacttgctcaagtctcccttgtttcagagtttcttaaagaggtatatttcagggctactctgagcagaacctctcctttattactctttgccatgttaattctgaggagggtccttgagagaattcctagaagtcactgagacccaggatggcccctgactggcatctaacctgatgggtgcttgctttcagtccacactacgccgccgaagcaaaccggagcggaaggagcgtatcagtgagcagacctaccagctctcacgatggaccccgatcattaaagacattatggaggtcagtttggggttcagcagcagggtccagggctgctcttcagtaggtggtccaagttccaacacccctgttctcaggtagcagtgacacactatgattttgttcctgtgaggatgagtccctggtcctctgtggctctgtcaatctctgaggactcatgaacacccatgggactggttgtagtttggggtactattgctgtgatgaaacaccaggaccaaaagtaacttgaagagggggggcatcactgtttcatcatcaaaggcattcagggcaagagctcatacagggatggaacctggagcaggagctgatgcagaggccatggaggagtgctgcttactggcttgctcctcgtggcttgctcagcctacttccttatagcaaccaggcccaccagcccagtaacctgggccctcctacatcgttcactaaataagataatgctccagaggcttacctacaacctgatccgaaggagtcgagttccctcctctcatgtcaagtaaaactagccaggaaagacagatacatggagacctcaagatccatttacccactgttccagtctcagggggttagccccatgctttggaggtgcctctgtggttagtatccagaagagccaggctcgtgtcagtgtctcttaattaggatttccattgctgtgaagagataccatgtccaagacaacttttataaaggacaacgtttaactggggctggcttacagtttctgaggttcagtccattatcatcatggcaggaagcatggcagcgtccagacagacatggggctggagaagaagctgtgagttctacatcttgatctgaaggcagccaggaagagtctctctaagcctgtctacacagtgacacacttcctccaacaaggccacattcatttcaacaaggccacacctcctaatactgccatttcccataaggcaagcatattccccaccacagtcagcatgccatgttcagacgaggaacatgcacagactctactggggttgacgtggtccttgtggatggcatctcagccagatgtgaagggtctcccaagaggctacagcctgcccacccacctccccacactgcacacagacctgggctctgggcctcaagctagcccctgggaatagtcatgtctctacttcctggtcctgcgtcccttccatctctacaaggtcccacaatgtatggtgcctcacatgtctgaccacttaacctcacagagcctgttgcattctggtcagcaatactatttacatatagctttgctgtccagtttgaggccatcttttgtttttgagattgggtcttaagtccagactggccttgaacttctgaccttcattctaccctaagtattggattcaaagcatataccaccatgccagttatgcagtacagggatcaattcaggtcttcatatatgctacacaagtactctaccaactgagtgacatcccctggggttatcttctaacagggtgattctgtcactttgtccatggtgtagagcctcacactaagctgcagcaccatgtttcttggctgtcagggatagaggcagtgggctttgcagcagctctgtggactcactcctatccctcagcatcactgcaggagccactagcttcttaaggttggatgagacaatacacccaacttctgcacttgataggcgaacacaatgggagtccagagaacagtgctttgccttgtatctgcgttagctcaggtattgctaccaaattatatgctagaatagtatttatgtagcatgagtcagcatcctatttttaaaacctacaaagccaaaggatgagtggctatgcaacacgcaggaaccaattgctgtctcagttgcaggactgaggaagcaaccctctactgcattgccccccggcttttctgcccctcctccctgctccccaaggagacctgcagaggtttctcacgttgctcctaagtggagtgtggatttccagtcgacaggagatagccggaatccatccactagacaattagccccttgacaaactgcaggggtggctcagagccggttgtcaccaggctgacctgtcaggaatgtggtgggcagagtacatgtttactcctggtgggttacacagtggagaacatggcagagacaagggaaatgaacaccttgtctgacagagtgactcatgggcccaggcagtccggcagcctgctacagaaggagtgtcctagccccctgtccatgctgggtccccggcagtggcagtaggcacaggaggaggcctgctacagatgtggtcactgcctgacattttgatttagctcctgccagccctttcaggcacatggtggcctgacctctctctctcctctctaggacactatcgaagacaagctggatacaaagcactacccatacatctctacccgctcgtccgcgtccttcagcaccactgctgtgaggtagggcaaagtgggggaagcagggggcactgcctgtgaggctgtgaggttatctggctatgagtggcacgtgccatttgaaccttcccacgtcatccattatggcgaaggtgcagcaggcccagactcacagcaggccatgtggcttgccctttggttcccagccttcaagaactcattcccttttctttcatgcatctgcctcagccaccaatccctgctcatcctggaacaagccaggcctacttgtacctcagaatctctgcatttacccaccctaaacacacacacacacacacacacaccactttaactgcagccaggtaagctgtacaccccacccctctaatctgtaggtctttattcagtgctcctcttcagtcttctctagctacctgttgagtcatggagcccattgttcatagcagttctcttcatagcctgaggtgggtggcccaggtgcctgccagctgacagtcattcagactgtgtgtcctgggaactggaggctgagctgggagcctggaggctgtcagaggctgctgacagtcacctgcttcccagggttgacttcttttgtttgttttgtttggtttgaggggtctttatttatttgctttgttgggttttgttttctttttatttttcgagaacacagggtttctctgtgtagccctgcataacctggaactcactctgtagaccaggctggccttaaacacgcagggatcacctgcttgtgcctcccagtgctgggactaaatgtgttcagcactgctgcctggcttgtttagttggttttttgttttaaaaagacttatttatttaagtacactgtagctgtcttcagacaccccagaagagggcatcagatctcattacagatggttgtgagccaccatgtggttgctgggatttgaactcaggaccttcagaggaacagtcagtactcttaactgttgaaccatctcttcagccctagttttgttttgttttgtttttgagacaggatctctttgtgtagctctgtctgtcctggaactcactctgctgaccagcctgaccttgaactcacagagatccaccagtgatatctgccttccaaggctgggatttaaggtgtgctccaccatgaccagaaacgctctagggtgccagccgctgtcccttttcaatggcttgtctctggcttttcttctttctgtcttcaccattggcctttacctggtcatgggccagaggtctgcagtggctctgtggcattggcattccctgggatggaacaagccattgccagctgtggaataaagtacagcctccaagggctgcacttgctgggccagttgggcccaggagagactggtagtgtcccactgcatccggggctgtcgtgatgaagcagggtggagcgttctggtgtccagagaggacttgcttcctctctgtcatgtttttcatcgtcctggcttgtgtctgaggctaggtccctactgaggaagtgcagggacagagggaggtttgttactgaaggctgagctgctccttacctcctggtaatgcctgagcagtgccctgcggccctggctctggcccatggtggtcagcatttcccatcctgttagattgtgacttgttagtgagcaagtgctgtctgtccctggggatatagtaccagaaagcctggcttccacaagcttctttacatgtgagcagtgtgcaaacttgatactcagtgatgcagagtcccaggcaagcccagacatctgggtgagaaccatccaggcaaagctgctgagaggagcctgggtatttatgagagtggcagtcacagctcaggcccctgcagtgcagcactgatgagcatgggagcagcgccatgccgctgtgtgaggctccgggtaacaagccacctgtatctgctctctctccctcagtgcccgctatggacattggcacaagaataaggcccccggggagtaccgcagcggtccccgcctcattattttcatccttgggggtgtgagcctgaatgagatgcgctgtgcttacgaagtgacccaggccaacggcaagtgggaagtgctgataggtaagcaaagcatgtgttctgctgtggcctcactgctccttcactccatcccatgcttcctggcacttccatcttagggcctccctcaccccagcaccacttggccccggatagcagaagccagggctgtctgccacactgtgtctcttgctgaaggacagcattttggaatggaaagagcctgggcatagagtcccaaatccatacaatgacactgcccgagtgcagtcacttaagaaagagaggctctctccaagccatatcattaccttgcctgatggcagggctgtcactactgaccacctcaccctctgttggaggtagacagacagcgtgcgtgtccatggatgctgctgacccagtggtcggaagggtcagaagggtgtcctacccaggccctgaccttctgggctgccacaccctttcttgtatttcctgttcacttccaaaagagcataagccactgggggaagatggtctgtgtggcagacggcacggcctgctccctgtctccagaatcatctgcagcatctagggctgacagacaatcaagggagagaaatctgggttcaattgggttcatgtgcactgctagagaggcggccctcagctgcccagccagaaaggcttccctcagcgcacaggcgcctgtccacactcccaggtgaggtcatctcagcgagtgtcacttctgtctatccaatttggatgacccagtcccgggactccccaagctgtccaagcaagcaggctccatagggcagtaagattacagtttctgggtttgcccagacaggcatgagggggtcatcacctttgcacaactacatgggaagactgcacacccctccccagctcccacaggcagccacgattcatttccctgcttgtttttctgtctgtgacataggccccatgagtgttccctgctcactgcctgcatatgtgttgcatgcatgtgttagaggactctgagctcaaacacagcttccctggacagtagctgtcacagccaagctttgggtgtgacccttccttttcccctttggaccttccttaaggttccttgtgcagggggagggtggagacccagggacagagagctgcccatgtgggttcatggaggggcttctgaaagcagccaccatccgccgtgtgcctcacgtgttttgtgcatgcctgcatacgtgtgtgcatgtgcccgtgcatgcttcgcctctcacgcctctccagctttgggcactggggcctccgttggcgtgtccggggcgcctcgttcagccggcctctattctcccacaggttctactcacattctcactcccaccaaattcctcatggacctgagacaccccgacttcagggagtcctctagggtatcttttgaggatcaggctccaacaatggagtgagagccaaagagacaaagtaaaagcagcttattccagaaagaaactcttccactccgaagggctttctttgatgatcctgtcactctctttctttctttttctctttttactttatcatttctttgatttcctttttccaagaaaatgcttgcggttcttaatgccaattgaaaatgtgtccagtgccaccttcacaccctgggctccacccgccagctcactcccgccctgggtgaacgctgtgcagtcagtggggttaggccaagtgacagtagctatgtgactactcctcaaagaggagcctagggatagggctgtctgaggcctggtacccaagccagctgcccaggatgaaatgcaggctcctacagggtatgcaagcctgagagtgaggccagcggacattcaggatggccacaggtaaaggccgacactagggagatgtccacagcacctgagggtgagaggggaataacaggggatagaggaggctccgggccagtggatggcagagggacaggtacagtgctgagggatgaccacccttcagctgctgtaggttccgtgatagcactgctcaccacaccccacgctgcagaaactgcactctcttgttctgcttttactccaggccagcagggtaggctggtgtcccagccactcagcaggcagaggcaggtccaaggcccacctgggctacagagtgagttcaagaccagcctgggcaatttaacaagcctgcgtctcaaaataaaaagtaaaaacgtagctggagagatggctcagtggttaagagcacatagtgctcttggagaagccccagattctgttcccagcacccacatccagccactcacaacctcctgtaaccctggctccagagtatccaatgcctctctgtgggcacctgcattcatgagtgcacactcacactcttatgcataattaaaataaaattaaagcatttttaaaaagtaaaaagagggctgggatgtgccttagtggtagacaggttgcttggcatgaggagtgacccttgcaagaggaggaagaagggaagacacctctctctctctctctctctctctctctctctctctctctctctctctctctcctcttgataagctctacagccctcaggggaaatctgttcttgataccccaaagcttgatgctcaggagcatccaggctgtcagtctgtctgtctgtctgtcagtgacttaatagaccctcctcactcctgctctgtttctatcctttaagcatgttgggaactcggtgttagtaattcctcagtatttttccctgttttattatgggctctgaaaatgtcctttcaacataagttgatgtgtgacccagtgagctagtaagttggagtgtccggtaagccacagtgagagagccctggctactgcacccaagcacctttgaatcagtctgcatttagtaggtcatgtgcaggcctggagccatgcttacatacctctagcctcctgtgcatctcggggcatggctcttctgaagcttactagataccaccagaagctggcttgcttagtgtggttcccatgccgcaagaagaaatagtaggccactccatttacccccacttcccccagcagagaggtatcacctccagggcaatagctgtgagccaagaaatggactaggccatggcctggacctcagctccatcctccctgtgctcctcctcctctgagaagcacggtcaataggcagtaaagcatagaggtgagcttctgtccaccaaggccagaggagacagaggcactcaggtctcaagttcaaagccagcctagtgtacacagtgtgtctaaaacctaagtaaactaacagggcacggtgacacacgactttaatctgcctcttagaaggcagaggcaggcagatctatgcaagtttgaggccagcctggtgtacacaagtttgagaatagccagaccctgtcacaaagataaataaataaaatttaaaatatatatgtcttgaggggagcagggagatgaagcaatggcaaaccacagagccctaaatcagtgaggccagaggcaaatgaaagccattcacctgtcctgttgtgaccttccaggtgacagagtcagagtagtgcagacccttagagagtcatagttttggagcttacctttaagatgaagcccagacacaagggagagtggccccagcaagtatgtgttctggaagacagtgctgtttgtgtcctcctagctcctctcttcaggcactagtgcagctgtgggttaggggaaacttgatcgttgaagaagcctaattctctcaagcctcatgtgtcatccctctgcatggccctgagtgaagtctgataattagaatttcacattttcaccttgtgatgcaggtaagtagtgccaggcatgaggggatggtcaggaagccatcagaacaaatgagagagttgtagaaatggcttggtggttagaagcactggctgctcttccagaggatctgggttctattcctagtaccctcacaggatcctgtcacaggggatccaatgccctcttctggcctcgttgagcaccagggtcagatgtggtgcactgaaacgttgaaggtaaaacactcacatatataaaatgaaagttgtttttaaaaaggaacaaaaacaagtgaaagaactctcaggctagattagacctattgagtgcacatacttatgagggttgttttgtttttcaagacagtatctctgtgtatctgtcctggaactagctctgtagaccaggctagtttcaaactcacaaagatccacctgcctctggctctgcctctggctctgcctctgccttttgagtgctgggattaaaggcgtgtgcccccatcacccccatcaacctttcacttgtctggtttttgtgtgtgcttatatagagaatattttgctgtgttcctggttgggctgttggttctgacatacaagcatcccttgtatgtccctctgataaggctggcttctttcccagaaggctccagggagctcttaatccagagagccaccccctaagtctttgaagaatgagatggtatttgagtgtgcctcgacttcatctttggcggcactgccggcatttcacaatcacccagctgcgtggcctggaagagcctcaacattcttgaggacaaggccagtgtagccaatcttttggagactaacatgagatcaattgtaaaatacaacttaggggctcgcctcgctcactttgaggtgtggatggtactgagttccttgtgcagtactgagacagttcaggttgttggacgtcaggacctggctatgggtgacctggatcaagggaactagccttctactaagcgaggcctcaccggctcaacaagatttagttctacacttgtccttcagtaaagactaggaataagatagtatcagaaaattctagatctagctccccgactttctgaatgtacatgtgaaaagtgaggagggcctttgaaacaagcctctgatcaaaggagcccctttaaattcaccttccagatcaaaacttccagtttcctggaccagtttccagcactgggagcagggcattctctcaccagtatgttccttgttgactttaggaagccctaggccactcctcactggatccagagccccagcatggagggagtggaggacagccctccctctggcactagctcatgctgatgacccttcacttgggaaggcctttggcctgccctaggactcctaggaagactagctagctcactgcagtgagtgtgcttgagcagacgggcagaataaaatgctcctgactacacatccactctgtgtaaggagctgcacctctgcagattaatggaacaatccttaaagcccagggccagtacagagaacattcagggcagcatgcttgttgaccccagggcatagccagggatggacttctggaccagaacagtgaatgcagagacaggacctggaagagcccctcagattgctgctcttctgctggtccacactgaccaggaagcttctaggtcactaagcaggtggtgtcgggggcgcggggagcaaggcaccttgttcctgcccttggaacagaagtctggaatgggatctcggctccccactcccacagaggcctactgcttgcaggtcccttccccagggaggcacattttcaagaacagacctttcctttggctctcctgttccaccaggaccctgctttgcacccactgccacgcgcatgcacgcctcatgctcacaccaccgtcaccttcattctgtttgatcaagtccatgcccaaaccacttggtccatgcatcattttagtgcacctacatctctatggaaaaggccttcatttaaaattttatttgtattttttttaacctttgctctagaagtatatctgattccattagcttaaacttttgcaagcatttctaatctcttacaatacaagtctcttacaatacggtctccacaaggtaaggcctcaggtccccgccctttccctcacacctgaggtcccccactgtgccagcaccaacatgccggctcccagaggttagtgggtccccatgccctgccaggcaccattctctctacatagagacacctccaagcctctgcccttctcagccactgtctcttgccatatttgaaatttctctacctggcttcaccttaacttcaagagagaatgaagcagtcacccatcacctgacagatggctctgggtcatcctgggaccctgcgtgagcctaaatgcttccttagcctagttgacggggacccaagggttccatccccaaacccttcccagcttccactggacccagaccagggttggggggatggagagtcggggacagaagcctcaggccaccacaggtgagtgagctcactgtcttctctgccttcccaggatccacgcacattctcaccccacagaaactgctggacacgctgaagaagctgaataaaacagatgaagaaataagcagttaaaaaataagctgccccccaaaaccccggctcccttcccaaaatgctctgcagctcccccgtgcgccacctcggttactctgctgcctccccagccctgcacgccctggccaccccgttgccgtgctgagttcttctcctgtgcgatgacaccccatcttgtcctctgaaaagcaagagagtaatgtgttgttttttaaaaatgagcatcttctgtatgtatcccacagtaagttcacatgcaagctccacactgcagaagcgtcagaactccggaccgagtgaattctcccttatttatgaccccgtgacctgtatatagccctgtcccgcgtgtgcacattgcttgaatatggaaaggtagatgtgtgggtgtctctccaagcttggttggattcatttctgtccttgttggtgtttgttccccggataggacatgctgagggagtgatgttctcgctagcccctgctcgctccctgttctcagcgatgagcagacacctctggaggctggcgtggaacgagcctcctctttgcacctatgggggaggcttagggtgtccacaggaagccagtctgagtgccggccagtgtggtctccagagcctggcactgctttccctgatctgtgtccatactgttgtaacaagttaagcccttcaggctaaatcagcctgcctagtgccctcggagcctccagagttaggtctgaccagccccctgcttgaacacagtttggatagaggccaagggtcaggggtgggctggaagctgtgagtttggcactctggtcaagggtgctttgctgtaggagctaggcctgaagaatgggggccctgctgcttagtcagagtcccctcagtttaagatacttcatcaatcttaagtttgtgtagtgtacagtcatgtgtcattgtggttgtatgaaaaggatcattttattctttgtattagtcatcactgtataaaacatagctagctataaagcagaaattccagaagccgatgctggaaggatggtctccaccctcaggacgcagcagccccctgagcatgctgctcaccctgctgctgtagtcgtgaaacaaagacagtggaagtcacaaaaatgtccccagcccagtccccgcccctccctcccgcagatttgtacgtattactgtgtctcgtgctgtcttcgcaaacgtggtgtacgcctgccgcaggtgtcctgtgcccttctccctccctgactctagagtctctcttctccttagttctcaggcctctcccctgctcctctccagtgaaccttttcccttaggactgaaccacactagcaccggttgatttcttctgtagcgcttctcccatcccttcctccggtcaagcaatgctcatgcttcaggatcttgtttgtcgaacatgtggggtttcctttatgttatttatataaataatttctcaaatggatatttaaaaaaaagctagtctgtcttgaaacttgttaacttgaaactcttgaatctcagtgtttaaagtatggaagcacaaccgtgtaccgctctgtaccgtcctgtactgcagcatttgagtctaataaagacgtcagctctcactcatggtgcctgggcccactgcagagctggtttgactttgaggactatagaggaggccagccaccccacagctggggcttggaggcttctggatccagggggttgtggcttgcattgcatctgtacctatctcccatctggggtacaaagcttggctctagcctcaggcagaaaaaagatgctgcctcggcgatgggcatccatctttagtcccaggacttgggaggcagaggcagggggatctctcgagttcaaccagtcaggcctacataattagttacaggcctagccaaggcaacatagggagacactgtctcaaatgaatgaataaataaaaataaataaggacctgccttgacatgaagagcttcttttcaaccgtctagaatgcctctgccacaggcgggtctctgtcaaggccagcctggtgtacagattgagttataggacagccagagaaaccctgtcttgtaaaacataaaaaacctagttagtgctggagagatggctcagcagttaggagcgcttctgaggactggagtttgatgcccacaggataagaagtcacaacggcctataactccagttccaagaatctgactccctcttctggcgtccttgggaactacatgtagatatacacaacattttgtttgtttgttttttggggggttttgtttgtttgtttgtttttgttttttcaagacagggtttctctgtatagccctggctgtcctggagctcactttgtagactaggctggcctcgaactcagaaatccgcctgcctctgcctcccgagtgctgggattaaaggcgtgtgccaccacgcccagctacatttttttttaagtcaactaaacctctgtaaagcctcagctctcttgtcacagtaacagaaaatgacactttcactgcaggaaggaatgtatcaactcgaggttactttgtagattttgcacctgtccccaaaatttttgcccaggggagtgtgttggggagcagaggaaagtaacatatacacacctttcttaggtcctaaagacaaaccaaagtttgattccaccaaaggttcccctggagaaccaatgagagtttactgggctcggagcttgagtgagggcgacaactgggagcctggggaagcccaaagctgtgtcgctggagatttgatgtctacagagatggtgttccctccttcttcttccccaacctacatataccagccccctcccccaaaccctgaagccacatgcagttagggcagaactgcatacagctggttgggaggggcagctggatgcacaggtgggcccagggactgcccccatcccttcctaaaagggaaggtcaacagtgaacaagctcagctgaagtgagcttcgcaatcccagttgaacacatgtggatggttgcaaatgtggcttgtagaacatcccactcagctcctccaagattccctttctaagcagactatggtgaagacagccatggagcaatcacgccaggcctctcatagataggtgttaggtgggtcccctgccactacagatgaggaagctggggctcggagggatgcaggctttggtcaagctcactcctgggagacttcagataactgggccaatgtcaggtcatcagaatgcctggaatgggatccaacacagggacttgaattctatttttaaaaaatatttattttatgtatatgagtacactatggctgtcctcagaatcactagaagaaggcatcagattccactgcagatggttgtgaacctccatgtggttgctgggaatcgatttcacaacctctggaagagcagctatgctcttaacctctaagccatctctccagctgcggacttgaattctaaactgagtaagaaagcagcataaataccacttattccttctccctcgcactgtgggagtggacctctagcctctttctgctgtttaggcttttgttcacttgttccttgttctgttttattatcactgtacttgtgtgtgtgcagtgatgtgcatgcagaggtcagagaacaacttttcttcttccactgttctgggcattacaggcagttttacccagtgagccatattgctggcccatgttttcttattttgagacagactcgagctaagttgctcaaactgaccttgaacttgtgttgtgcccccaccccccaccccactcaaagaagctgagactacaggtattcatggccatgctgggctatcctcgtcttttctgacatctattggcccaggctttctttattcctctccaccgtaattccaccaaacagcaaagaaccatactgtcctctgtaccatactgtcctctgtaccatactgtcctctgtaccatactgtcctctgtaccatactgtcctctggaagccttagctcttagtgtcccagagctcagaggaaacctggggccgctcctccaaaagctgtagcacaccttcagtgtggaagatactgcagcaggccaaagcacagtcaaagcagaaactgctagcccagtagccctggatcccaaaccataagctgtggctcccatggagtcggaattacaggggctgagagaatctggcagacccgagcggcatcccctctagggctttgcatatgatagatattcccttctgtgacatcctcaaagtgacaccaagtgtccagtcatcactgagtatagtgatggtccgtccccaagaaagcctggggaccaaagagcagacaccatcatgaaccaaaaaaagcccagtgtgcctggtatgatggctcagtgctgagaggctggagacgcgaggagccagctagagcagctgccagcaggatgcccactggctcccatcccatacctgtatgctgacccctgactccaggggacaagatcaaagcttcagaagaacttcatctacttgggatggcactggacagattgatccctgccactaagctttaaagatctcccaagctgggcctggtggcgcacacctttaatcccagcacttgggaggcaaagacaggcgaatttctgagttcaagaccagcctggtctacagagtaagttccaggacagctagggttaaactgagaaaccctgtctcgaaaaacaaatacacacacacacacacacacacacacacacacacacacaagtaaagatctcccgagaccccagcatgggagcctccaatacaaaatgtgtggctgtgccaccaaagaattggcaggttggtctaggcagaggcacacactagcctgggggctcagcaattgtttctgattatcccaaagtcccaaaggctaaggtcctttatgattctaatttatttccatttgagggaaggaaaggtcttcctggaacccaaacttgtactcaagagcctggtatcctgctctgaaaaagctaggcctaggccggacacaggatcctgtcaggaagaggacagtagccctttaaaacccagcctcactgttgctatgtatggaaacaacttccttagcaactacctggcttcttaaaggggactttaaaaagtggttgccatcagccatggctccaaaaaagaagccaaacaaaggaggcaaggagatgcagggcaagaagatagggggcaagaaggatgccagtgggaccaagactccagagttggccatggtggaggagctgaaggaattctaccacaaacagatccaagacctggaggacaggctggcccggtgggtggccagcagggaagctagtgctaccaggccaaatgcacacaggttcagataagggccttagacctgggctctggccaggccctatccttccctgcttcatttacctcaagtaaccaggtaaccctgcgagtgctgagagggtaaggggattcccagagctcggggagcacactgctaaatcccaagtaacaccccacccccactctggtccacccccacaggacggcactgtaaacattagaaaagtgtagtttaattggtggaagaaattgaaaatggttttccctggtgacccaggaggacacctcattccctagtcccttatgccaagaccctggtcttgtttctccaggctgggtctgtttccctaagtatttgttttgttttagagacaggatattactctttagcccaggatagcctcaaactcatgttgatctacctgcctcagcctcccaagtgctgaaattataagtgtggaccattataggttcccaaatgggaactaaggaaggggattttcctactcgtgccactccctcttggggctaggttcctttgtgacagatagcagggaggggtccttcttagcatttagagatactatttgcttattgttttccctactttaatactagctttagggctggggagaaggctcagtggcacttgcccctcatcaccaggactcccaaggtagaggaatagaaccaattcctgcaggctgtcctctgacctctgctgcgcacacatacgcatgtacacacataatcaataaatcagacacaacaaaaatgtctgtaagaatatagtttctgccaggcgtggtggtgcatgcctttaatcccagcactcaggaggcagaggcaggtggatttctgagttcggggccagcctagtctacaaagtgagttctaggacagccaggactatacagagaaaccttgtcttgaacatcccctcccccaaaagaatatatcatctaacctgggcatggtggcacatgcctacagtctcagaaggtttgttctaagttccagaaggaaaggaacttcgcctggactatagggtaagacctcaaaagaacaagcctcaaaaaaacaagcaacacaaaggtaacttgctgacaggaagcacctgccccagtcccaaagtgtaacacttaaataggaaagtaagtgggcagggaaatggcccagtgacacctgccagtcaaacgtgaggactagaatttggatccccaacactcatacaaataagtgtagtgcccacctgcagtctcagtgcatgggatgtggaaataaaaggtccccctggagcagtgtttctcaacctgtgggccttgacacccccagactaccagaaagtgcagatactcacagtctgtagcagtagcaggattagagctatgaagtggcaatgaaagcaatgttatggttggggatcaccatggcaggagaaactacgtattaaagaatacagtgttaggaaggttaacaatcactgctctagagcaggctaactagctagactggtgaactcgggagctctgggtttaattatatatgggttcaatgtataaagaagagaacctctatctccttatctataaaatgggtataagacaacaaggcagtggaagctcatatggttgatgctgagaaaaatcacagctggcgctgagcagttgtgtacccaggcagggccgtgcgtctctgcttaacaccatcccacaagaaaggcacacacggggaactggggaaatcaccccaggaagaagaggcagcaggatgacagtcctgacctttgacacctcttatggcagactgcctcctctccacacaaaggcacccataccctgaaacaccttgtacgcactactcattcaaaaggtttatcaagaaatccttacaaataaagcaattctccaaatgcttcagtaatcttgtttgaaaccagtaaataaggccctcttaaaatttacaaacgatgcctggagaaatggctcagcagttaagagcactgactgctcttctagaggtccttttttttgttgtttttttgtttgtttgttttgtttttcgagaaggaggtttctctgtgtagccctggctgtcctggaactcactctgtggaccaggctggcctcgaactcagagatctgcctacctctgcttcctgattgctgggatcaaaggcgtgtaccaccacgcccagcttcttctagaggccctgagttcatggtggctcacgaccatctgtaatggaatccagtgccctcttctggtgtgtctgcagacagctacagtgtgctcacatactcaggtgtccttcaccctgaccttgatgggggtggggctctctgccgctcaccagctacccagcctagccaaactgttacaccttagatttacttacacacacacctttaaaacagaaagacagtctgaatgctgagcacaggcctccaggcgtgaagcacaatggggggtgcagactatgggaaacttcaggtggccccttatggaagaagggtctgggagagcaggccctggcttgaccctgcgtctctgccctgacccaccccaggtatcagcggaaatgggatgaactggctgtgcgggagaagctgttccatcaggagttcgagcagctggccaacaacaagaaggagattgtggccttcctcaagcgcacgctgaaccagaaggtggatgagatcacagaccttaatgaccagctgcagagcctggaggtggccaaggatatggagaaggacgcgttcgaggcccaactggcccaggtgcgccatgaattccaggaaatcaaggaccagctcaccacagagaacatcgccctcggtgagggggccaggggacctatgggcacacactaaaggcagcaaggcccaaatccacagctgtcactggctgcggcggggcctcacctgggaactagggataccacagctcccttgggtaataagagctgtatgccacttcaaacactatctgccttaattgtccttgcattcccaaggccagagatgctctccctcccgcagctcatagatgaggaaatgcttcaaaacaatggaggattttatctatgccacccatctgaaaggggaggttgcgacttgtctgcccagggtcagctgctgctgtctcggtcactcttatgtggggaggtttcaaaggggactttctgaggaggatctgagcaaggtttgctgagcttagagtatgtggtaaggcagaaatgcagtggctgtgcggggccagccatggcacgtgcagaccagtcctgttggggaaggtggcgaggtaagacaagaagaaagtttacgacctcagaggggtgtgggtcaaggctctcagcagccgctcctcaccagccttgtggcccctgatgggcagggatcaagctgagttccctggaagaattccggctgcagaaagaggagctcacggagaagtacttggcactggaggagcagctccataggcaggagggcgagtacaaggaatacgtgtacaacctggagaagaagtctgtgctggacaaggacaggtgggcaggccggggccacacggctctcctcagctttctagaagggagccatggactccacagcctctgtcccccagaaccctgactgggatgtatgggggtggggatgaaagtgcccaagctggcactggacactccctgccttcttgtcacttcttgttatggtgtttatttaataggtaagaatgtttcaatgggccaggcagtggtggtgcacacctttaatcccagcacttgggtggcagaggcaggtggatttctgagttcgaggccagcctggtctacagagtgagttccaggacagctggagctacacagagaaaccctgtctggaaaaaaaacaaaacaaaacaaacaaaaagaataagtttttgccgggcggtggtggcacatgcctttaatcctagctcttaggaggcagaggcaggcagatttctgggttcaaggccagtctggtctacagagtgagttctaggacagccaaggctatacagaaaaaccctgtcttgaaaaaaaaaaacctagaatgtttcaatggttcaaatttcaaaggtccagagattctttggggaagagtctgggtaccctgggactaccgccccaaaataagggataccaagacttatacccatctacttgactcccaaccccaccctcctggcaaggctgaggaaagagattatccagcgtgtgaacctggtggccacagagttccgaaagatggccaccaaccagatgtgggagacgaccaggcgggccatcctagagaacaacagcgtgactctgcagctaaacaaggtgtccaagcatggtgtgcagctgctgcaggagaatgagcagctcaagggcacccagaacaagctgtgccaacagctggagatgctggagaacacccaagagatcatggccagaaagaacatagggcataagaaggtaggaccaccatgccatgccctcctcgtgtgacctatgccagaaccaagtcatgagtgggaagagtttacagtgaggtcccaggctttcctcattggggtgctggccctagctctggagtctatttgccccataactaagtggagcccacctcctgcctagctgttgtccagaggtggtgttggcctgcctgtatgtgggagcaagccctatgtcatatcttcaaaagtgagctaggggtgggctagggtcccacgatgggtctgtgacacctgcccacccctgcagattatcctcatgctgaccgagaagtgccgccaacagagaaagggcacagaggagacggagcaactgcgcctcctgctgtcccaactggagcagaacttccagaatgtgcagagggacaaccagaccctgaggcgagccggagctgggtggaagtcagcctggggatgcctttgcctagagcctcagggtttggactgtcagacaagttgaagcctggatttagaaaggcttcacagaaaaggcggggcacagggaagaggtggtgcctgcctgccccaagcacaaagatggggcaagctgcatgctgttttgtcccggagcaggagtgagaaagaccagctggaagcgcaactgaaggagaagcaggcagaggcaaatcggctacaggaggagctgaccaaggaacagaaaattcgggcaaaccttaaaacagtcctgatccaggcgacctccatgctacaggacattgtgcacgtaagcaaacagtgtgggagataccaagaggctgccagggcaaatcgtagagggcctctttctggagaggctgatggccagactccttttctcattctcgatctaaatgagttgggtctaatcatagcagggactaaggagggggaagcaggaggattccaaattcaagacctgactggagctatagaatgagaaggccatagtgggcatctcaagtgtcttataaaatatagaggtgtggcagtgaacacctttaatccctgggaggcagtggcagacaaaggaagaacagaagattccattcaaagctcataagaagccgggcgtggtggcgcacgcctttaatcccagcactggggaggcagaggcaggtggatttctgagttcgaggctggcctggtctacagagtgagttccaggacagccagggctatacagagaaaccctgtctctaaaaacaaacaaacaaaaaaaaaaaaaacaaaacaaaaaaaaaaaacctccaaagagagggcttcaagcctcagtcttcccagcctgataacttgtgttccaccacaaaccaggtgcactgagaaagcaggccctggagcgtctcatgtggaggtgggtgggtatctgggcccctgtggtgatttaacccacctcacatcataccaacagatgcaaacagaggcggaggacggcgactttgatgtggtgttccaactgcagcgcaaggagctgctgcagcaactgctggtattgctcagctcaggggtggttttgaaaacacagccggacatgggttcccaccaggacaagcagccccagggcctatccaaagaaaggtgagcagatagccctgtgggggcctcagcagaccctggctctccaatatttttcctcttgtggggatggaggggatgaccctggatccctctccacagccaacgcatcacccagacatccaaggaaggggctgtttctctgctgcagcagctctcg

SEQ ID NO: 168 - DNA, 3413 bp, Mus musculus
gaggagcatcggagcccgaagactcgaagaacgccatggcccccattggcctcaaggcggtggtcggagagaagatcatgcatgatgtgatcaagaaggtgaagaagaagggcgagtggaaggtgctggtggtggaccagttaagcatgaggatgctgtcctcctgctgcaagatgacagacatcatgaccgagggcatcacaattgtggaggatatcaacaagcgccgagagccactccccagcctggaggccgtgtacctcatcaccccatctgagaagtctgtccactctctgatcagtgattttaaggacccgccgactgctaaatatcgggctgcgcatgtgttcttcacagactcgtgtccagatgccctatttaacgagctggtaaaatcccgagcagccaaagtcatcaagacgctgacggaaatcaacattgcgtttctcccctatgagtcccaggtgtattccctggactccgctgactctttccaaagcttctacagccctcacaaggcgcagatgaagaatccgatactggaacgcctggcagagcagatcgcaaccctgtgtgccaccctgaaggagtatccagctgtgcggtatcggggggagtacaaggacaatgccttgctggctcagctgatccaggacaagctggatgcctataaagccgacgatccaacaatgggggagggtcccgacaaggcacggtcccagctcctgatcctggatcgtggctttgaccccagctcccctgtgctccatgaactgacattccaggctatgagttatgacctgctgcctatcgaaaatgatgtttacaagtatgagaccagcggcattggagaggcgcgggtgaaggaggtgctactggatgaggacgatgacctgtggattgcgctgcgacacaagcacatcgcagaggtgtcccaggaagtcacccggtctctgaaggacttttcctctagcaagaggatgaacactggcgagaagaccaccatgcgggacctgtcccagatgctgaagaaaatgccccagtaccagaaggagctcagcaagtattcgactcacctgcaccttgctgaagactgcatgaagcattaccaaggcactgtagacaaactctgccgcgtggagcaggacctggcaatgggcacagatgctgagggggaaaaaatcaaggaccccatgagagccattgtccccatcctgctggatgcgaacgtcagcacttacgacaaaatccgtatcatccttctctacatcttcctgaagaacggtatcactgaggagaacctaaacaaactcatccagcacgctcagatacccccagaggacagcgagatcatcaccaacatggctcacctcggcgtgcccatcgtcacggattccacactacgccgccgaagcaaaccggagcggaaggagcgtatcagtgagcagacctaccagctctcacgatggaccccgatcattaaagacattatggaggacactatcgaagacaagctggatacaaagcactacccatacatctctacccgctcgtccgcgtccttcagcaccactgctgtgagtgcccgctatggacattggcacaagaataaggcccccggggagtaccgcagcggtccccgcctcattattttcatccttgggggtgtgagcctgaatgagatgcgctgtgcttacgaagtgacccaggccaacggcaagtgggaagtgctgataggatccacgcacattctcaccccacagaaactgctggacacgctgaagaagctgaataaaacagatgaagaaataagcagttaaaaaataagctgccccccaaaaccccggctcccttcccaaaatgctctgcagctcccccgtgcgccacctcggttactctgctgcctccccagccctgcacgccctggccaccccgttgccgtgctgagttcttctcctgtgcgatgacaccccatcttgtcctctgaaaagcaagagagtaatgtgttgttttttaaaaatgagcatcttctgtatgtatcccacagtaagttcacatgcaagctccacactgcagaagcgtcagaactccggaccgagtgaattctcccttatttatgaccccgtgacctgtatatagccctgtcccgcgtgtgcacattgcttgaatatggaaaggtagatgtgtgggtgtctctccaagcttggttggattcatttctgtccttgttggtgtttgttccccggataggacatgctgagggagtgatgttctcgctagcccctgctcgctccctgttctcagcgatgagcagacacctctggaggctggcgtggaacgagcctcctctttgcacctatgggggaggcttagggtgtccacaggaagccagtctgagtgccggccagtgtggtctccagagcctggcactgctttccctgatctgtgtccatactgttgtaacaagttaagcccttcaggctaaatcagcctgcctagtgccctcggagcctccagagttaggtctgaccagccccctgcttgaacacagtttggatagaggccaagggtcaggggtgggctggaagctgtgagtttggcactctggtcaagggtgctttgctgtaggagctaggcctgaagaatgggggccctgctgcttagtcagagtcccctcagtttaagatacttcatcaatcttaagtttgtgtagtgtacagtcatgtgtcattgtggttgtatgaaaaggatcattttattctttgtattagtcatcactgtataaaacatagctagctataaagcagaaattccagaagccgatgctggaaggatggtctccaccctcaggacgcagcagccccctgagcatgctgctcaccctgctgctgtagtcgtgaaacaaagacagtggaagtcacaaaaatgtccccagcccagtccccgcccctccctcccgcagatttgtacgtattactgtgtctcgtgctgtcttcgcaaacgtggtgtacgcctgccgcaggtgtcctgtgcccttctccctccctgactctagagtctctcttctccttagttctcaggcctctcccctgctcctctccagtgaaccttttcccttaggactgaaccacactagcaccggttgatttcttctgtagcgcttctcccatcccttcctccggtcaagcaatgctcatgcttcaggatcttgtttgtcgaacatgtggggtttcctttatgttatttatataaataatttctcaaatggatatttaaaaaaaagctagtctgtcttgaaacttgttaacttgaaactcttgaatctcagtgtttaaagtatggaagcacaaccgtgtaccgctctgtaccgtcctgtactgcagcatttgagtctaataaagacgtcagctctc

SEQ ID NO: 169 - protein, 603 aa, Mus musculus
GASEPEDSKNAMAPIGLKAVVGEKIMHDVIKKVKKKGEWKVLVVDQLSMRMLSSCCKMTDIMTEGITIVEDINKRREPLPSLEAVYLITPSEKSVHSLISDFKDPPTAKYRAAHVFFTDSCPDALFNELVKSRAAKVIKTLTEINIAFLPYESQVYSLDSADSFQSFYSPHKAQMKNPIRLAEQIATLCATLKEYPAVRYRGEYKDNALLAQLIQDKLDAYKADDPTMGEGPDKARSQLLILDRGFDPSSPVLHELTFQAMSYDLLPIENDVYKYETSGIGEARVKEVLLDEDDDLWIALRHKHIAEVSQEVTRSLKDFSSSKRMNTGEKTTMRDLSQMLKKMPQYQKELSKYSTHLHLAEDCMKHYQGTVDKLCRVEQDLAMGTDAEGEKIKDPMRAIVPILLDANVSTYDKIRIILLYIFLKNGITEENLNKLIQHAQIPPEDSEIITNMAHLGVPIVTDSTLRRRSKPERKERISEQTYQLSRWTPIIKDIMEDTIEDKLDTKHYPYISTRSSASFSTTAVSARYGHWHKNKAPGEYRSGPRLIIFILGGVSLNEMRCAYEVTQANGKWEVLIGSTHILTPQKLLDTLKKLNKTDEEISS

SEQ ID NO: 170 - DNA, 100445 bp, Homo sapiens
  misc_feature (1)...(100445): n = A,T,C or G
gtcagtgaatagctagcttttgtatttttcccagagacaggattttgccatgttgcccagtctggtctcaaactcctgggctcaagcgatcctcctacctcagcctcacaaagtactgggattacaagtataagccaccacacctggccaacactctcattttgtgttccacattgattttcatgagtaatttattattttcttcttcttttttttttgagacagagtctcactctgttgcttaggctggagtacagtgatgcagtctcagctcactgcagcctcaacctccctggctcacactatcctcccaccttagcagactcccaagtagctgggactacaggcatgtgccaccatgtctggctaatttttgtattttttgtagacatgaggtttcgccattttgcccaggctagtctcaaactcctgagctcaagtgattctcccacctcagcctctcaaagtgctgcgattacaggtctgagccacctcgaccagttgagttatttgcttctctttgttagggaagcaagagcctaggacagccagagtgacaccattttaaattcagctccatcctgaaactaacaaagcacatttcttgctggtcatgacccatagtcatgggatgtttatagtttggatgtaccaatactcataacaatatatgctttcaagataattatagttatgctttgatgtactcacacactaaaatgttaaggatagtttaaatcaagagagtaataaattttgtcatgctgtctgctcacccgcacgtagacacaggcttggcttagcttttacgtagacaagaccccttataagaaataacttaaacaaagacagggcattcttcctcttgctttctggggacaccctcctgactgtaacagagtagctttcttttttcttttcttttcttttattcattgacatggagtctcgctcttgctgcccaggctggagtacgacggtgctatctcgactcactgcaacctccacctcctgggttcaagcgattcttctgcctcagcctcttgcgtagctgggattacaggcacatgccaccatgcccggctaacttttgtatttttattagagacagggtttcaccatgttggccaggctgatctcaaactcctgactttaagtgatccacccaccttggcctccctaagtgctgggattacaggtgtgagccaccaagcccagcccagagtagcttttaataaactacctcttctcattgcactctgcaacatgtcttgaattccttcctgggtgacatgcaagaaccctctcttagggtccgggttgagactcttttccagtaacattatcacatcgattgctgaaaacccagtattacaaagatataataccacagaaagcaaagttgtagagcttaatgttgaaattgtgtactgtttccagctagctgttttcacactgttcacccaaaggtgaatataattgtgtttccctccaaagtttgaaatattcagctgggctgggcatggtggctcatacctgtaatcctagcactttgggaggccgaagcaggtggatcacccgaggtcaagagttcgagaccagcctggccaacatggtgaaaccccgtctctagtaaaaatacaaaaattagccaggcgtggtggcgggcgcctataatcccagctacgcaaagaggctgaagcaggagaatcgcttgaaccttgggggcagaggttgcagtgagctgagatcataccgcttctctccagcctgggcaaaagagcaaaactctgtctcaaaaaaaaaaaaaaagaaaaagaaaaaaagaaaaaaatatatatatatatatatttggctgggcacagtggctcacacccataagctcagcactttgggaggctaaggcaggaggattgcttaaggccaggggtccaagaccagcctgggcaacatagtgagaccctgtctgtataaaaaatacaaaaaaatggccgggcatggtggctcacgcctgtaatctcagcactttgggaggccgaggtgggcggatcacaaggtcaggagtttgaaaccagcctgaccaacatgatgaaaccccatctctactaaaaatataaaaattagccaggtgtggtggtttgcgcctgtaattccagctacttaggagactgaggcaggagaatcgcttgaacacaggaggtggaagttgcagtgagctgaggtcgcgccattgcactccagcctgtgtgacagagcgagactccgtctcaaaaaaaaaaattaactgggtatgatggcatgcacctatagtcccagttacccaggaggctgaggtgggaggatcgcttgaccccaggagtttgaggttgcagtcagctatgatcatgccattgcactcaagcctgggcaacagagtgagatcctgtctcaaaaaaaaaaagataaagtaaaaattttaaatattctatcatgctcctgtaaatgcagtgtggtacacaagggtgcatctatgcatagtttgggaagcatgggtctagtctttttttaaagatgttttatttattatttttaattgacaaataataattttttttttagattgagtctcgctttgttgcccaggctggagtgcagtggcacaatctcagctcactgcaacctctgccacccaggttcaagtgattcttcagcctcagcctcccaagtagttgggattacaggcatgtgccaccaagccaggctaatttttgtttgtttgtttgtttgttttttgagatgaagtctcactctgttgcccaggctggagtgcagtggtgcaatctcggctcattgcaacttctgcttctgggttcaagtgagtctccagcctcagccttctgagcaactgggactacaggcatgtgccaccatgcccaggtaattttgtatttttagtagagacggggtttcaccatattggtcaacctggtcttgaactcctgacctcaagtgatccacccgcctcggcctcccaaaatgctgggattacaggcatgagccacctcgcctggcctatttatactctttttaaaaaaattggatttgggccagatgcggtggctggtcccacacggtggatcatgcctgtaatcccagcactttgggaggctgaggtgggtggatcacttgaggtcagaagtttgagaccagcctggccaacatggtgaaaccccatctttaccaaaaatacaaaaattagccaggcatggtggtgggtgcctgtaatcccagctacttgggaggctgaggcaggagaatcgcttgaacctgggaggcggagtttgcagtgagccaagatcacgccactgcactccagcctgggcagcagagtaagactctgcctcaagaaaaaaaaaaaaggaaacaaatgtttaaaatagtttttaaataatcataaagatattcagatagcaaactacatggatatttcaccaaaaatttcaaaacttctctgacctgcggtaaacatatgaatacatttttggaataatggcactatagcaccaatgtatacgaatcctaaatgaaaatataaagtttgacctgggcannnnnnnnnnnnnnnnnnnncagcctggccaacatagtgaaacccccatctctactaaaaatacaaaaattagccgggtgtcatggcacacgcctgtaatcctagctactcaggtagctgaggtatgagaattgcttgagtctaggaggcagaggttgcagtgagccaagattatgccactgcactccaacctggaccacagagcaagactccatctcaaaagataaataaataaataaacaaacaaacaaacaaaaattggatttgaacccctttctcttctcagcctccaggctcagctgaaatgccaaaacatatatgaacaaaacagtttccccagttggaatgaaaactctttcctctgggatttgacaattatttatttatttatttatttatttatttattttttagacagggtctcattctgtctcccaggctggagcaccatgatgcaaccttggctcactggagcctcgacctccagggctcaagtgatcctcccacctcagcctcccagttagctgggattacatgcatgcaccatcatgcccagctaatttttgtatttttagtgaagatgggatttcaacatgttgcccaggctggtctcgaactcccgggctcaagcaactcatctgcctcagcctcccaaagtgctgggattataggcatgagccaccatgcccagccttgataataatttaatctgttgaaaggtatgaatttttctgtgatacccaagatgtaaaaaatgccatatttctttcttttttaattggataaaacctgctttaagcccccacttctaatgtctggcttttttcccccagtgactcctctttgttcctgggcttgtaccaggactcaagggcttacacagtctgggcaaaattgagctgcccacatcagccactctcagaagcttccactacagggcttaccaatccaagaaaaagaggctggccctactggctatatgcactgccccagagcctggctaagcagaaggaccccctctgtggccctagagactgaagtcctagtgcttggtgcccaggcatttacaccatccccacccctagtccaaagccctgctcaccaggggactttatatgagaggaggagcatcagtgcctctctgggcatctgctgctccttcttcttgcccttgggggaatccgacctctcactttgggaggaaggattccagttccttagagtttacatgcaggtagcgcggggatgaatgtggtcctcatatgtgttctgtttgggcagtgtggtgttatcatcttttaaaatgcagggcacatgttctcaggatttcctgggctgtgttacaggttaaaaaaaaaaaaaatccattgctggcctggcgcagtggctcatgcctgaaatcccagcactttgggaagccgaggcgggaggatcagttgaggtcaggagtttgagaccagcctagccaaccaacatggtgaaaccctgactctactgaaaatacaaaaattagccaggtggcacacacctgtaatcccagctactcgggaggctgaggcaggagaatcggttgaacccgggaggcagagcttgcagtgagtagagatcatgcttctgcactccagcctgggcgacagagtgagactctgactcaaaaaaaaaaaaaaaaaaatccattgcaacacctaaacattgggagatgttgcataatttctacattctagaccctcagttgctgcagggaaaccactgactggagctaagcaagcactactcctctgggcaagtcatgtgctctgcagctggctactatctgtggtattacattaccctggcctctgcggtcccttgaagttgaggccctctcctgggcttttgaaaacaaagcctttttgatactgcagtgtggcctcaaactcaaaaacggttcactcttgagtgcaaggatgtctcaaacttaagtactccaggcccagctgctctttgtagatgtatgcatggtggtgggggtgacagcgacagaaacaattacttttcattcttgccaatgaatctagcagcaaataagcgggacacagactgaactctccataacccatacctatctatttagcagtgatttaattcagcctaatgatgtgtcatttttaagaaggatattaatagctaacattcacttgagccttaccaggttcccagtcctggataaagtaccttataaatattatcttgttgaattctttagaaactgctcctaaaggagtgtcgcagaatcaaacggcccagaggctaggaggaggggatgtgggtgaacacagaacaccgcagctgatgatgcagcttaaaagcagaagggagggaggtgcagcccgaggctgtcggagaagcggcccagactggccccagggctctgcaacaggctccagttgtgcagggaggggacaagcttgtgataccgcgtgaaggactcaggaggtccggtggaggggtggcctctctcccgctggttggctccattgctatttctgtctcctcgttctcggtctctccaggccgctccctctccatctgtcctgatcgccagcctctcccccgctcctctccgcagcggtcggcccacctggagcactccccgccgccacgtgacccgtgcgtaaatcgcagtactcttcccacccctgcgctgggccagcacccggctctgcggaggctgcaggccgcgcatgcgcagctgtggacgcacctgcgcgcccgctggctggtgccgccgaccaaccccgcgcatcctgcggctgctaccccggctggccctggcgctgggaccgggtcgggggcgcggacccgcctgggtccaaactcccgagggtgctgattctctttgctgatactctcccaacgagctgtccacacagccaaacctcaccttaggtctgggcactggagctgcaccctgggcgctcgacgttctcccctggtcatcaggaagtcagagtcctggctcagccgttagagctgtgtgaccttggacaagtgacttgatctctctgcgccccaggaacgtggagataataatagcaccgacctcatagggcagtagtgagaatccagtgaaaattcatgagagctttttttgcacagtgcctggcatgtatcaaactcccagtaaatgcaaattaagaatacagagcaaagggtagtattgtgtgatagctgagggagtattttactctttttttctttctttctttgagagggagtctccctctgtcgcccagattggagtgcagtggcgccatctcggctcactgcgagctccgcctcccaggttcccgccattctcctgcctcagcctcccgagtagctgggactacaggcgcctaccaccacgcccggctaattttttgtatttttagtagagacggggtttcactgtgttagccaggatggtctcgatttcctgaccttgtgatctgcccgcctcggcctcccaaagtgctggaattacaggcgtgagccaccatgcctggccgtattttaccctttcaagtggatcattttgctggcttctcagtcaccctgggagagaggcctggaagttttatttgtccccgtttcacagatggggacacaaggctcaaagatgtcaagaggtctccaaccaggtcttggatgccaaatcagcgctcccaacctgaattcctgggtggattcacagtctgtcaccccgctctatcttccaatcatgctactttaaaaaaacatccattctgatttttgtcatccccagtgaacatctcaggtacacatctgcaggaaaggcttttttttgttttgtttttttttttttttttggtccttccttctacagaaaataagaagctactatatattatttgctgtgacctttgagaaggtccctgaacacggatcccaggccactaagaagtcctggatcctggcatccaggcctaccctgggggctcttcctccagccctacccctcaggctttctcctctctagtcacaatgtcccttctctgttcctggaagagccaaactcctttctgccgctgggtctttgtacctactgtatatctgcctagacactctcccaggtccctcttaccaccgttttcccatctcaggaagccagctctgactgtaccccagccagtccactgggccaggtgccttgctatccactcttacagccccttctccatctgcttcagcacttgtcagaacagtcactcaatgctgtaacaccttgtttcctgtctgtccctcagctagaataccagctccttgaggacagaaattgtctccatcttacccacagcacatggcccagactttggccgcactcaataaacgcttgttgacccactgactggatgagtgacaagaggagcccttggccattcctactccttagctgctaaggaattttccagcttcaaatttatattttcatggcagatacagaaactgtggagtctctgctgatatgtgccagctggcgaaggaggaagcatgtggcattaccagtgcatcctaggtctccccatgtttacacactatctcctcctccaaatacacacaggggctatcaatatgtttcctgggcaaaaggcaaggcccagacatagagagttgacacattaacgcctcctctctctctgaacccatctgaaggttctgttgggggtagattggggtggtggtgagaagatggtcaaatctgcttgacttggggctggcgactgaagtaggacatgtagcctcttgtcctggctcagccaccactggcttctgtgactttggaaaattcctccttagttctcagcaggttttttgttttttgttttttgtttttgctcagtataagataatggttcagaattcagatcctagaattggatctttcctttgtcatttactaataaagcacttatccactctgaatctcaattcttcatctgtaaaatattattatgcatcttaataatatgaagattaaaaacctagctcaaatgtattccaaatatttaatgaatgttcactgatttttactactactagctctcttattcttttttatttttaattggctcaatttgtgttactttgaagccaaaagcaagccctcccccatatttcaaaagtagtatctgagaccatcctggccaacatagtgaaaccccgtctctactaaaaatacaaaaaattggccaggcgatggtggcgggcgcctgtaatcccagctactctgaggctgaggcaggagaatcacttgaacctgggaggcggaggttgcagtgagccaagatcgagccactgaactccagcctgggcgaaagtgcgagactctgcctcaaaaaaaaaaaaaaaaaaaaaaaaaaaaaaagaaaagaaaagaaaaaagaaaaagaaaagcagtatctcctattaacaaagaaagttgagcaaaaactgacctgggaccgctttaataaatacggactccaggaaggagatactgagaccagagtcggtcccacagtatattcgtatcagatttggggcttagaaacttctaaactctgagcgcccataagcaagatgagattctgccttgtacatggtcgtagctccaggggacagaataacggcttacacataaaagtgacagaatactgaacattagctaacggatgctacgctgcctgaaggtaagtctagtgctatttccaatatctccgagacttggtttttccaccggaaaatggagattaaaaataatgcccataggtatgagctaagaggagtgtaaacaaaacaaaataaaaagcaatgcccagtgattggaggatttgatgagatgatgcccgcgaggtgcttggcacggagtttgacacaagaactcagtgttggtgaatgcacgaatgcaggtacccagcgacagggaggtgctgtgggtggattcaccctggcttcgctgcggctgggagtgggcgctgctagtaagagatctcgcctccaagctccttccgtgggcaggaaaaaacggaagctcccagaaagaggaaagacaggacccgagcggggtttcaggcagatggagcgcgtcggtagcctgtggccagggatcccagcaccgacgggaaagaggaggcctgggtaccctgcgccccgggcgcgcgcggcgcgtgaggtgagggggagggcgcggctccgcaccagccagcggccgcctggcgcccagccgcatctcggggggcggggttgagcctccgggccgcagtgcgattggcggaggcgagtgggtgacgccaacggccggcgcgaggccccgcccccggcttgccccgcccccgcgcgcgccggcggcggggcagcctcgctctggctcgcgccgcgcccccgcgcccagtccgcgcgtcagtcggtccctagcgcggctgcggggcggagagctgcggctggcccagcgcgcccacctgaggaggcggcggggtccgcaggcgtcgcgggacgaggagatcggagccgggagactcgcgcagcgccatggcccccattggcctcaaagctgttgtcggagagagtaagtggagccgggatccttccagcaggcggggactgcggctcccgaggagccccgcgcggcccctgccggcagcgcccaggcctccgagcgggctgccggccctgcgccccgggcctgaggctcctggtccgtggggtcccgttattcaggcgccgcccgcgcgagaggaaggcttgccccgctctcccctccctcacctcatgtttcaccccagccctccccctgcagcccgccctcctccctcgccatcctccttcctcgcggtccctgtctcccttttccctgcatcctccttcccctccatccctccctccctctcttcccttcacccccatttctctcccctcgccccatccttcccccttcctccacccctccctcaccccactctctccatcccgcctctcccccatcccaccctccttccccctctttcacccccaacacccgtccctctccttcatctcgcctctaccccctgcagcccgtcaccctcccccgcacccccatcctcacccccgttaccttcccctcagtcccctctccccttcctcgtctttattccttgagcgcccagactccgctcccttttcctgcagtccctcctcctccccaccctcctgggtgagtcgtgacgagcgagatcctggcctgcgtcctcctcccccgccccgggccgcgccgcggtccctggctgcgagacccacctgggagactaggcgcagtggcttggcctggggaggagacgcctgttttccggaggctgagctctgctgggccggggccacctcactcctccccttcccggggcttggcttccagggcggggacttatcaggatcctgaacccctgaaatcactcgggagatgaggagagcttcggtgtccgccgcccagcgccgcagtctgcaatctccctggttgcggggctctgccctgccgtggccgaacgcttcgggagctcagaccacggtggcagggaggaaatggttgtttatgggtttggatgaaaggcaccacatgaatggatttttaaaagtgggtggcggcgagtggcggccgcagcggagcgagggctgatggtgggtgacatttgcaaaacggcatccacagtgctaaataagattggtgatatgtgtggaaaaacagtgccttgtcaatattttgtccatttctttataacaaaaaaaatgtgtaaggattgctgtggcttttgctatctctttggggattaagtgaagattaaaactgggcttttctctgtaggagaggataagaaaggaaaaagaataaaatggtggaaatctagtttcctttccaatgattctctcctatcgtagcgcgcgctcgctgtggaatgcttttggccatgtagtgttcttgttgggcaccatagctgttttatttcccctctccattcttttcattgatatataggaaatactcctactgaggaatctagttgtaaaaccttatctcacctattacatcagaagaaaattgttataaaaactgaacaccaaatgaaacaaaattttaaaaggtgctcatcgtaacaccttcattgtacccatgcagtacgggttctgatacttgtactcgagatgtttagggctaggaggacccatagggatcctctaatgtcaacatctcattttacccatgaataagaaatggagacttagagcagttaagtgacttgacacaatcagtgttaatttggtgaaacctggtgggcatttccttgcaacattagtaaaaaataactttcttcattattctgtatgtatcttttctttccaatatccttttaaagcgtgaaatatagaatagaatgttacaggttgtattctttaaaatgttacatttgtactttgggaggctgaaatgggaggattgcttaagcccaggaattcaagatcagcctgggtaacatagtgagaccccatctctataaatataaaagtaaaataaaatggtatatttgaacactacacattgaagataaaatcctcaagtgttatagaaatcaagttttgcatcattttgctggaacccttgtttatgcaagtggctccataatccccttcccccacctttaattagaagcaagcataaaggtaaaaaaaaatcaatatgcaagcatggtcagaatttactttctgaaataaagcaaacccattgtacacaaagataacaaagcaattttacataaaattggtgaggatggctaggtgcagtggctcatgcctgtaatctcaggactttgggaggccgaggctggcgggtcacctgaggtcaggagttcgagaccagcctgaccaacatggtgaaaccctgtctctactaaaaataaaaaaaattagctgggtgtggtggtgggtgcctgtaatcccagctactcgggaggctgaaccctcgcttgaacctgggaggcagaggttgcagtgagccgagatcgtgccattgcatgccagcatggcaacagagcaagactccatctcaaaaaaaaaaaaaaaaaagaaaagaaaaaagaaaaaaaaatggtgattatgtgaacagagttctattcctataacaattaggtataaattttagaagaaaaatgttgaaatcctttgtcaatgacgcaggttaattctggcttctaattttggatagggtttctagctttgcccttttctctaaaagaggctgaggcagaagaattgcttgaactgggaggcagaggttgcattgagctgagattgcgccactgcattccagcctgggcgacaagagccaaactctgtctcaaaaaaaaaagaacctaattatacattaaaaacaaaaatgacaatcaagtagagcttatttcagaaacacaatagttcaatattagaatgacattaagaaatgaaaattttaaaactatataatcttctcagtagaaactgaaaaacaagttaatctgcttttaaaaacaaaacaaaaactcctagtaatccagaactaaaaggagtagtttaaatgtccctgtagagaaacctctaacctccccaatcccatcaggcctccctgtaatcacggttccctggactttcctttgtaattcttatcacagttgcaattaataaattatttgtactaattgtaagaccataagttcgctgggggtaagaactagtgtctagcacagtgctgtcacaacaaactctaggaataagtctaataggaagttagcaagaccttcataaatggagaagaatgctatgttgctttatggaagaatatgaaaaaatatcagttcttgctaaattaacctatacatttaataaaattcctacaaaagtcccaacattcatctggaatggtaaaggctaagctaagaggagctaagaaatttttgaaaaaaaaagaaaatgggaattttcacctaccagattcaaaacatactgtaaagctacgattaccaaaacattgtagcactaccagatgagagggaaagtgaaaagatcaatgacatagaacaagaagtctagagtaggtccagataagaatcccatatatggcaaaggtagcattttaagtcagtgaggaaaggaaagaaaactcaacatatgatattcaggcagttggctacattttgatggggaaaataaatttacttctgtacttcacatgttcacaaaaataagtcccatagggattaaataaataaaatgataaaggtagtagataataacagatgtacttttccttatattattgtgcaggagctttctaaacattattagaaaacattaaggaaaagactgacagatatgactatacttctattcagtaaaaacaccaaaaagcaatttgaaagacaaataagcttgaaaagtatctgcagcatataacaaagggccgatatctatttatctatctatctgtagagagcttccttaaattgtttttaaaaaaaactaaataaaaaatagacaaaagacatctattagttatctattgttgcataacaaattacaccaaaacttagcagcttaaaacaatgaacatttattgtctcagacatcctgagggtcagggtctgggaggggagcagcctggctgggaggttgtggctcagggcccctcaggaggttacatcaatgggctgtagctatctcaagaccagaccagagctgaagaatccacctccaatggcactcctgttgttagtgggcctcagttatccagcaggctgttggccggatacctcagttctttgccacaggggcttcgcctgggaagccagccggcttcctccagagccagcgacccaaaagagatggagacctggagaccgcagtctctataacctaatttagaagggccatcatcacttttaccatatcctatccatcacacagaccaatgctggcacaaagtgggaggggactacacaagcgtgtgaataccaggaaccagggaccactggaggccatcctgggggctctcttaccccagaatgaaaacaagagctccagaactgggctaggacacagtagaaaagcggggaggagagcaagcccagcaaccagatgccttcactttacacacttctgtatttgattttcttctttaaaatgtatagtgtgctctacttttataatttaaaaaataaaggttttaaaaatatttttattaacaggaaaacagagaatgcctctctggttctgtctgggtatcaccaagttccccagattgtgccaggctctaagtcataataagaatgaccacctactgagaacctatgatgtgccaggcactgtcctagtcacttaaatatactattcctttttttttttttttttttttttttgagacagagtcttactctgttgcccaggctggagtgcagtggtgcgatctcggctgattgcaacctccgcctactgggttcaagcaattctcctgcctcagcctcatgagtagctgggactataggcgcacgctgccacgcccggctaattttttgtattttagtagaggcggggtttcaccttgttgaccagactggtcttgaactcctgagctcaggcagtccggccttccaaagtgttgggattacaggcgtgagccactgcgcccagccaaatatactattcttaacgctaaatgtcctaagtagatataactgtccccattttagagatgaggaaattcaggtacagataaagtcacttaacagtgcacacaagtagtaaggctggaattcaaactcgggcttctctggctccaaaaggctgagctcttcattagaccagtccccttgcccctcgatgccctgtgtaacccactagaagagtgggtaggaggaaagccatcaatcccggagcaccagggagacacacaaaaggcccagactccgggactgaagaactgctgctgacaaaaatagttataaacattcctgtccatttgggatcattgtgggttggtattagaacaagctggacatcctaatgttccaggcaagcagaagctctctgcttcagaccgtatactttctaataatgtaactagccaaagctagtcataaaaattctgaatcactggtcaagaaacacattttctcatcatcccctctatagccacccctccaacattttcccctgatgattgaattctaaggttccctcacccctgcttttctctgccaggggatgaagtgagtagaaggaggctttgtctaaggactgtgaactcctcttaccctctcactgcactcagcagcccgagaggtgagttcaggcatcatccacttagctcttctagggccaaattataagtggaaagcaggagagatcagaggtgtcagactcagtctatgaaagacagatactcctctttttcctcaacctccctcactaatccccacccccccgaataaatacactgacaaagcgttgaaagttgcactttccaagtcaattcagtctctcttatgaagtggcttcagtatttatcaggttatagattatgatcaattggtctgaactttgaatctaaatctaaaaattattgctttgcttcgagtaaaactgtaataataaaaactaaatctattgatcacttattaggtgccagacactgtcctaggcatgtcgtatgttgtcatttaatcctcaaaaagatcccatgagttactctcattagtcttcttttactctaaggaaacagaggctgagagagtttaggataattccacaaggttatcaatttgtcgttataatgtttgtatgtatgtatgtattattttgagacagagtcttgctctgtctcccaggctggagtgcagtggcactatcttggctcactgcaatctccgcctcccgggttcaagtgattcttctgcctctgcctcccgagtagctgggattacaggcgtgtgccaccacggctggctaatttttgtatatatatatgtattttagacggggttttgccatgttggcgaggctggtcttgaactcctgacctcaaatgatccacccaccttggcctcccaaagcgctggaattacagacgtgagccaccgccccagcactgttgttataatgttttagtaactaacatttacatcacatcaacaagtgctaaacactaaactaagtgctttgtgtatgctaacttgttgaatgtctatagttaccctgtaagagaggtgtattccctgcgctttatggatgagaacattgaagtcaggtgaggaatgtgcgctaggtcccataggtgagaagaggcagatgcaggatttggaccctggtagtttggctgcagcatcagtcttaatctcaacacctgtcttctcagatttggattctggctcacaggctgcagagcctgtacttcttttttttttctttttcccagagacaggtttctgttgcccaggctggagcacagcggcgcaatcatagctcactgcaacctcaacctcctgggctcaagcaatcctcttgtctcagcatcccaagtagctgggactacaggcatgcaccaccatgctcagttaattaaaaaaaaatttttttttcttcaagacgaaacctcgctctgtcaccaggctagagtgcagtggtgcgatcttggctcactgcaacctccgcctcccgggttcaagcaattctcttgcctcagcctcatgagtagctgggactacaggcatgtgccactacgcccagctaattttttgtatttttagtagagatggggtttcaccatattggtcaggatgatcttgatctcttgaccttgtgatccacctgccttggcctccaaaagtgctgggattacaggcgtgagccaccgcacctggccaatttttagaaaaatttttagtagagatgaggactcactatgttgcccaggcttgtcttgaactcctgagctcaagtgaccctcccgtctcagcctcccaaagtgctaagattacctagagcctgtattcttaacctctcttccttggtttttgatacttgaaaatcttttttccctaaatttttccaaaaatgtacaggatccaagtggcagacaggtcctccggattctattccgggttctgcccctgactcatgggtgacactgggtaagtcacaactctgccaacaagacactgaaacttgcactttccctctactaattatttaatgtactgcaaatcctgcttgaccttaagtacaggagaaatttgacttgtaaaaagagataacttaggccaggcacagtggctcacgcctataattccagcactttgggaggccaaggtgggagattcacttgagcccaggagttcaaaaccagcctgggcaatatagtgagacctcgtctctacaaaaaatttagaaattagccggccgggtgcggtggctcacgcctgtaatcccagcactttgggaggctgaggagggtggatcacctgaggtcaggagttgagaacagcctggctgacatggtgaaaccccgtctctactaataatacaaaaattagctgggtgtggtggcacacatctgtaattccagctacttgggaggctgaggcaggagaattgcttgaacccgggaggcagaggttgcagtgagctgagatggtaccactgcactccagcctgggcaacagagtgagactctgtctcaaaaaaaaaaaaaaaaatttaaccaggcatagtgtccccgatctgtagtcccagctactcaggaggattgcttgagcccaggaagtcaaggctgcagtgagccaagatcatcctactgcactccagcctgggagacagagtgagactctgtttcaaaacaaacaaacaaaaaaaaggtaactttaggctgggcgtggtggctcatgcctgtaatcccaggactttgggaggccgaggcaggtggatcacctgaggtcaggagttcgagaccagcctggccgacatggtgaaaccctgtctctactaataatactaaaattagccaggcatggtggcacacacctgtaatcccagctactcaggaggttgaggcaggagaattgcttgaacccaggagggggagattgcagtgagcagagatcatgccattgcactctagcctgggtgacaagagagaaactccatctcaaaaaaaaaaaaaaaaaagaggtaactatttggcagtgcctcaaaaagttacacatagagggacaggcactgtggcccacacctgtaatcccagcactttgggaggccgaagcgggcaaatcacgtgaggtcaggagtttgagaccagcctgaccaacatggcgaaaccctatctctactaaaaatacaatatattagccgggcatggtggtgcatgcctgtaatctcagttacttgggaggctgaggcaggagaatcgcttgaacctgggagttggaggttgcagtgagcagagattgtgccattgcactccagcctgggcaacaagagcgaaactccatctcaaaaaaaaaaaaaaaaaaaaaaaaagttacacatagagttaccatctgactcagcaataccactccagtgtatataatcaaaagaaatgacagtatacatccacaccaaactcatatacaaatgtcgcagcagcattattcataacagccaaacaactcaaatgcctatcaagtgattagtagatgagcaaaatgtggcctattcatacgatgaaatattactcagccaaaagaaggaatgaagcactgacataggcatgaagcactcacataggctacaacacagatgaaccttgaaaacacgatgatggccgggcgcggtggctcctgcctgtaatccgagcactttgggaggccaaggcaggtggatcacctgaggtcaggagttctcgaccagcctggccaacatggtgaaaccctgtctctactgaaaatacaaaacttagctgggcgcagtggtgggtgcctgtaatcccagctactcaggaggctgaggcaggagaattgcttgaacccaggaggtggagattgcagtgagccaaggttgtgcaattgcactccagcctgggtgacaagagcaagacttggtctcagaaaaaaaaagaaagaaagaaagaaaacatgacactaagtgaaagaagccagatacaaaggccacatagtggatgctcccatttatatgaagtgttcagagttggcaaacccaaagacagaaggtagattagtggttgccaggggctgggggagggcagaatggggagggatcgctagcaggtacggggcttcttgtcgggtgatgaaagtgttctgaccagctacagggagccaagatcatgccactgcactccatcctgagtgacagagcgagaccctgtctcaaaaaagtaaataacgtaaaatggcaaagcttatgtgaattacatctgaatagtaagctttcagatgtttaaaaaaaaaaagagagagcaagctaacttgaaaggtaagctattagcccagttgacacatttgtcctgaacttttccctgtagtatcgcttaaatgcacatcatcaaggaagtccttttaaaagagtgtcagttggaaacatttacattgagacagaggacttcaatatttaattgcatggcctgggtctccagggaggaggttgcttaaatatgagcatttgttttacttcaaagttaaatacaattctgtgggtgacctgtccatgtcacagtttctccatgcaactgagacagtttagggggaaagaaatcatccctatctgataacagatttactaggattttttttttttttttttgagacagagtctcactctgtcacctagactggagtacagtggcacagttatggctcactgcagcctcaacctcctaggctcaggtgatcctcccatttcagcctctcaagcagctgggacaataggcacacaccaccacatctggcaatttttgtattttttttagagatgggttctcgctgtgttgcccaggctagtctcaaactcctgggctcaagggatcctcctgcctcagcctcccaaattgctgggattacaggtgtgagacactatgcttggcctattatcttaagaaaatatcctaaatgtggttttggaagaaaaaagaaaacaattttcctaggaacaatgtaggaaggtagaataggtataaaagcaaaggtgaggctgagtgcggtggctcatgcttataatccgagcactttgggaggctgagacaggctgatcatctgaggtcaggagatggagaccatccgggccaccatggtgaaactctgtctctactaaaaatacaaaaattagctgggcatggtggcacgtggctgtagtcccagctactcgggaggctgaggtaggagagtcacttgaagccgggaggcagaggttgcatggagtcaagattgcaccactgcagtccagcctgagtgacagagcaagactgtctcaaaaacaaaacaaaacaacaacaaacaaaaaactaaactaaaggcaaaagtgactttaaaatacaaaatactcatccaaacagatgttgctgttacacaggagtaaaaccttggtgacttgggttgtgccagcattgctttcttggctgctgagttatgggaatagccaacaggtcccaggaaaaaggaccccacagcagggagatgaggggctcaaggcagcaactacataccaacccgtatggaagacttccactattttagtatcagccaaactgatgtgtaccatcaggatatcaactttgggttcaagaatacataatgttgagaaatttgggaaagacctgtaacagtctgggacctgagaagatgccatacatatgcaatttaattccacagagctatttgttgcctgcctgccatctataactattctaggcactatggggaatggcaaaagaaagaggacacagtccctgccttcaaagaacttatgacgtattatttaacaaggaagcaaaacttttgaccaggtgtggtagctcacgcctgtaatcccagcactttgggaggccagtgtgggcgactgttttgagtctaggagtttgagaccagcctgggcaacatggcaaaaccccatctgtacggaaaaaaaaaaaataatatatatatatatatatatatatatatatatatatatatatatatattagccaggcatgttggtgcacacctgtggtcccagctacttgggaggctgaggtgggaggattgcttgagcctgggaagtggaggttgcttgagcctaggttgtgccactgtactccagcctgggcgacagagcaagacgctgtcacacacacacgcgtgcacacacacacacacacaaacttttaacaaataactataacaggccgggcatggtggctcatgcttgtaatcccagtactttgggaggccaaggcgagtggatcacttgaggtcaggagttcaagaccagcctggccaacatggcaaaaccccatctctactaaaaatacaaaaatttgcagggcatggtggcacatgcctgtaatcccagctacttgggtggctgagacacgagaattgcttgaacccgggaggcagaggttgcagtgagctgagatcgcaccactgcactctagcctgggcaacagagcaagactttgtctcaaaaaaacacaaaaaccaaaaaaaacccctataacctaatgcagaatgcagaaagtgccataataaagaactgaggccgggtgcagtggctcacatctgtaatcccagcactttgggaggcggatgcgggcagatcacgaggtcaggagattgagaccatcctggctaacacggtgaaaccccgtctctactaaaaatacaaaacaaaattagccaggcgtggtcgtgggcacctgtagtcccagctacttgggaggctgaggcaggagaatggcgggaacccgggaggcagagcttgcagtgagtcgagatcacgccactgcactccagcctgggcagcgagcgagactccgcctcaacaataacaacaacaacaaaaaaaaactgaatggcgtctaaagagtgaaaggagaaatttatttgatttgatttgatattttttttgagacagagtcttgctctatcacccaggctggagtgcagtagcatgatctcggctcactgcaacctccgcctcccaggttcaagcaattcttctgcctcagcctcccgagtacctgggattacaggcacgtgtcaccatgcccggcttatttttgtatttttagtagagacagggtttccccatgttggccaggctggactcaaactcctgacctcagatgatccgcctgcctcggcctcccgaagtgctgggattacaggcgtgagccactgcagctggcctaaaggagaaatttctattccagataggaaagagaaaaatatcttgttgggaaaaacagtattaaccagatcttgaagaatggggacattcccaggatgagcaagctatattagaatccttttaaaaaatagaagttctaaaagtatgacacttttaattaataaactggaaacgaagacacaatcggaccactcaacaatagtgatttttaaattttaaatgaattatctaaaaagacataggccagacacggtggctcacacctgtaatctcagcactttgggaggctgaggtgggcagatcacgaggtcaggagtttgagaccagcctgaccaacatggtgaaaccccgtctctattaaaaatacaaaaattagcccgacatggtggtgagcgcctgtaatcccagctactcgggaggctgaggcaggagaatcgcttgaacctgggaggcggaggttgcagtgggctgagatcgcgccactacactccagcctgggtgacagagcgagattctgtctcaaaaaaacaaaccaaccaaccaaaacaaacaaacaaaaaaatatacattctacaactgtagttgtgatcccctttctcattctatcctgtttgtgtattattttcatggaaatacttgctggaaacttacttattttactttcctttaaaaaaaaatcacttttttattttttgagacagagcctcgctctgtctcccaggctagaatgcaatggcacagtcttggctcactgcaaccgctgcctcccaggttcaagcgattctcctgcttcagcctcccaagcagctgggactataggcacgtgccacgacacccggctaattttttgtatttttagtagagatggggtttcatcatgttagccaggatagtctcgatctcctgacctcgtgatccgcctgcctcagcttcccaaagtgctgggattacaaacattagccaccgcaccccaccaaaatcagtttcttctatattgtgtgtagctattctaatttattgaataaaatgctgggataatttattaatttttctttgttttctactaaaagcatctaaggatatgaattttcatctgagtacagctttggttgaatcccataggtttttttcccctgctccatagtttttatttttatttttatttatttatttttcagacagagtctctctctgttgcccaggttggagtgcagtggcatgatcttagctcactgcaaatccatcttccgggttcaagcaattcttttgcctcagcctcccgagtagctgggattgcaggcatgcaccaccatgcctggctaacttttatatttttagtagagacggggtttcaccatgttggtcaggctagtctcgaactcctgacctcaagtgatccacccgcctcggtctcccaaagtgctgggattacaggtgtgagccgctgcgctcagtcctgcttcatagtttttaatatccaatatttttgccatttctttttttaaaaaattattattttgttattttagagacaaggtctcagtctgtcacccaggctggagtacagtggcatgatccatagctcactgcagccttgaccttctgggctcaagccccctgagtagctgggactatatttgtgtgccaccgtgcctggctattgccatttacttctaaatatagtcctttgttttgaagtggatgtcactctcataactggtgataagtagtttaaattgtggcaaaatttccctaagaggtggtttgggactcaggcatcatcatcaaatgtaagagagcacgtatctgcctctagtatccaagaagggcttattgaacgtgcagtgaaaggttttccctctggcttttttggcgcacagcacctctgagacaaacaggtgcttgaaagctaatgaaatatctttagtggagtggtcaggccaaattttatagttatcactggcaatgtaacagccataaattttgagtcctggtcctgtgctcgcctgtacaggaagtgctttgggaatccccagtatgatcctctttaattgcctcaattagttgcttctctgcgaggctgttgcaagagctaaagttagagtgaggtgactgagactctgttttcctttcagcaagtatgaggtttacttacctttttccatgtcttttttcttttttatttgttttggagggaggggtggtggtgggagatagggtctggctctgtctcccaggctggagtagagtggcacaatcacagctcactgcagctttgatctcctgggctcaagcgattccagctgggactacaggtgtgtgcaaccacacctggctgatttttgtattttctgtagagaaaatacatgttgtccaggctggttttggactcttgggctcaagcagtctacccaccttggcttcccaaagtgctgagatcacaggcatgagagccaccgtgcctgaccttttttggttttttgtttgtttgtttgtttttgtttttttgtttgtttttttttgagatggagtctcactctgttgctcaggctggagtgcagtagcataaccttggctcactgcagcctcaacctcccaggctcaagccatgctcccacctcagcctcccaagtagttgggactacaggcatgcatcaccatgcctggcagatttttcttttcttttcttttcttttttttttgtatttgtgtattttttgtatagatggggtttcaccatgtcacccaggatgatcttgaacttccaagctcaagcagcattcccacctcagcctctcaaagtgctgggattataggcacgtgccacagcacctgccctgatctttaacttttttcttttcaacatccacccatctctatctgtcactttattttatttatttatttttttcttgtgagatagagtcttgctctgtcacccaggctgcaatgcagtggagcaatcctggctcactgtaacctccgcctttggggtcggggtgcaagtgattttcctgcctcagccttctgagtagctgggattacaggtgcctgccacctagtatccaaaaagggcttattgaacgtgcagtgaaacgcctggctaattttcgtattttcagtcacgacgggatttcactatgttggccaggctggtctcaaactcctgatctcatatggtcctcccgctttggccccccaaagtgctgggattataggtgttagccactacacccaacctctacctttcactgatgtctactaattatttagtctacgagcaaaccttattggaagtgaatgagatattaagtatttattacagtaggaaaacctgttttattcttggaaagaaaaaaatttagagggagataaagaaaagtggagaaaaacaaacaaaattaaaaaaaaatctttggagcctggatgtgtgaattcaaattcatgcagatttgaatctgagtctccagtagccaccccttatttggtgtccttctgagatgttagagaactccaggaccataaattatagtctgtgttcatttcagcatggctcagcagggtctgggaccaagtgttttcattcatccaaccaatatttgcgctgtctctacatgccaggagctgtgctgcatgggcagcagagatagtagtgtgtaagtagaccgggtccttgtgggatttagacagacagtggtgacgcagcaggaatgtgccctgacagggcaatataggtaatgctgaagcatgtgggaagcccccaggaaggcctgggcatgagcggggcagagtgagacctgcaggatgaggaattagccaggcaggagatggggtccgtggggcctgggggagaggaaggtctaagcttggcaagaaaatgagaaaggctgtggctggctggagctgtggggagtgtgtggagagcagtcggagagttgccagggcctgcttagccttggtaaggtcgtttatctctctattccagcagctgtgggaagctactgaaggttttgagttggggagaggcatggttagaattgagttcaaaatgctatctggttgctgtgtggagagtgggcgggaggcagtgggagggaagaggctgtggtgctggtcctagctggggatgtgatggcgaggatggtgatttatgccagggagagagcagcagtgttgggagggggaccccaacttgaaggcatcttaggatgcagaagggtcaggtcatggtgatggctgtgcaggaagaggagaggaagagtcagaaatgaatcccagttttctggctcgggcggccagttggaaggtcatgctgtgcattgagagatgaaaggcggagaagagacaggtttgtgggggaagatgaggttttgtaggcacaggcttcaggtcctgtggaccacctgcgggggatgctaatgggagcaggcagacatgcttgagattggcagtcacccggtgccagagtgtgggcaggtcagatgcacaggagagtgggagaagagggctgggatctcaccccgtgggacactggcatttacaggacaggcccagggagagcagccagcaggcctgagtgtcggaggggaaaggtgaggctcacagcagtgtcttatgattttgtgactcatgggacccaacctcaaactgagccagtgcaagctgagccagccaccaggaggctccagtttaggaacagcccccactctctaggctgggaggcttggccgctggaaacttctcaggagtttgcctgtctgtggtgttgcccctgtgttttagacaacacttgcctgtgttaacttccttgctcaggattgttttaaggaggaaatgaggaaatggttatagttagtcgacgtgcaaaactctgagcatttgggctttatgctgtgttaaaatggcatcagattggctgagtgtggtggcttatgcctgtaatcccagcacattgggaggccgaggtgggtggatcgcttgagcccaggagttcaagaccagcctgagcaatgtggcgagaccctgtctctaccaataaataaataaataaataaagtacgaaaactagccagacatggtggcacacgcctgtagtcccagctactcaggaggctaaactgggaggatcacttgagccaaggaggtcaaggttgcagtgagccatgacacaccactgcactccatcttggggtgcagagcaagaccctgtctgctgtggttttgttctgtgtccccacccaaatctcatcttgaattgtaatccgcctaatccctacatgtcaaggacaagaccaggtagaggtaattgaatcatgggggcagtttccctcatactattctcagataatgaatgagtccaaaggttttataagcgtcttgcatttttcctgctggcactcattctctctcctgctgccctgtgaagaggtgtcttctgccacgattgtaagtttcctgaggcctccccagccatgcggaactgtgagtcaatgaaacctcttttctttgtcagttacccagtctcaggtatttcttcatagcagcatgagaatggactcatacatcatttcaaaaaaaaaaaaagatggcatcaaattgtagaatcttggctctggaaaggatcttagaagaatctagtccagaccgtgacccagagtaggaagtcagattgtgctagtctattagcttgatcacattggccaatttttttcttctctgtggctgctggggatacagtattatcttcatgttccacaccagtgtagagtcacaatggcaagtataaaccatgaagagtgtgtggaggcagaaaggctgtggctctggactctagttggttctaatccagtcgcagttgagcctcgtgagcctcctttatggcagtaggaacaaagctgcttcattttggcagtgaagggaggaaaaaggaagaaaatttaggcttaaactgtttttggagcccccatactgggtacgacaaggtgaaccaaaccccacttatctcttctgtcagtttcttctgagcattggtgtggtcaggatagcattggagaggagccccctgcccagtctctggacacattggtattgatggttctatttgctaaggacttgaagaaaacaaaacactggtggtaagcaagagtcacccttcgctctgggagaatttcacactacaggctttaaacaatagactacagtgaggcatagcccttaaaaatcacttaatctgcagacctccttgtattgggggtcaaagtgctgcttcaggattttaggatgaggctattacttgactactcagaatgtttttcagtttgctttcccttagataatcttagggtggattaccctggggggtgactctggctcattcctcaataatcactaattgactagcaagaagatcccttaaaaaaagtcacgaggccaggtgcggtggctcacacctgtaatcccagtgctttgggaggccaaagtgggctgatcatctgaggccaggagttcaagaccagcctggtcaacatgttgaaaccctgtctctactaaaaatacaaaaaattagctgggtgtggtggtgggcacctgtaatcccagctactcgggaggctgaggcgtgaaaatagcttgaacccaggaggcagaggttgcagtgagctgagatcacaacactgcactccagcttgggcaacagagtgagaccctgtctcaatacaaaaacaaaaacaaactgattgggagctctcaccctgtggatgggcctgacctggataggctgtttgttggggaactcccggtgtcagcatatttagatttttcttcttggtctctgattccccagaaaggtcttcttttgtctgctgtctgggagataaaggtctggctaccagaattctgggaactgactggatgagatgagctgacagtgggttctcaacaagctttatgcccctcttattcttttttttttttttttttttgagacagagtcttgatctgttgcccaggctggagcacagtagcatgatctcaactcactgcaagctccgcctcccaggttcacgccattctcctgcctcagcctcccgactagctgggactacaggcgcccaccaccatgcccagctaattcttttgtatttttagtagagacagggtttcactgtgttagccaggttggtctcgatctcctgacctcgtgatccgcccgcctaggcttcccaaagtgctgggattacaggcttgagccactgcgcccagccacccctcctattcttttaagttccagaggcagctggtgctgccagttcctgaaacttttgaggattctgctgtgtacatttggttggttttcactgctccctaccaccagataaggattccgctttcatgggcctactaagtcagttacaacgcatctattgtagaaaataaggcgacagactcagaatgtaaaaacacaactttatcatttgtaataactgcattccaggaaggaaggaggggagtagccaccagccagagactggggaccaccacgcccgagtttctttcttttttgagacggagtttcgttcttgttgcccatgctggagtgcaatggtgcagtcttggctcactgcaacctccgccttccgggttcaagcgattctcctgcctcagcctcgtgagtagctgggattacaggcataagccaccatgcatggctaatttttgtatttttagtagagacggggtttctccatgttggtcaggctagtcttgaactctcgacctcaggtgatctgcctgccttggcctcccaaagtgctgggattacaggcatgagccactgcgcccagccctgagtttcttaacacagcagagcctctggctcttttggccacttgtttttctttctcactgagaggaaatagagtctcctaagagaaagagttttggaacaccacaaatccaggaatttaatactgaactagccctcagctcactttgaagcaggaaatcaggtgaggctaaggtcatgccttctgactggataaaccctcccggacccaggagacatcctcacctgcccggaccccgggaggcatcctgacccttgcggaccccaggaggcatcctcaccctcctggaccccaggaggcatccttaccctcggggaccccgggaggcatcctcaccggagcaatctttggtatagaacttttaactaaattacacagtgtggagagacaagcttcagtcatttctccactacccactcagtgcctggcggaaggcaggcagcacagaccttcatcccaacgcacgaggggaatattcaaatcatgccttaggggcacagggaagggagtcagagactgccccgcctgtgattttgatacaagtagacagatgatctgagagaacagcctctggtctagatgatttcagtggaaaagaagaagaaagatccatgtggaaactttgtaaacgttttatgacgggaaaagacaagtgtagcatttaggtaaagaagaccagcacagagaaaaccatttatcattctaacataaaatgatcaaccaagagctcaaatgtgatgtaatgtgagataacagaatgaggtggaaaatgggctagcaggggaattcaaaaacagcaaatcatggcattgcagaatgaataaaccaattttacaccataagaagcagaatcttcgctataaaatatggaaattgcttgagaaatcacgcagcctgcatattcatgagcattagtgctccccgtgtttcttttggatttttcgcgtcttctcttcctggagctccacctccttcccgtgctcgatctttggccccaaccccaaaaggatgttttcttttcctggtatcttactgtagccagttccacaggttggggaaaggaagccctcttaacactggccctttgtgtgtgtggatgggtgggtggggcatttcctgccttctggaagcttccctggggcttttgtcttatgtgggtttgacatcaatagcatggctgaattgagggttccagagggagcgtgagcttatggccttgtcatgttgtgtgggactaaacatttcctaatatctcagatctgtagacctgaagcaggctaaatcttagagcagaacagattgggctggtcagaatcttggacttgaaaataagacagagctgaacttggtgacatgcacctgtagtcccagctactcaggaggctgaagcaggaggattgcttgagcccaggtatttgaggccagcctgggcaacatggtgagactcatttcaaaaaagaaaagaataggatgactgtcaccaccatggtcatggataaatcatgtgatctctcctggattcagtttctttataagatagactgcatcagaatttctcagtgttggcactattgacattttgggccagatgagcttgtgccttgtgggatgtttagcagcattcctgacctctacttgtagattcccatatcatcccctagtcgtgacaataaaaaatgtatccagacaatgctgaccttcctcttgggggcgcaaaatcactccctgttgagaaccactggactaggtgatctttttttttttttttttttgagatggagttctgctctagttgcccaggcaggctggagtgcaatggcgtgacctcagctcactgcaacctccacctccctggttcaagcgattcttctgcctcagccttctgagcagctgagattacaggcaaatactaccatgcccggctaattttttgtatttttagtagagacagggtttcaccatgttggccaggctggtctcgaactcctgacctcaggtgatccacccacctcagcctcccaaagtgctgcgattacaggcgtgagccactgtgcccggccccactggactaggtgatcttatgtctcctgtctgctgctgggtttctgggattgtatgaaacactccattcttttcctctctctttagttttagactcatctttaagtccttagggaaactcccattcaagccaagagatgtgatttggagccattaaatgctgcatctaccaatttaagatgctagccacatcttgggttcctgccaagatcaagatacatattctgggtttctgcagttgaaggaggaattcctgcagccatcgcagagtctgtagtaggagcacaagcttttttcggagacacagatgtggctgggcgggtggctcatgcctgtagtcccagtactttgggaggccgaggcgggtggatcacctgaggtcaggagtttgagaccagtatgaccaatatggtgaaactccgtctctactaaagatacagaaattagctgggcatggtggcaggcgcctgtaatcccagttacttgggaggctgagacaggagaattgcttgaacctgggaggcggaggttacagtgagccgagatggtgccactgcactccagcctgggcgacagagtgagactccgtctcaaaacaaacaaacaaacaaacaaacaaacaataaaacagacacagatacaggttgacaggccaagtgggcattaacagatgaggactgctgctgttggtaatgtataagggcaatgtcttttctatctttttttttcctggtcagctgtagtcatgtatctttttttttttttttttttttttttttggagatgaagtctcactctgttgcccaggctggagtgcaatggcacgatctcggctcactgcaacctccgcctcctgggttaaagtgattctcctgtctcagcctccccattagctagggctacaggcgtgcatcaccacacccagctaattttttgtatttttagtagagatggggtttcaccatgttggccaggctgttcttgaactcctgacctcaagtgatctgcccgctttggcctcccaaagtgctgggattacagacgtgagccaccgtgcctggcccaggcttcccaaataactgaatgctggtatcactgtggtgtataaaaatggtcctcattttccagtcctttcttttaaagatgtccttatgtagcagagctttatgtggtgagagtagtgtttgctcccctggaaggttactatttcacaatttttgtctttctttggtatttttgcttcaaaatatcaacataactcaatagtgttgatgacaataagctgttgattttaagaagatatgaattattggatttccacttttgattgatttttccatttgtgtgtattttgtaacgtcacagctccttttatccaaggaacgttgtttcaggcaacataaggaagaaataatttccctttagaactgaggggaggtgactgctgcctctaacatatacttaggaactcctatttttcatctccactagccctggtttgagattttttttttttggagatggagtttcgctcttgttgcccaggctagagtgcagtggtgtgatctcgcctcactgcaacctccgcagttcaggtgattctcccgggttcaggtgaacctgaacctgaacttctcccgcagttcaggtgaacctcccgggttcaggtgattctcctgcctcagcctcccaagtagctgggattacaggcatgagctaccatgcctggctaattttgtatttttttagtagaaacggagttttaccatattggtcaggctggtctcaagctcctgacctcgggtgatctacccacctcggcctcctaaagtgcagggattacaggtgtgagccactgcgcctggctgaagttatttttatttatttatttatttattttttgagacagagtttcactcttgttacccaggctgtagtgcaatggcatgatctcggctcaccgcaacctccacctcccgggttcaagtgattctcctgcctcagcctcccgagtagctgggattacaggcacccaccaccacgctcagctaattttttgtatttttagtagagatggggtttctccatgttggtcaggctggtcttgaactcccgaccttaggtgatccacccgcctccacctcccagagtgctgggattacaggcatgagccaccgcgcccggccatggctgagatttttttttactaatcactttgaaggttcatgagtctttgcttagagattttctggctccttcactttttggctccaaaccttataaaacagggatataaaataaaaaatgggagtctctcttgaaagagaaagtaaatagtcatttctgtaaccctacccagtatctttatggacccgaggttaggatttggtttctcggatactaggcatttatcatcaggcactctctcggatattggcagtaacccaggttttgtatgttacagcgttggacatttgagtcttatgcaatctttgggtgtgctcagtaggccgatgtaatcaaatcattgttaacccatctctacacgttttaaagcttgtgacaactccaaacaattagccctcacccttttttctcactacccattacccaaaaatcaaacctaaatagagatgttctcagattataaccaggctaattagttgtcattcaacagttacagggagtgatacccagtgcttgccctgtggctgacaatttgagatctctattttggtctctcccacttcccacaaatacaatttagatataaaattatagtaaattattctagataactaatagttgatagagttactgtcttcaaatgaaggcactatggaacagttttatattaagcataactgcatttgttttgtttttgtttttaaaaattttttctagagacagggtcttgctttgttgcccaggctggtctctaactcctggcttcaagcgatcccactttggcctcctaaagtgttgggattacagccattgtgcccagccagttttttgagtttgaattttaattttttatctaaaattctctaatgattttagaaacagctttattgggatataattcacataccataccattcacccatttaaagtgtataattcaatggcttttagtctattcatagaacagtgtgtccatcatcacaatcaattttagaacactttcaattaccccagaaggaaactccatattccttatatgtaacccctaaaccccccatctctcctgctgtaggcaactactaatctcctttcaatttgtatggctgtacctgttctggacattgcatctaaatggcgttacataatatgtggtcctttatgactgcctgcctttttttgagacggagtctctctctgtcgcccaggctggagtgcagtggtgcaatctcagctcactgcaagctccgcctctcaggttcacaccattctcctacctcagcctcctgagtagctgggactacaggcgcccgccaccacgcctggctactttttgtatttttagtggagatggggtttcactgcattagccaggatggtctcgatgtcctgacctcatgatccgcccaccttggcctcccaaagtgctggtattacaggcgtgagccaccgcgcacagccatgactgccttcatttacttagtgtgttttaaaggttctttggtcttacaacatttattgtacttcactcctttttaatgactgaataatactccattgtgtggatatactgcacttacccattcacccgtcagtgggtgtttgagttgtttccactttttggttattatgaataatgctgctagaaacattcatgtacaagtgtttgtgtagacatatgttatttatttatttttaaaatttatttattattattttttgagacagggtctcactctgttgcccaggctggagtgcagtggcactatgtcagctcattgcaacctctgccctctgggttcaagcaattctcttgcctcaggctcccgagtagctgggattacaggtgcctgccaccatgcctggctaatgtttgtattttaagtagagacagggtttcaccatgttggccaggccgatcttgaactcttgatcttaggtgacccacctgcctcagcctcccaaagtgatgggattacaggcatgagccaccacgcccagccaacatacgttttaatgtctttaggatatatacctaggaatggagttgctggatctctatgtttggttatttgaggagctgccggcctgttttccacatcagctgtaccattttacattctcaccagcagtgcatgacggtccagtgcctttttatcttactgcgcttaaggtgtaattccttctttctcagactggactgtaaattctttgaggtaaatacattgatttatatgttgcttgtatcctctattgccttcaagtggttatgtgcattttattgtgcaattgctagatactttgtttctctcagcgtcagtgttttactttgtaaaatgagggtgctataattcttgacctctgagggctactgggagctttaaatgagatgatatatgtaaaacacatgaggaactctctcacatgtagtcaaccttcaatatgtttcagatattgctattattatgggcattttttttgttattgagagtaaattaacgattgagttttttctttattttgaggagtcttgctttgttgcccagattggagtgcagtggtgcaatcttggcttgctgcaacctccgcctcccaagttcaagcaattttcctgcctcagcctccctagtagctgggattacaggcacctgccaccaaacccagctaatttttgtatttttagtagatatggggtttcaccatgttggccaggatggtctcaagctcctggcctcaagtgacctgcccgcctcagtctcccaaagtactgggattatagatgtgagccactgtgcccggctgactttttcttttttttcttttttctttttttttgtttttgttttttttgagacggagtctcactctgtcatccaggctggagtgcagtggcacgaccttggcttactgcaacctccgcctcccgggttcaagtgattctcctgcctcagcctcccgagtagctgggactacaggctcacaccaccatgcctggctaatttttgtatttttagtaaagggtttcaccacgctggccaggctggtctcgaactccagaccttgtgatctgcccgcctcggcctcccaaagtgctgggattacaggcgtgagccactgtgcccgccaagttttttctttataagagctttgaaaaaattttggctaaggttgtaatatctcaatcagacactggttaaaaaattagcagtaggggaattatcagatggtggaccttcttccaagcccccagcaagttcattaaactgttaaatttcctttgggcactgatcactctccgaggcgatggtgtttatttctttgtgtttataggcagtctctcccttccacaccagagtgtaggcattttgtttagcttgctcatcatggtctttctgatgcctagaaggatgtctgccacatagcagctgttcaataaatattgtggaatagatgagaaaaaatgtatgcagagaaaaaattagaagacaggagacatattacaaaccccatggaggaacaataaatcactagattcttccttattaggaacgtaaaaatattatttaaaataggtgataatagggccagtgatagccaacagggttaagtactgttgtaaacactaagctaagtgctgtacaggcagtcacttatttaatcctcacgatacccctatgagacatttgcggtccttcccattttacagatggagaaactgtgacacacagagatttaataacttgcacaaaggcacagctaatgagtggagaagcagggagttgaactttaaccatctgtctccaaaacccatttgaatccctttgctttactctgtcaaggtgatcatagcaatgtagcacaacaaaggacagctgggttcagtgtcagagtctagcccatgctagagccagagagacgacatgtgcagtgggaagaacatgcggacaggggtccagagaatagttgctcatgctagagtgaccaattagtggcttacccactccagatggctgtcttctgcagggagtatctcaatccccaaattgagacctgagacctgggacctggaacctggccttagctgatctctgaggttctttccaatattaaagttttcaagccccaaagaagaatagttgaaaattactttgcctccccaggctacaaggtgacatagatcaaaaaattttattagcctcctgtgttagtgtttatgtttacaataaagtcctcactaatttgattggaataaatcagcaggtctccatgtagagactgtcttatgaatacatttaaggagatttgtgcaaattattgtatgttcatactatggaatgctatgtagtttgaaagcatgtggtaggtctgtgtgaaatgatacaagagaaagtctataatatattgagtagaaaatgtaattgcagaacaatgtgtatacgtgtaatatcccaaccaaagagctgtgtacatgtgcatacctccccacacctgggtgtatgtgcccaggaaaggatctgtaagggcacacccgaaactgttagtggctgttttccccgcaagagtagggggaaggagggaaatttcaccctgtatttatataatctattgtttgatttttttttacaagaatgtgctacttttttattattaagaactacataggctgggggtggtggcacatgcctgtaattccagctactcgggatcctgaggcaggagaatcgcttgaactggggaggcagaggttgcagtgagccaagatcatgccgttgcgctccagcctgggcaacaagagtgaaactccgtctcgaaaaaaaagaactacgtaaaggcaaaaagttaaagtggtttataattaggttaccaatagtgtgtgtataaatgatatttccaagaaaggaaacttgagagtacttggaaggcttgttttcaagtatttgtaccatttcctgcaatcttgttgaacattaacttattccacctgggaaaatgcagttgtttatcaaggagacccttcagccccacacgagacattcagagaaacttggttgctgtctttgctgtcaggaaagaggaagactacctagacatgttgctccagagcagaatttccagcagtagattgaaccttcggaggccgagtcccagcccagtgtaaactggtaaagagtgagccctcttcctacaatctggttattgctgctgtgtaaaaagtcctcttgatttttatgtatttatttcttatctgctgccttactaaatgttttaatgttgctaatcattttgatttctgcagatatatatcattattactaatattgtaactcattttattttctaatctgactgaatttttggatacatgttaaataataacaattttaaaatacagacctgtgtgccctgttgtgactaaaatgcctttgactttctatcggcctctgcttgtgcttcagattaactcacagatagccaggggccactctctgccctctcagaaggggacgggggtccttatgttcaactttatattttctttctttcttttttttttttttagtttgagacagggtctcactcttgcccaggctagagtggtacagcagcgtcatcttagctcactgtagtctctgcctttcaggctcaaagggatcctcctgcctcagcctcctgagtagctgggactacaggcgcgagctaccacacccagctaatttttgtattttttctagagacgggtttttgccatgttgcccaggtcaaactttatattttcatttaggattcgtatacattggtgctatagtgccattattccaaaaatgtattcatatgtttaccgcaggtcagagaagttttgaaatttttggtgaaatatccatgtagtttgctatctgaatatctttatgattatttaaaaactattttaaacatttgtttccttttttttttttcttgaggcagagtcttactctgctgcccaggctggagtgcagtggcgtgatcttggctcactgcaaactccgcctcccaggttcaagcgattctcctgcctcagcctcccaagtagctgggattacaggcacccaccaccatgcctggctaatttttgtatttttggtaaagatggggtttcaccatgttggccaggctggtctcaaacttctgacctcaagtgatccacccacctcagcctcccaaagtgctgggattacaggcatgagccactgtgcccggccacatttgtttccttttaagaggatttttacattatgttaaaaatcttgattggtagaagttatatttcataattttcttcttcctttgtatgaataatatgcttttatagtgatgtcacaagaggtgccttttgcagagtgcctcatacgtgtcactggactaagtaagcattttatctcattaatcttcacaacaggctattagagtattataattttaattttgcagatgagaaaactgaaacttaaaatgttttaaacttggcaaggcacggtagctcgatagctcacgcctgtaacctaatccaagcactttgggaggctgaggtaggtggatcacctgaggttaggagttcgaaggcagcctggccaacatggtgaaaccctgtctctacaaaagacacaaaaattagttgggcgtgatggcgtgtgcctgtagtcccagctactagggaggctgaggcaggagaatcacttgaacccgggaggtggaggttgtagtgagtcaagatctcgccattgcactccagcctgggcgatagagggagactccttctcaaaaaaaaaaaaaagtcccaaggtcacacagccagcaaatgcctgaacctggatgtcagccctggtctaactttagcgcttccttgggcatttttgggggtgatttctgcttgagcagccagcattaccccctcagacccctggagttcagtcaagaggatgccttttagaagaacgtctactgttgagtcagaataactctggaaattccctgtactctggattggtaaaaagaggcagggagttgtgggctgaggttggactctcttagttccctcagcagcatgaaggcaacttctcccaacctggggaaagtggatcctggtgcctctgtcctgggcagtgtggtgctctggggctactgtgtggaatcttggaatcgcctgtggtgttgactttggttgcacttctcctaagcttctggctcatctaatattagtcacgctacttcaggtgtttgcatgtgccctgggctcagggcatcgggcatctggcatatgtcactgtggagggcagttgtgagtccctcctgggctgtgagggtggggcttcatagggagctgcaagccttgagcagtccctgtagcgatccctggagcctgtgttttgggactccagttgaaatattgggtgcatttgaagatgtcccagatcatcttagaccaccggccatttttctcaggacatggcagagatttgccaaggttgggagtcacccaggacctagaggatgtggttgagaagggacctgctttcttactcatttggccatgagggaagcagagtccaccagggtcttcagtattacggaggaactgaagctgctccggtcttttaaacacatccccgtagactagctgggtggtggagcaggcatttggctgtagatacacatggtttggtatgcggaagtaagacctcctggctggacccacttcagaagtcttcattgtttctctccacatgaagaggacttaggaaggagatgaaatgagattgccagggattgtgaggaggtagcccaagctacttgattcttaatgctaaactgagctctaatccttgtttccttttcagtattggattagaaaaatgtagggcaggattagaattggctgttaacaatacccaggacaaacatatgccctgagaactttggaaaggaaataacttcctaggaatggtggcagctgcagtggtaatttatatgtgtcttttaacacttgtagtacttggttttatcttttgattatatctctgcctttccctatcaaaaggcaacttaagtgtaatttttttcagtgaatttatattaatttttagtggcaagaaaatatattcatcctcaataatataatacattcaaataaagagtgaactatactgttttctgctgtcattgtggcaaagattaaaataagtaaacctcaagatattttatcagttagtatgttaatttggagagccacatagtactgatgagggtgggagacataattttggaaagtaattcagcagagtttatcaggaccccagaacatttagatgttttaccaacttattccatactcagaaagctaccctaacggaataatttgtgctaagaaaagccctggccacaaagatggtcgctgacacattattttgagagcatttttcttatgcagaaagcttgggacaacattggaaggcacaaattggcaagtaaaggttaattataaatttattgcacaaaaataagcttttggtatgagtttttctaattttcctatgcatatctgctttaaaaatagttgtagcatgcttttttcacccttagccatatattttgagcattttcttcctcgtttgtactcatatatgaaaactctaaccttagttgaaaccagccttcctttcttgcacctggacagccgaacattattgggaaaaaacattactaagctgcctggtttaactttaaattcacagtcatgaccatcaaattagtccttagtactgtctgtaaatgctaaaacatttccacagtaaattgactttcccaatctctgggaagatatatgataccttctttcttcaaagcttccatatataacaccccttccccactcttagccaatgacttcatctccaacagggaaacccctcacctctgccaccgtgtctccaagcccatctgtggctttcctctccttcacacaggatgcctcctgtcccaggtcaagctttcctcttgtatctcagctccaactcctccctcttcctcagggacctcagtctttcattactccatcctctctcctgcatcgtcactctccccttcccttttgacttattgccagcatcactaaaaatgctataatctttcacatctttaaaaacaaacaaatcctacccttgcatccatgtctttatctaccctgttagtttttatgccttttctctgctaccttttaaagcaaaactcctttttttttttttttgtcacccaggctggagtgcagtggcacgatctcggctcactgcaaactccacctcgcaggttcaggcgattctcctgcctcagcctcctgagtagttggcattataggcacgcggcaccacgcccggctaatttttgttttttgtttttttttttttttttgagacagagtcttgctctgtcaccaggctggagtgcagtggcgagaattggcttactgcaacctccgcctcccgggttcaagcgattctgccgcctcagcctcccgagtagctgggactacaggcccgccacctaatttttgtatttttggtagagacagggtttcaccatgttggtcaggctggtctcgaactcctgacctcatgatccacccgccttggcctcccaaagtgctgggattataggtgtgagccaccacgcccggccaaagcaaaacttcttaagagttgttgtctgtcttgtcttcctcctctcccattttagtctggcttcattcttattatttcactgaaacgctcgtcaaggtccacaaagaccatgtccatccatctcactgctcctgtcagagtcattttctgcagccttccctcctgcctctatttgataagtccccagtgtttcactccagctgaggctgtgcttccaagcccaagagctaactctagctacctattcagcgtcttcccttgaatgtgtcttagccatctcaatcttaaaacaactaaaatagaactcctgatgttctacagaccagttctccttcctctcaaactctctgaatgctacatcaatttcttggcttaaaccaaaaatctgggagttggttatgtttcttttcttttctgccacatccagtgtatcagctagccctgttggttttacctccatagtgtatatcaaatctgcccacttctcaccatctcctctgccactgtcatgcctggactgttggaaaggcctcctgactccaccccctgcttccattcttgccccctccttcttgtctctctgtagcacatcagattacatccttaccttccatggctttccaatgcctttcagataaaatcatactccttatcaaagaccacgaggctctgtatgatccggcctccaacctcagcgtatatcatcttcagttcccagaaaatgtcaatctcattttcctttttccacaagactttgtactgttccttctccttttcctagttcttggctgacttcttcctcgtcaggtccaacttgcttagagtggccttgcctgaccccctatttaagtaggctgcccacacccttttaaaaaatcgtagcaccttatttatttaattcggagcacttatgagaagatgcaattgctcttttcagttagtggccgcctccttccctagagcagcagctccacaggagctgagcagcacagtatcttgttcattcgcagggtttagcacaatggctggcaagtagtggttactcaacaaatgtttattgagtgaaagcctgaaagaatgagtacatattttcccaaattattatttccaatgggttcatagtattccattgtacaaatgtaacctaattaagttaaccactgccctattatggatatattggtttctagtttttcactacactgaaacatgcgaagtaatctaaatggctattgggaatattgttgaccatgaacaattattcaggccttaaaatcctagaaagtgtttttattaaaatgggtgagttgagtacattaagtgaaaaaagcataatataaaattatatatctacagcatgatttttttttttttttgagtcagagtctccctctgtcacccaggctggagtacagtggcatgatcttgggttactgcaactttgcctctcactgaagcagtcccactacctcagcctcctgagtagctaagactacaggtgtatgccaccatgactggctaatttttgtattttttgtagagatggggtttcaccatgttgtccaacctggtctcgaactcctgggctcaagtgatttgcctgccttggcctcccaaagtgctgggattacaggcatgagccaccgcacgtggccaacatgatcttaactatgtaaaagtgcatagaaaaagctagtatgaaataaaactaaaatgttaattatgcatttcaagttgacatgattacagataatttttcttttagattttttttttttttttttgagacaaagtctcactttgtcatccaggctggagtgcagtggctagatcttggctcactgcaacctctgcctcctgggtacgagcgattctggtgcctcagcctcctgagtatctgggattacaggtgcgcatcaccacatctggctaatttttttgtatttttatttgagatagggtttcaccatgttggccaggctggtctcgaactcctgaccttaagtgatccgcccccatcagcctcccaaagttctgggattacaggtgtgagccaccgcgcccggcctgattgttttgttttgttttgtttttatcttttttatttatttatttatttatttttttattttttttgagacggagtcttgctctgtcgcccaggctggagtgcagtggcacgatctcagctcactgcaagctccgcctcccgggttcacgccattctcctgcctcagcctcctgagtagctgagactacaagcacctgccaccacgcccagctaattttttgtatttttagtagagacggggtttcaccatgttaaccaggatggtctcaatctcctgacctcgtgatccaccctcctcggcctcccaaagtgctgggattacaggcatgaaccaccgcgcccggccgttatcttttttattttaagacagaatctcgctctgtcaccaggctggagtgcagtggcacgatcttggcttattgcaacctccgattccctggttcaagtgactctcctgcctcaccctcccaagtggctgggattacaggcatgcaccaccatgcccagctaatttttgtatttttagtagagacggggtttcaccatgttggccaggatggtctcgatctcctgacctcgtgattcacccaccttggcctcccaaagtgctgggattacaggcatgagccaccgtgcctggcctgattgttttttaagcacatgagtaatacattgaattttttcttttcttttttttttgagatggagtctggctctgggtctgtcacccaggctggagtgcagtggtgtaatcttggctcactgcaaccttcacctcctgggttcaagcaattctcctgcctcagcctcctgagtagatggtataacaggtgcacaccaccatgcccaactaatttttgtatttttagtagagatgaggtttcaccatattggtaaggctggtctcgaactcctgacctcaggtgatccacccgcctcggccccccaaagtgctgggattacaggtgtgagccactgtgcctggccagaatttttcctttatacttttctgtgttttccaagtttactgctgtgtgtgtgtgtgtgtgtgtgtgtgtgtgtgtgtgtgtgtgtgtgtgtatgtgattactgtgattcagtgattactgaagatagtcaaaagcagatttaggaaccatcgagccctagagaattgtctaactgtctgaaccatacatgctgacaacagctcttgcccttcaagttgctccaggtgtgtgttactcaggtttacagagtagcaagagtggactttcctatggagcctccacagctggtcaggtgtgtgtgtgtgtgtgtgtgtgtgtgtgtgtgtgtgtgtgtgtgtggtggtctaggtaacggggctcattaaaatggtgatttggggataagagtgctctggagatgtgctcagggttttgaacatttcacaactgctcctcacatctgtttttagagcttgaggagggctcatgtggcctgaggcattgtcacagcctttacccacttaactttaggcagtggttctcaaatctgagcccttctgggggttcatgaggtcaaaactatcttcatactaagaccaagatgtggtttgcctcttcattctcattctctcacggggcacagcgaagtttcccagatgttatatgtttcaggacatactggctgcagaagcagatgggagaagccagaagtagacaggagaatgtctatgaggccagacattaaggagggttgcagaaatgtaaaacaatcccagctgtctccctaaaaatgttttattatgacaaatatatttatttttcattaaaatgcaattaatgtaacatatgagtttattatcttaaatgaattaatattgttaaaaatttctcagtttagtttccaatacaataattaagagcgtaaagaagttatgagaccaaaaagtttgaaaaccactgaattaaggagacaggaagagaactttctttttttttttcaatttttgagacagagtcttgctttgtcacccaggctgaagtgcagtggtgtgatctcggctcactgcaacctcagctcccgagtagctgggattacaggcatgcaccaccatgcctggctaatttttgtatttttagtatagatggggtttccccatgttggccaagctggtctcgaactcctgacctcaggtgatctgccccctcagcctcccaaagtgctaacttgttcatcactgaatccctagcaccaattacaggtgtgagccaccatgcccggctgagagctatttttatggtgggttggttatggctcagtaaaccagttggtgaattgcatgattcagaaacacaaagcctaaggtgggaaatgaccttatctaacagagaggtgtagacgtctttgatattacattaatttcctctctctctctctctttctccttttttagagattatgcatgatgtgataaagaaggtcaagaagaagggggaatggaaggtgagtagaaagtacagttaatgggcttaaggtgagttcacatggaaaaatcagaaggggatggagttggaggaaagttgtaggcaggaatgagggcttttgctgtgtccagagagtacagaatgctcctggattggagaaaggtgatctgctctgcctcacatttcatatggtcttggttaagaattctgtttgtcataaagcttatcttaaagaccacctggtcaggcagttagcagtggaactcttttgttcaaacaaaatattacctggaacccgttagataaagcagaggaaggtataattctgctggctctgggagaggaagaagaggccctcttgcccctttgtggccataaagcatctccatggagtccatgtacagtttgggctcaaagccctcatctggtctatcctcattgaactgtaactacataagacaaaaatagtaagctcgtttaatcacgtaacattgacaggagtgctggaaactatagtgtacttgaaacaagtatttaagccaatcaaactgagagtgggccgggttcctggaatgggtggtacaggagtggcacctgctgccccctatgcatgaagtcagcattttaaggactgcttggttgtctaaggctgagaattatactggccagaagagtgtgcagttttacttgattttttctgcatgttgctgaagaatttataccaacctttcttgccatcaaggtttcctgcagtcaaaagcccatgcagtttcaagtgcattgggcctaggaacaacagagctgattagtacaggaggattttgaagtctcacccggggcctttgttttaaccagcacatctgtcctcgccacccagaaggggaggccgtgcagtgggcctccccaccgcatacctttagcatacctctttagcatacctttctcacttacccttcccatcagtgacgggcttgtagacatgtgaattttaaactaatcttgaggaagctgccttatataataaaaactaattgacccctgtactgcagcagaaagctttctcatccacactatctgccctgatgtgtcttcctcctgttgcccccttctcagtttatagcattacaaaaagagaggataaatagccttgttttaactgccagcttcctctccactgtgggctgaatgaagataagaaaggttagctgaagagttgcaggtctgaagcttttaggccaggactggaacgttcttgttcttccagcctagactaaggtacactatgtcccagctgacatgtgtgttagtggcacagttctgatgatgcttttcatcaagtccccacatgccagaccacatgtgcaggcgctagtgttcactctccccttaaacacaagtgcatgccgtgaaaaagtactcactaatatgattatgtctgaatgttggagctatagatgatatttcctttatttatttatttatttatttatttattattattattattattattatgagatgggatcttgctgttgcccaggctggagtacaatggcgcgatctcggctcactgcgacctccgtttcctgggttcaaacattctcctgcctcagcctctcacgtagctgggattacaggtgtgagtcaccacacctggctaatttttgtagagacggggtttcaccatgttggccaggctgatcttgaactcctgacctcaagtgatccacccgcctcagcctcccaaagtgttgggattacaggcatgagccaccatgcccgactgattttttttccttttttaaatgggtatttactttgtcatgggaaataaaaactatttttttttaagtttataaaattacatcagtgagaggaaactctaactcctagaaagttaggttagggtatgggaggtacaagtgagcatgtgtccccgtgggcttctggtccataggaaatatggtttcttctgtattctgtacttctggagctccttttggagtctgatgcggtaagctgagcgagaatcacagcagatgccatgaagcccatacgctgttctctttccttgcaggtgctggtggtggatcagttaagcatgaggatgctgtcctcctgctgcaagatgacagacatcatgaccgagggcataacgagtgagcatgcgctctgcacttgagcagtgctggagccttctctctgtggcgggcttagctctttcctattcattattatctcctttgattttagattcttccagcaacctgtgtgctaagaccagaagctcctgagaggcgcaaggctatcttgttcatcactgaatccctagcaccaaatccagggctagatgctcattcaatgtctgttaaaggaatgccaaaagaagggttaaatcaagaaagaaaaggcagcccacccaatagaaaaaagttctgagcaggcacttaacaaaagaagaaatccaaatggccaatcaatctatgaaaattgtccactgtcattagtggtcagggaaatgcaattcaaaccagagtgagatgccgatatagattcaaaatattagaatatttaatctctgataatgccaagtgacggtgaggaggtagaaaaatggaaactcctacgtgatggaatgtctgctggtgtagcccctttgaaaaccacttggcagtgtctagtaaagttgaaggtatgcatgtcctgtgagccagcaagtctgtggtcaggtgtgtgtcctagacaacctcaggtatgtgtgcccaggatacatgtgcaggaatacatgtgcagtgttgctcataggttccccaagtggaaaataaccaaaacgtccatcaagtgtagaatggttaaatcagttgcgtgcaattacacagtagaatactctacagggatgaaaatgggcgagccctgagcgctcacagtaacatgaatgcatctgatgaacaacggtgagcaaagacagcaagacacgaaagaccactgatagtgagccttcattccacagagttcagaccgcagagctcagctgtgttgttttaaaatgcagatgtaaggggtaaaacctcaagagaagagctcaccattcaagggaggataatgattctgtttgcggggaagagaggaaatggtgttgatagaggggaatgtgagctggagccagggcacttttgtggtgctgattgggtttcgtttcttaactggggtagcgcttatttagacatttgccttatggttatttgtatgtttatgttttattcacgctttggaatgtgtgctataacttttggtgaataataaggagcaggattgctggatcacatggtaagtatgcttagttttgtaagatactgccaaaccatttttcaaagtggctgaccattttgcattcccagcagtagtgaatgagaattcctgttgctccacatccttaccagcatttggagttgtcagtgttctgaattttgagcattctaccagctgtgtggtggtatggtattgttgttttaatttgcatttccctgatgacctaggatgtggagcatcttttcacatgcttatttgccatctgtatattgttttttggtacagtgtctgtaaggtctttggcccgttttttaattgggttatttgttttcttattgttgaattttaagggatatttgtatattttggataacagttctttatcagatatgtcttttggaaatatttgccctcagtctgtggcttgtcttttcattctcttgatggcatcttgcacagagcagtactttttaattttaatgaagtccagcttatcaattcttgttttcatggattgtcactttggtgtcatatctaaaaagtcattgccaaatccaaggacacctagcttttcttttatgtaatcctctaggaattttataatttcgcattttacatttaggtctgtgatccattttgagttaacatttctaaagggtataatgtatgtgtctgtattcattttggttgcacgtggatgtgattccttcatttttaaaaaacagatccagtatatctatcagcagaagcacagtcctgtaaatggcatacacagtttttttgtttgtttgtttgtttgagacagagtcttgctgtctcccaagctggagggcagtggcgcaatctcagctcaccacaacctctgcctcctgggttcaagggattatcctgcctcagcctcctaagtagctgggattacaggcacctgccatcacgcctggctaatttttgtatttttagtagagacagggtttcaccatgttggctaggctggtctcgaactcctgacctcaagtgatccacctgcctcggcctcccaaagtggtgggattacaggagtgagccactgcacttggcacacatacacaattttttatgtgacttttatgtcatttagtgacctaagtcagtgtgttttttgtttgtttgtttttgagacagagtcttgctctgttgcccaggatggagtatagtggtgcaatcttgactcactgcaaactctgcctctgggattcgggcaattctcgtgcctcagcctcccgagtagctgggattacaggcaggcgccagcacacccggctattttctttctttttttttttttttagtagagacagggtttcaccatgttggccaagctggtcttgaactcctggccccaagttatctgctcgccttggcttcccaaagtgctgggattacagacatgagctactgtgccctgccccaagtcagttttaagactaggcttgcccctattttgagtttatgatgttattttcttcattgaatttttgaaactatttttttcgtctatcaaagcaaaaacagacaaaaaacacaaaagtaaaggagaaaaacactaaatggagctaacaaggatctaagaaaagagcagtgacctcctgtcctcctatctcccatcctcggggtctattaccccagaggcagccacctcgcccttcattctggacatcttttttatttttctacataaatgcttgttctattttctcttgattcagtgatattagatattattaactgacttcctgtgggagatggggattcagagctctccactatacacagactcttgcctacccccaaaagtggtttttaaaaaatgtccttatggccgggcatggtggctcacacctgtaatcccagcactttgggaggcagaggcaggcggctcacaaggtcaggaatttgagaccagcctgtccaacagagtgaaaccctgtctctactaaaaatacaaaaattagccaagcatggtcgcacgtgcctgtagtcccagctactcaggaggctgaggtgggagaatcacttgaacctgggaggtggaggttgcagtgagccaagattgtgccactgcactccagcctgggcgacagagcaagactgtctcaaaaagaaaaagaaagaaagaaggaaagaaaaagtgttcttacttaacaaaatttaaaagttagcaaccctatgttgaagctctgaaacattttggggggagatattagtggcctatgaaattaaacaaatctataaccactggtaaagtagatgtttggggatttttggtattaatttgaacattatttaaggtgaaagtctttataaatattccaagtctttataaatgttacaatcctctaaagtgatgcttttatctgcttaaatgatctgcatagaaagaatggcacctgtataattgccttgctctctcaatgccagaggacagtaggtaacacattttaagcattaccgggtgattggtaagattctcccaaaagctgttctttccaggtgaagtccctgacataactgtagaggaaacaagcaaaccaaagcctatggtttgttttaaccaaatagaacatttaatctttgcactattgaaggaagcaatattgtatagagaatgtggttggaatgccctcatttgatatgcagaggagagcaatgaaactatccagctgttgataaataaacccaacatggaaattccaaaggaattgggattatctagggcagatgagacaaagctgaagaagaggcaaaggacccattcttgacagaattagatatcattttccattttctctcagaacagatcaatgaatttacttaaactgaaatgggaagtgagaactatctagtgtgaagatttcagatttttctttgttgttgtttttgtcgttgtttttgagatggagtctcactctgtcacccaggctggagtgcagtggtactatcttggcttactgcagcttccacctcccaggttcaatcgattctcccacctcagcctcctgagtagctggaattataggcacattccaacatgcctggctaatttttgtagttttttagtagagatgaggtttcaccatgttggccaggctggtcttgaactcctgacatcaagtgatgtgcccacctcagcctcccaaagtgctgggattacaggcatgagccaccatgcccagcccagatttcagattctaacatcttgggcatgttgagaccatggaattcactcccaaggaacgtggtaaccttaaggaatgagtgaatgattccccccggtcccccactgtagatatttatctgcaacagtctgaaggtagcctgtctatattgcttctggttttatggtcacccatcatgttttcttattcactgtgggttgttttgttgtctagttgtggaagatatcaataagcgcagagagccgctccccagcctggaggctgtgtatctcatcactccatccgagaaggtaaaccttccaccagaggaggactctggctaaggttagatggactggcttgggatttatgtggcacagactgtctgacattgctaggttaagcacgcatttaacacactgctctgtttaagcatgcaatccacaatggggtggggtcgggggtggtgtttatgcagtgagaagtgatgaatgtattaagcgttcttaaacacagcagctgtgcagaaaaccagagcctgtgttccgtggccctggatcattctagttttcccccttgcactccctcttcaggtaggacccactctgtctaattagcagtccacctccagactttggtattttatgctttcattttattttatcaatatccagttactgttcacatttacctgtcttataattttggaggttacttcaaatcactatccaaacaaggtccaactccttgcttctgggtaatagttgtcttaggcatgttttcttttgttttgttttgttggttttgttttgttttttgagacgaagtctagctctgttgcccaggctggagtgcagtggcacgatctcggctcagtgcaacctctgcctcccaggttcaagagattctcctgcctcagcctcccaagtagctgggattacaggcacccccccgccacacccagctaatttttgtatttttggtagagacagggtttcaccatgttggccaggctggtctcgaactcctgacctcaagtgatctacctgtcttggtctcccaaagtgctgggattacaagcatgagccaccactctcagccttttttgtttttttgggttgttgttgttgttttttgtttgtttgtttttgtttttgttttttttttttttttttttgagacaggtctctctccatcacccaggctggagtgcagtgttgtgatcacagttcactacagccccgacctccggggcttaagtgatcctcccacctcagcctcccaaacagctgggactacaggcacatgccaccatgcccagctaatttttggtagagatggagatcttgctatgttgcccaggctagtggcaaactcctgagctcaagtgatccacctgccttggcctcccaaagtgttgggattacagttgtgagccaccatgccagccttaggtgtcttagtctatataaatttcctccaattttcacacttttttttttcactttgaaaactggcttacatatgaatttctacagatgcaattaaattgccaaaaggtcatcaatatgaatctcctggaaggtttctgccgggtttccttttttgtgggtgtcttcctaacaactaattacagtggctccaaagaactgatactgtcattccagaatgagctaagaaggcctttgttcatctaaactctgaaatagtactaattttaagtcctcaggacttggttatggccaaacatgagtgttagaattatgcatcaaaaatcccctgattttgtgcaagtggcttgaagccattggatttaactcagttcagatacaggtcccatttggctctagaattggattcaggtccctctttttcccccccatccacagtccgtccactctctcatcagtgactttaaggacccgccgactgctaaataccgggctgcacacgtcttcttcactgactgtgagtacaaccaagagctgtccccagtcccatcaggcaggttagcatttctgtacagctgggctgagccaaaactaaggcaggtcaagagggaagaaatgggttgttaccatgcttgtcccgatctgctggtttctcttcagaagataaattgcataagagacaaaaataagtgcacgcaaatacaaacccactagatcatgcagtccttcctgctgaaaaatagcacacaagcacctcttctcaggactgacaggcttggtgctgagaatgaccttcctgaggcttggcatttcattatgtagacttccagttagcactgtatgctgtagtatgtttccatcaatttttcaactacaaagatattccaatccagtagtctttgtattagatagaatctgcatcattaccctagaattagttttcttatgttttgaggattttatgctcagatcctagcggagaagcagagggagatgaattgacctggacagctacagagtataaaacagtaagaattcacccagagatcttctctctagggataaactcccacagcactcaccactgagaaagtggaaaggatatagcagaagaaggattttggccgggtgtggtggctcacgcctataatcccagcactttgggaggcctaggcgggtggatcacctgagatcagaagttcgagaccagcctggtcaacatggtgaaaccccatctctacaaaaatacaaaaattagctggatatgacagcaggtgcctataatcccagctactcgggaggctgaggtgggagaattgcttgaacccaggaggcagaggttgcagtgagcaagatcacgccattgcactccagtctgggtgacagaatgagactccatccaaaaaaaaaaaaaaatcctgataaaatgaagagcccactgtacatgtgcagctgttaaatgaaccagcaaatggacaggaaagccaactgtcttttgtcatacttgcagcttgtccagatgccctgtttaatgaactggtaaaatcccgagcagccaaagtcatcaaaactctgacggaaatcaatattgcatttctcccgtatgaatcccaggtgagcctgagtagggggtgcaaaggaaatctgcatcctgtcttattctgagagggtggggtgggacctactaaagagttgaggagggaaggtaccatgctctgaattgccaaatgacaggttagaagtggatgtttactgaatggaaatagtattccatagggcctgccccctgccctcatcttactctccagttgtttctgactttgcttcagccttgtgcctttctttgtgtgcatttcatccttgctctcagtgttcactcctgtcggccgactccttgaataaccactaagtagccaatcagaaacgagcttggaaggagagcgagggtggggagcagaagcatcccatctgctgcgaaggagactgttttttacgtggagataacctcagcttgtcatgtgctgagagagcagatggcagccttcgtcattagccgttaacacttcaggtgccaaatgccaggcccataaagcactcccttggaaacaaacaaaattattaaacaaataaaggtgaagctgattgtgagagaacagacacaacttgtctcggtattttgagagttgttaaaatgtcttctcttaccagacaaggaaacaaaaaccacaggactttgatgcattttacggagctaaaagatgattgtggcatattggatctttacagatcagcttcgagacaccagagagtgacctattcttagagaaggagagatgcataatatatagtgtgaacatttaaaaacaggcttccttctcacttggcctaaagcctgtcacccgcttgggggaaggaatttttttttcttctgtgtgttccatccccacctggatagaacaaaatccagctttagcatattgaacaatcttatatttcagaaattttaagaaagtaaactatttttcgaataccattttttaagattaaggtagtttatataaacgagaatttaagagaatactgataactggaagactcagtcatttaagagagaatcttcaacttctagcatactccaaaaaaaaaaaaagaaacagaaaaagaagagacaaatacggccaggcatgatggttcacgcctgtaatcccagcactttgggaggccaagacgggcggatcacgaggtcaggagatcgagaccatcctgtttaacacggtgaaactccatctctactaaaaatacaaaaaaattagccaggcgtggtagcgggcacctatagtcccagctacttgggaggctgaggcaggagaatggcgtgaacccgggaggcggaccctgcagtgagccgagatcatgccactgcaccccagcctgggcaacagagcaagattctatctcaaaaaaaaaaaaagaaagaaagaaagaaaagacaaatacttagaacatgctactgaagataaggtattattaaatccataaatagctcctttatttgcccacagtcacagcacagtatctggcttgtctcttatttattgaaactaagcttacaatttccagtgtagtctcacactaatcccttctgctctcctcctggccttgtcactgttctccaggcaccctaggtacacacccgcccaaggtccttggcactgcctgttccctccatgtggaagtcccctgtaaacatcccaccttcaagcccttgctcagatgttaccttctcagcaagtcctggtgtcctccctgtccagccctcctggacatcctcccctgctctgatattttctcatatacttgccagtttctcaggaccacacaattcacttttcattatgtttattgtctgctttctcctactagattgcaaactccttgaggacatggatgttttggtcactaatagttcccaagtgtttagcacatgggcacatggtaggcacccagtacatatttgtggaagaaacgggaacatattctgtagactcactgccagggtcagagaatactctgatagttcacaatatgtattaatactttttctcctccccaggtctattccttggactctgctgactctttccaaagcttctacagtccccacaaggctcagatgaagaatcctatactggagcgcctggcagagcagatcgcgaccctttgtgccaccctgaaggagtacccggctgtgcggtatcgggggtaaggcagtgcaccagtctgctggagtggcctcccgtgtgtcccccaagtgaggagctggcctggactcctcctccggccttaaggttcctctgacagttgtctcaagaagatcaggatttgagcatctcttacttcaaattattcttccagtggttttgttatcttctcaatgttatagtgaaatataataatacatgcagaaaaaagcataaatcaactattgaataacgaaaatgtgaacctctatgtaactgcaactcaggctgcctaccgtttttaatttctttctaatctttaaaaacaaatactatctttactaaagatgtttcagagtaagataaaatacaaagagagtaattctccaaaggacatgttcctcagattttatcaagccacgcatttctcacttgcttgctgagtgctgggggcacctgaagctgaagacccagcccatgatcagggaggatgggtgggatgtgccttccagcgtgtatgtgcatgagagatgcacccctgcaggctcgaccctgcgagataggacaggccaagtgctggggacagccacagtagggagagggccctttgagccaagggtgaagcccgtctgcagaccacaggtgacgataggctcatgaggagagagaggccagcattttgtgtgcacagttggctcttgcatttggtataaacaaaaacttgggagttgggaaaatgtggggcacatttggggaagatgggtagtccagcacagtgtatgtgtacggcagtggcgtgggatgaagccaattctggaggtcttggatgacaggtttgggattatgtccttcggtggttatcactggaaacctatgggggatttggacggggatgaccacagttctctgggagagtgaaggctggagtataagcaggagtcagggcaaggaaaaaccagaaggggtggctaaccaggaggccactgcaggaggaacaaagggcctggtcttggagtgatgggaacggggtggacaggtaaggacagaatctgagagcgtgcagaggtggattcggaactgccagcaggttagtagtagggcaggaagggcttaggctgccaaggcattgtgccgtggtaaccaagagcttggtggtgccacggatcatgggttcacccatcctgtgacctcattgtctcctggaagttgtggccatagaaaaacaccttccggttgctgtcccagtgcctggcttccctccactgttggtaatcatggacaaagccagccggcagttaagaaatgggacctaggtggcatctcctgactgacctgtgggagctcaggctggtagcagggctgctgcagtgctgagactggccaggaagcaggcagccgccgccccagcatcaggtcaggtggggcccagggagtgctgtcagacccagccatggggaagggttcaaaggttctcacattgttctggccatgccagctgaaatgtcactctccaacaaacacaacaaaacaagacccaagagaatgtgaactgagggaagtgagaatcatgggagtcaggctgggagcctgatcgtggcaaaaggttcactgactggtcagggcccccagtggaagtgcggcagtttatctgaagctgcttggaaagacatctgtttccacttagatcattctggataaaagcaataagaaaatcacttacttatggtccaggcactgagctaagtgttttattttgcttttcctttctaattatactctcattgtaaaaacacgaatacagacaatgctcacatctcccctaaccccgctgcactgcttggcttcctttcccgggggcagccagcaccatcatgggtgctgggtggttcatgctctgtcacccctcctttgtcagggaatacaaggacaatgccctgctggctcagctaatccaggacaagctcgatgcctataaagctgatgatccaacaatgggggaggtaagtctggcttggaccacgtggttctctttaccaaggaccgcagtgtttgtgtgacagtcccagagacagcttggttctgttgccacagagcatgtgtcagtgctgcttttcctggggactggcttccagtgaaatgcctgaagcccctggggcagggccatctacatgtgttcatcgtggccagggtgaccaacttgttctgtttgccagggctttcctggttgcagctctgaatggcccaagtcccgggaaacccccagaagcataatagcaaaccagaaaatcgacagacacacgcttcagagctcattcagcattcactggtttttacacatgctctgtgtacagccctgtgcgttttacacatggatagatattcactggtttttacacatgctctgtgtacagccctgtgcgttttacacatggatagagtcatgtaaccatcttacaatcaagatacagggctgtttcctcaccaccttgattttaaaactgaaaggcccaggtcctgggaacccgcttagtcccaggcacactggagggtggttgccccatttgtagttgaacttgggcagtttcctacagaaactcacttcggctcctagcgtttcatatctgcccctaagtgcgcttgctatgaaatagaaacactggagtcttttagggtatttttggtgatcttgtctagcagtagacttctgtgctgcgttagtaactttgcacctcagagtttgcttcctgctgccctcctttacaagaggggttcgctaggtggagaagccggagttggctgggtggcttgtgaagcatctccctgttttcccccagggcccagacaaggcacgctcccagctcctgatcctggatcgaggctttgaccccagctcccctgtgctccatgaattgacttttcaggctatgagttatgatctgctgcctatcgaaaatgatgtatacaagtaagtatagtgttacagaccccagagtgtatacggctctgcacatgagccaaaaatatgtctagaaaaagaacgggtttttttgtttgtttgttttgagatggagtctcgctctgtcacccaagcgggagtgcagtggcacaatctcagctcactgcaacctctgcctcccaggttcaagcaattctcctgcctcagcctcccaagtagctggggttacaggcatgtgccaccatgcccagctaactttttgtatttttttagtagagatgggatttcactgtgctggccaggctggtctcaaactcctgacctcgtgatccgcccgcctcagcctcccaaagtgctgagattacaggcatgagctaccacacctggcagaaaaagagagttttttttgtttgttgttttcttaagacgaagtctcgccctgtcacccaggctggagtgcattggcgcaatctcagctcactgcaacctccgcctcctgggttcaagcaattctcctgcctcagcctcccgagtagctgggattacaggtgcccaccaccacatctggctaattttttgtatctttagtagagacggggtttcaccatgttggccagcctggtctcgaactcctgacctcatgatccgcccgcctcagcctcccaaagtgctgggattataggtgtgagccacagcgcccagcaaaagagcatttttaaccctaggaaaaacggttcattgatacagccttgcaaattagcctgtaagttcttctgcgagttccccaaatccatgtggcatttctaggcaggaactcatgacttgtcctctttttggggaggacaagcactttaggtctttggttcccagctcacagcacctcaggtcatagcctacttggatatgttaatattgatttttgtgtttatgtgtgtatctcattcagagttgaaattttttctttctgttttattggttctgcctctctggaggcagagttgaaacttcttgtttatagatcctgaaatatgatgatgatgaaatatatcaacagaagtttcatactgaactttcctcacagaggagctgttttcttcatttgtaaaaaacatttttcttggtagcaatcatcagaaatttagtttctaaaaaccagtttttccttttgtggaaccagactgtataagaaacagactgtatgagaacagacattgttctcatggcatttaatagcatccatcataaagatagtggtttcaaaatgaagattctaaaaatatgagtgaatctcggttctccctgttggtagctataatttgtgcctcctccagctgttcacgatttcccatgtgattggtgctgagggcctattgcaggcagctgctggaagctatttaggcgccacacattgaggatgacatcccagtgcctttccagagggacagatgtgatctttgcctttcccctataaataactaaactcatgtatgacctgacttcatgccctggaccagacagctcaggtggagcttgtatcagctgacccaaaagattttaagacagaatttcaaattggttgactttgaagagagctttgaatctctcctacccgaggaattgcagcccgggtcagtgctgccacagcaagcctggctgacaggtccaatgttgtgacggcacttgtgaacatctggcagctgagggtggtgagctgctgctgctgtaagctgaagagggttcgatgaatgttgtggagacagtgcactccacctgagtcccgtctccattctaggtatgagaccagcggcatcggggaggcacgggtgaaggaggtgctcctggacgaggacgacgacctgtggatagcactgcgccacaagcacatcgcagaggtgtcccagtaagagccccctgcccccttctccagcgaggcgcctctacccagctgctattgatgatgcgttcactctgggcacctcgcgggggctcatcactgtgtgaattcgttttcttggcagagtcaccaacatgctaacccgtaatgataaatcccttctgttctctgagcttgagctactccgacttcatgaagttagaaaatcaattctgtattagggctgcttttaggattcttggaaaacatatgtagctctctcagaaaaatgcattacaaacattaaaaatttaaagctagttcattctattgaaagacccaaacaccacagtatacaattggactttcttttttatagctggtatacagccttccctgttttacctacagttcctgagcaatagctgatgtctccctactaaactgtatccagctctgaaaatgtttcagaatgtttctaatatttaaacattgttgtaagacctttaagctgtagataatgattctgctttttcagaaagacatattctgctacagtgagttggtgatatattcaggaaatgcccaaggaagagtgagaaaataatacagccttggatagttctgttgtttagagaagaggtctctaaacttttttgatcactcaacttaaaaagatactaacctgtggccaggcgtggtggctcacacctgtaatcccagcactttgggaggccgaggcaggtggatcacctgaggtcaggaattcgagaccagcctggccaacatggtaaaacccagtctctactaaaaatacaaaaattagctgagtgtggtggcgtgcgcctatagtcccagctactcgggtggctgaggcaggacaatcacttgaacccgggagttggaggttgcagtgagccaagattttgccattgcactccagcctggatgacagagtaaaactccatctcaaaaaataaaaaagatattaacccatatttcagtaaattaaatgtatttatgaatttaaaatatgctttattgtactaatgtgtgtatttacagcataaatatatatgtttgtatatttttcaaacatgaattatgtttcactatttatattccaatataaatttgaaaagaatgaggtaaaataaacataagtagatattctaatattttcttctcttttctccttgaataatctggtacaccccactctggagaccactggtttcaaatattaattagaaaagctatgtgtctctcttctctcttagaaaataacttctttttctttttctttttctttttgagactgagccttgctctgtcacccaggctggagtgcagtggcctgatcttggctcactgccacctctgcctcccaggttcaagcaattctcatgcctcagcctcccaagtagctgggattacagaagtgtgccaccatgcccagctaatttttgtatttttagtagagatggggtttcaccatatagaccaggctggtctcgaactcccaacctcaggtgatctgcccaccttggcctcccaaagtgctgggattacaggcgtgagccaccacacccggccaaaaataactttaaatgcataccttactggcaggaaaactcaccacatactcctaaaggaaaaattgcatgactcctatagcatccatagcaaggtccatggtgttgctgtgaaacttagctgcctccttttatcttccagggaagtcacccggtctctgaaagatttttcttctagcaagagaatgaatactggagagaaggtaaacccatgccagtgctcaaatgcccagtaaattagtccctgctttctctctaagagcagggaagctgcctcctccaaacaggactagtgggttagcaaggccatatccctctcttagtttatatcattttgccttatttttattttgcttttattattattattattattttgacagagtctcgctctttttcccaggctgaggtgcagtgacaggatcttggcttactgcaacctccgcattttgggttcaagcgattctcctgcctcagcctcctgagtagctgggattagaggcacgcgccaccacccctggctaatttttttgtatttttagtagagacggggtttcaccatcttggccaggctggttttgtactcctgacctccagctatccacccaccttggcctcccaaagtgctaggattacaggcatgagccaccgtgcccggccatttttacatttaagatacagatccaggccgggcatggtggctcacacctgtaatcccagcactttgggaggccgaggcaagtggatcacaaggtcaggagttcgagaccacccttgtcaacatggtgaaaccctgtctctactaaaaatacaaaaaattatcttggtgtggtagtgggcacctgtaatcccagctacttgggaggctgaggcaggagaattgcttgaacccgggaggtggagattgcagtgaggcaagaccatgccattgcactccagcctgggtgacagagtcagactctgtctaaaacaaacaaacaaaaaaaagatacagatccagagcccctacattttgatatttacagagaactgctttttgttactctgatggttaatatttactcttttggatcatgattcattttaagccagaagaatgaactgtgagacctttttttaacttgtggtaaaattataatctaccttatttatatatataaaattatatatatataattataacctaccttatagaatttataacctaccttacctgggcctctccctatcctgcctgtttatcagaggtggcacacctgtcttcgtcaagggaagtggaattaccaaaatacaactctggttgtgttactcacttgcttaaaaccatttagggacttcttgttccccttagaataactcccatctgcaacacacacacacacacacacacaccccccttccaaagcccagatcatcagccccacaggcctctctctggtctcatctctgcccctatccttgttgccctgcctccttgctccagccacaccagtgtcctcttgcctcagacctggccaggttctttggctcaggcatcatttcctcagggaaaccctccccgggtccctacccagactaggcagatgcctgtgccacgtgcacccacactacctggtgagtcccctcgaagggccctgatctctgcagtgctttggctcctctcctggatgctctgattctccgtgaattagagattctttttttttttcttttgtccttgtatctccagcacctaatagttcctggtatatagtagtaattcagtaaatttttgttgggtaaatggatgggattagatggcccacacagaaagcacacagacctgtcttgcccattgggtgcagattcccaccctctgtgacctccctgtgctcctcccgtccacgtagccacagtctttctgccaggaggaagtgcaaacttgatgctaaggctgcttgagctgaggatgaagaaaagcagtgaatagaaggattttttttcctcagcaagaattagctctcaacagctttctagtccaataagcatagaataaaatataactgctagacttcagagttcagttcccaacctataagacaatcatatttggatcaaaaaaaattttgagccagaggcctggaaatctaaacacacatgattttgtgtttcacagattcattttgagtgttacagagtgtgcgcttgggaaccctagtgtgggcagctgtcctgtcctgtgcccactagccttgcaaagcctcctaacatcagggccattagagtgacaccatgtgctttcctttcccttacagaccaccatgcgggacctgtcccagatgctgaagaagatgcctcagtaccagaaagagctcagcaaggtatggcagccccaaatcatctgtttgaataattgagtagaaacagctgcaaaaagacttctcaaagccctactactctaattgattcatggaaattcacagatttagttatcttcaatttttattagaaaagaaatgaaaggctgggataggcaccttatttcctgtcactttcttttctcctctttatcttttccttcctattcccttgctgttggcaggaggcctcagttcctcaccacatgggcctctccacagggctccttgagcatcctcccaacagggccattggctttccccagagtgagccatctgagagagagagtgctaggaggaagtcacaataccttttatgtcccgatcctggatgccatgcattatcagttcctccacattgtttgttagaagcaagctactaattccagcctacagttaaggagggaatgaagctctgcctcctaaaaggaggagtatcaaagaatctgtggacacattgtagtaataaaaccatcattggctgggtgtggtggctcatgcctgtaatcccagcactttgggagaccgaggtgggcagatcacctgagatcaggagttcgagaccaacctggccaacatggtgaaaccctgtctctactataagtacaaaaattagccgggcgtggtggcacgtgcctgtaatcctagctactcaggaggctgaggcaggagaatcacttgaacccaggaggcaaacgttgcagtgaaccgaggttgcaccactgcactccagcctgcgcaacagagcaagactctgtctcaaataaaaaccatggtgccacctaccctcataaaggatttctcctttgtcttaactcttttagaatgtggtttgtccctctcttttgacatgtaacactttctactttgtgatgtttgtgtacccgcttgtacacactttttacctcctttctgaggctagcgactccttggtgcccagtggtgttttatacgtagtaggtgctcagtagatgttgcatgcatccatgattagtcccttggtcacaaactgttgtgctttttcctagtactccacccacctgcaccttgctgaggactgtatgaagcattaccaaggcaccgtagacaaactctgccgagtggagcaggtaggactctccttctgccacggcaagtttttgccaggcctatttacccagcagaattttaacatctgcccttgaacatcctgcagaatcataggaaatagagacgggaaggcctgctagatcatgctgtctcaactctggagccagtgcggttccactgtccatggtagggactagattggtctggaatgctgtgccgtttggattttgcatgcctattttgaaaggctctgttttccctggaatgagtgaagaaagatgtgtggggttctgagccctacattgacaggactggcagaattttatattctgaatgtgttctactcttgccatggccagaccagctttggagacctcgaggctgacagagggtagagcagtagcaatcagaaatttgcccaaagcatccctgatcacaattgggattgtaaattgagaatttggggtttgagttctgtctctgtcactgattatttgatgtgcctgtttctttgtgtttcatttttttcatctgcaaaagggaaatcattgctgacatttttcaaggttgtcttgtggagtcactaatcctggcttagattcatcctaattcttcaagtgtttcaacattataaaaccatggttcaaattctaagcgaagagaagatgttaaaagattctgaagccggctgggcgtggtggctcacgcctgtaattccagcactttgggaggccgagacgggcggatcatgaagtcaggagttcaagaccagcttgggcaacacagtgaaaccccatctctactaaaaatacaaaaattaattgggcgtggtagctggcgcctgtaatcccagctacttggggggctgaggcaggagaatcgctcgaactcgggaggcggaggttgcagtgaacagagattgctccactgcactccagcctgggcaacagaacgagactctgtctcaaaaataataataataagattccgaagcctcagcttggcctcttttcatagaaaaaaacaattcaggatctcagtgtgaagctaagatttcaatcctctggtttggtgtgacaggctcagtttaggattgtaagccctgtcctgtatctttggatattttataaggggaagcagccctgctaaaatccatcaattttataggggattatagcaaacacaaggtgtcctcttgaaaagaacctgaccatctagaaaataggtcatacctaaatcagtaaaaatgtagtttgggattaattttggaagtttacaaattttcagaagtgatcaaaagtattgttgaactagttgcattattaaaatcatgtcctgctagtcaaatgtctgttgaggctggtggtaggactgaaaggtgaacggcctgtgagaggtgtcctgccttcctgggacacagactggagagagactatgaactcgagatcagaatttgtatggactcttgggatcttgagagaaaaaaagagagccttcaggcaacctcctaagagccacaaaggaagctgcagctgtgagtcctggttggctgagaccagcgtgctgccttctctggatctgagtcttgcctgcatcatgaagcggggccaggaacttgtgttcacttcactctttttcatgtctagttctttttcagcccatatcttccccttcatctcctggggtttggatttgctggtttgggggctctttttttcccttcctcactcatgaaacatggtagaaagattaaaaacacgttaaaagcctggagcagttcaaactcaaaaagcatgtgcttcaatgtgaggggaagcagaatggaaagaatctacccacgcggaggcatcctaaaatcccagcacttttcatgggagggaagcacatccctttaagtcccgctccctcacagggccttgtacctctagagggcctaccaagatttagtcttttttttttgttatgagccagggtcttgctctgtcacccaggctagagtgcagtggcgcaatcatagctcactgcagccttgaactcctgggctcaagcaatcctcctgcctcagcctcctgagtagctgggactacaggcatgtgccaccatgccttggtaaagatgaggtctctgctgtgttgcccaggctggtctcaaaactcctgggctcaaaagatcctcccacctcagccttccaaagtgcggagattacaggcatgagccaccgcccccagccaggattgagtctttatctgagaagctggcacaagtacactggcactcacctacagtgaacagcctactttaaaacaagatggtaaatcattgtggtttctgttgggcaagtggcactcagggcttttatccaccctcactgatgctgtgggagacaatgctgatcacactcctgctaactacagtgcattataagaacagaagcacctgtttaagaccttccccaaccaaggtggcagttctagacatttgtggatcctgaatttcctaagaactactgttcctccacactgtcaccagagagatggagccaatgaggtgtgttttccttaggacctggccatgggcacagatgctgagggagagaagatcaaggaccctatgcgagccatcgtccccattctgctggatgccaatgtcagcacttatgacaaaatccgcatcatccttctctacatctttttgaagaatggtagggctgtgggacctagaggaaggcacagaccctgtcttggggaaactgagacaactgagaaagaggaaacaaagcagagaagtcatttaaaagacatggactggggaaggaaaagaagatcctaggggccctttttgtttggggaaatgcagtgtagtcagatcgttgcagctagaggctgaatgtcccccagtcattgtagagttaataaatggtatggagtagatggaagaggacagggctggggagagagggaaagctgcttggccttgtggccagtttaccagagctatgcccatcacgtatttttaacttgcatcacattggtaatctctgcctttaaagaactgacttttacccagttcaatcacagtttcccaggaatgtccattgtacaaaagatagataataagactcttgtccaatttgaccttgattcagggtgggggtgggcaggggttgctgagaagccggggggcagatggaaacacagactataggggcagctgctgatggtcctcactcaggcagagtggctggaggggaatcgggatcctcgtgttgtcctcacctatagtgaatctgatgaggtgggggagcaatgtccactaaccctgaggggagaagggccaccatccggcctgtcccattgggtgcatgggggctgtgtgtggtgatcgggtgtcttgtgccctcaggcatcacggaggaaaacctgaacaaactgatccagcacgcccagatacccccggaggatagtgagatcatcaccaacatggctcacctcggcgtgcccatcgtcaccgatgtaagaggccagctcagcttccgggggaggtgggaagggagctggcagatctgtctgcttctgctctgactgacatacagcatctctgatacacactcgtacgtcaagagagagagacacagaatcagagggataaaggtgtaaagctatatataaatcagagacacaaagccaagaacctagacgtcaacagcagtgagtcattcacagttgtgaaagctgagatgtcttggaaccaaaccataacaggggtccccgccattttatctgtcttgtctcagggtctgtctggcctcacctttggacagcttagcctcagtgtcccctgtgaagatgagaatatgacacttagagctagcagtttggccacctttgagtcttctgcactgggttggttcagagccaagtcagggcaggttgtctgggaggcctggaccacgtgatgtgctctagaagaggtggggtgaagcctccaggacccttgcagaggactctgccatgaaccttgcctgtcacagccccactgtgtgcttgtcttctataggcacagcactaacaaagctagggttgcaaatattctccctctggaatcttatagacaaaactgttctagtgccaccagaccatagccctgtaactagcaggagtttggcatttttaaacccttgttcacaagagggatcaaaatgagaatggagatgtgcattcattcagtgcaactgtgctgctgaaatccaatacggcatgctccaagcagtatgccctcctctaataggcagcaaactactgtttcaactgcctggagttttttcttttttctttttttttttttgagacggagtctcgctctgtcgcccaggctggagtgcagtggcgcgatctcggctcactgcaagctccgcctcccgggttcacgccattctcctgcctcagccttccgagtagctgggactacaggcacccgctaccacgcccggctaattttttgtatttttagtagagacagggtttcaccgtgttagccaggatggtctcgatctcctgacctcgtgatccgcccgcctcggcctcccaaagtgctgggattacaggcgtgagccaccgcgcccggctgagttttttctttttaatggcacttacatacttgacctatgtttgcccttttttataacttttttttttttttttttttgagatagagtctcactctgtagcccaggatggagtgcagtggtgagattttggctcgctgcaacctccacctcccacattcaagcaattctcctgcctcagcctcctgagtagctgggattacaggtgcacaccaccacgcccggctaatttttgtatttttagtagagacggggtttcgccatgttggccagactggtcgtgaactcctgacctcaggtgatctgctcacctcagcctcccaaagtgctgggattacaggtgtgagccaccaagcccggcctttttatgactaaagaacaagtttgctccaggttcccaaaagggcacatttagggctattccatggaaaaccatccccccaccattactctttgccagtgctgcctctgggttccttcagggaatttccagagagtagcagaggtcacctagggcccaagtggccctgactcaggttctaacctggtgtgtgtgtgcatgcagtccacgctgcgtcgccggagcaagccggagcggaaggaacgcatcagcgagcagacctaccagctctcacggtggactccgattatcaaggacatcatggaggttagtgctggggcacagggaggaaaaaccaggcccagggcccttggcttgtcagcctggatgcttccagcttcacctgcggcgaggtgctgctgacttcacaggtactgcctccacttgaggatttgcatccaggcctccttcggccctcatggtgccccttgcctgggggtttctgaagagctgagagactgtgaagcacagccccagatctatttgttgttatgtcttggaggactcagctcctataatagagactcctctagggtgccgcatccagaggggtccaagtgtatctcaaaggtcagatgagtgacatcacatctccacacaggtgcagtggctcagcacacttccccagcacggccctgcctgccccgccctgccctcctcctgctgttccctacctgagcctccacacaccagcaaatcggattctgctcctctggccaaagcagccccttgcctggcatattctcacccctccactccccttcccagatcctgctttccatccaagcccctcttgaatcttaccatttccatctgccgccccacctgtctgaccactcagcacacaggggcctcccctggactccttagtgcacatgtgcctcttggtgcctcgggtcgcctttttgtttgttggtcctgtcccctcagctgctgtgtcatctgcacagagcctctagtgcagcaggtgtttttgcagttgttggctggaaggtgtataaggtggtggccaccgcagtagccctgtggggtcactcccttctctccttgtagcgggaagagaccctgcatagaatcctgcaccactagatctttccaacttgattagtgaacaaaactggggtctagagaatgaaggggtttttctcgggatcccttagttaattcctggcagcccaggtgttcctattgaattgtacattaatataaatgtattttaaatatatagagtgagtcagctcccatttttaaaatccacaaactaaaaggatgggtgaacatgaaacatctagaaaccaattatatctctttgcttgttgggatagccaacccctctgtctcattccttcctttgttctctgctcccttttgctccccctcctctccgatcccctaaagagacatgtgtaggcttcatgtgggagctgtaaagaagagtgtggatttctaggcagcaggaggtagatggtgagagtccacccaccagataattagacacttgaaaaacggagggggtaaggcttcttcatgcaggagagacactgcttgtgcctggtttctacaaggctgatggcaagtatcaggaatttattggacagaatgcatcatttataaaacctcacatagattatgaaagtgaataaactggaagagaagcaagaaaaaacttctcttaaaaagcaggctatctcagtgtagcagctagttacaaagcatctgctataactgagccctgtgctaggcacctctggccgcagggaagggagctctggttgttgcaaacctggccatggctttgccaagtgacatgttctacagatcatctggccttggttcctatcagcacttttcagacagatggcaagctaatatctgtctcttttccttctaggacactattgaggacaaacttgacaccaaacactacccttatatctctacccgttcctctgcctccttcagcaccaccgccgtcaggtaggtgaaaatcccttagcaaggacagaggggagccagctctggttggatgtcagctctgcggcagacccactgtacggctgtgtgatctaccagagccctctcgctgctgctccccacagctgcagcgtgggccaggtctgcacagtggtcccacggcccttccccctccagcatcccgttcctctctgattcatccctcacacctcctccctcgctcactctgcatcagccatgccagcttcctcgcacttctcaaacagtcaggcttacgtctgcctcaggaccactgcacttgcttttccctctgcctgaaattatctgtccccagatatgtctgcatgggctgggcacagtagctcacacctgtaatcccagaactttgggaggccaaggcgggtgaatcacttgaggtcaggcatttgagaccagcctggcgaacatggtgaaaccctgtctctactaaaaatacaaaaattagctgggcatggtggcggacgcctgtagtcccagctactcaggaggctgaggcaggagaattgcttgaacccaggaggcggaggttgtggtgagctaagatcgcatcactgcactccagtctgggtgacagagcgagactccatgtcaaacaaagaaaaaatatgtctgcatggcttgcctcttatctcctttggtctttaatcaagtgttaccttctccaatcttccctcaccaccctgtttaaaattgcagtgcatcagcgttcacagctttactcatgcagtccaagtgtggagcagcccacatgtcccccagctgacgagtgggtaacacacgtggtctctccacacagtggctcctgagaacagtcagggctgagcacgcactcgggatggtagagttagcagctcgagagggcgaccctggcactgcagctgtgccacacctggcaccccaggatgtgcacatctctgtccctcctctcctgctttccccacctgtcttctcttttgcgtctcttctctctgtgttcacttttggcttcagctgggccagaggcctgtggtggcctctgtgtcattgtgcagcccttctcatggcagcagaggtaaaacgttttttgccaaatatggcataaaatacaaaatcccaagtagcgccacagtcaggctgggtgatgagaatgggatatcaaatgattgcacaaggaaagaaagcaactgtgagattctctgttggcccaaacggtgccccaaacggtgtcttcctggtttggaaagtgactgtaaagctgtcatgagtcaggaagaaaggcgacgcattgcagtggccagaaaggacttgctcctttcatctcatttttctcattttcttaacctgggaacaacccatttattcctgtttctcagtcaaaggtaaagagctattgaaggaagcccaggttcagagggaggcccctctgggagcagccttgccactgaagtactcttcctccctggcttcgccgcaatttccaggaggcagctcagggatggagaagcctccccagtggtgcccggacagggttccagggcttccctgtgcttggccctatagcacagagctcttcatcagaccaggatttgggctcacttccttctccccacctgccccattcaatgatgacctcttggtcaaggcctgtgtctccttaggatgtggtactggggaggccctggcctccaagaggcactcactcagtacatgttttcaagggatctatgtgccagcctgaaggcagatcttagactgtcatcactgtgcactgacagcagagtgtcccaggcaagctcagaggcatgtgtgacttggggtagacgtctgcatgagcctctagcagggggatgctacagaacttgacccagcaaacgtcagagctgaactgatcctgtctgttgcctgcatgtttctaagagtgacaaggtcacagcagcacaggcattcatagtgactcttctcctgggaaccaatccacttgaaaattgcattgcagtgaaatttcagccagcactcactaagcatctacactgtttggggcacaagtgtacagacctaataagtaaacaaaccactggggtatgaagcactagatgccgtgagtgcagataaactgactgacattctctttctctctctctttctcagcgcccgctatgggcactggcataagaacaaggccccaggcgagtaccgcagtggcccccgcctcatcattttcatccttgggggtgtgagcctgaatgagatgcgctgcgcctacgaggtgacccaggccaacggaaagtgggaggtgctgataggtgagtggccgtgcttccagcggaaggcgccgccgcatcgcacctcaactccattccacgctttggtgtcgcattctgtcatagactcccttgacccacaaaacttagtctttaggtaactgtggacagcagaagctaggggcaaagggttccctccttggtctgccctgctgcatctctcaatggaaggcagcctcatgaggtaggaagtgcctgatcccagggtccggcagactcaggctcagattcctgctctgcaaactgcaagtgggggaccttgagcaagtggttcgagctctccaaccatttccttactcagcaaaacaggatcagtcatactcattcacagccttgaactaggcccaagatgaggtctgtcagtctcctggcattggcctcatgcccaggcaggaatgggcagtgaatggcagtcaatcgctgccctgtcaggtggagatggacagacagctgtgagcaggtgctgcctgaaactactgcctgaccgctggactctgcccagggctcccccagccacctccaaccactttctaggtctgccatgccctttctcgtatttcctgttcgtttcccaaaagagaggaagcgacttgtaggagctagcttaacgcagcaggagccttttctcctttttcgtgccttttgggggcttctatgatgtttagggctggaagaagatgaacgagctaagaaaagtcttgctttctccagatgcctccctttttgtcctgttttgcccttaacaaaatggagggtacctgccagcctgggagtccctctcaacactgtctggcaagaagctgtcatgttcactaccctggctgggctctgtcctcagtggaaacaggctcacgctgagcaaggagtgaggccagggctcttggcctccttttggaagggggtgtgctctgcacagtggggaattatactctccagggccaaggatggcctctcaggccacttacacatgaagtgctacagggagaggccctgagctgccccagctgggaggcatcgctgaccttctcccataggtgcccaccactggtcttaatcccaggcacagtcatgatctcgataacaagtggtggttttatacctcctatttggggtgagcaagtcgcagcaccccccccctcccaagctatccaagtgagcagactccatagaccagtccacatggctgtttctgggtttttcaagatggatctggggctgtcagccgcctctctgatagcacaatccagtggggagactgtacctccccaccgcagccctcaagcttcccgtgtcaggtcaccagctctccacataactgtttttcccttctgttgtgtagccccggtgataaagctctctgctccctgcttgcatatgtattgcatgaatgtagtgagtaattctgagcccaaacacagcttttctggacagaagctgtcacagccaggctttgggtgtaaatcttccccttcatctttagacctgacttgaggttccatatatcgggaggtgggaacctgggggtatgcagttgcccatgaagattcatggaggggcctcgcgcagacagctgacgtccgctgtgtggcctcccctgctttgtgcatgccagcctccttgctaccatgtgtgttcgtgcgcgcttgtgtgtgtgtgtatgcatgcgcacacatgtgtgtgtgtcttgctttctcatacctcattggctgcataaaatgtaggcctaagttggcatgttcctgtgacgtacctttgttcaagcagtcagctggcctctgttctcccacaggttctactcacattcttactcccaccaaatttctcatggacctgagacaccccgacttcagggagtcctctagggtatcttttgaggatcaggctccaacaatggagtgagagccaaagaaacaaagtaaaagcagcttattacagaaaagaaactcttccactctgaagggctttctttgattattccgtcactctttttctttatttcttcctttttagtttattatttatttgattttgtttcaacaagaaaatgcttgcagttctcaacaccgattgaaaatgtgtccagtgctgccctcacagccctgccatgaaccctctgggctctgacctgctggctcacccatgccttgggttccgcactgcttagtcagacgcctgcaggctgctgggtggaaactaaaaatgataatgactgctgtgaacagttgtcagagagggagctgaagttttgggggatgcctgaggcacagtgcccaaccctgctggtctgggatgaatttgtggcccccacaaggaatgtagagtgtcctggttgtgctgggtgtgggggtctgagagcgaggccagtggacattcagggaacaccatgtccaggaaggcaggcggtggtggagatggctggtcgtgagggaagcttggcaggcaatgtagaatagaccccaggtcagtggcagctggacggatggtgtgaatacctttttcctaggacaggcacttctcaaggaataagttaaaaggggtaattgggtcacaagccgccatctgcttggggaaccccaatctttagcgggaagagcttttgtttcatgttcctctgcaggaaacggcacttaacagtcatttgctcttttactaattacttttaattctgtggatcctttcaagagttgagtagtcatacccctctctctcccactgaagtcccttggtaaggtctgagagcctgtcagtagtaatgtatttttttttttttgagacggggtctcgctatattgcccatgctggagtgcagtggctcttcacaggtgtgatcacaacacactgcagcctcaaactcctggcctcaagagatcctcctatctcagcctcctgagtagctggcaccataggcccataccactgtgcccagcataaacctattattaatgctctgtgtggttttagagagcatcttctgtctcccaccaagcttgttacccagaacctattgtctgcttagtagactatccaaattttattttatttatttatttttatttttatttattattattattattttttttgagatagagtttcgctcttgttgcccaggctggagtgcaatggcatgatctcagctcaccacaacctctgcctcctgggttcaagtgatcctcctgccttagtctcccaggttgctgggattacaggcatgcgccaccacacctggctaatttttttttttgtatttttagtagggatggggtttctccatgttggtcaggctggtctcgaactcccaacctcaggtgatccacctgcctcagcctcccaaagtgctgggattataggcgtgagccaccgcgcccagccgactatccaaattttgatcttcaaaactgtcctcattccctcctctctctttccatccttcagatacgatagaaccttctatgtgtttaaatggcagccttccatcatcacatcagtgactccttagcttgttacatattctttcatgaggccatattttgtgtacctgactttgtgtatatcattgacaatggaccctggaaaagccccttcacctgagctgagatgtggcccagtgagtcacagagcatgagtcccctgtgagcattggagagagacctggactcagagccaggaggactggcctctactccagctactccatgggcacctgtgtggctgtgggaagataccctcgctctctggccatagcataggagcacagggagggtggatcgtgtgcccccaggcacgcaggacctctgacattctgtatattcagtgattacgatttgtgcctcaaaccatgcagtcctgctcactctctcactctctggtgatcctcaggggaatggcccttcagaaccttggctaggtgacatcagaagctgcttgtgtatgtaaggaaaatggggcttcctcctaaggtaggaacaggaggctacgctgtttatctcctcctctctcccttccttgatatgaatgtcagggcagcagtgtgctaaggaactgaaagtagttgggaacccagaaagtggacctggttatagccctaggctatagctcccatcctgcctgggctggccctccctagaaagcaaggccagtaggtggtgaataaaagccattgttttaaaaaaaatcattccttagaagcactgataggttgtaaatcagagacatctggttctgtgtgcagactgcaggtaggtggatggatttgctgcagtatgtattttaagacttctagaaagacaaatgttcagtcgagtctgcagcaatagcagaccacttgcaggatctgaaagagcacagactcaaactgcaaaggctcctgctaggatgagttctgagcttccctgcttcagaacaagcttctcctttgcagagtattttcctttgcgttatatttgctcagcagaggtctcagctgccatcaaaacaaagagaacgtaaacagactccgtatattcctggcttctgaaatcatttgctgagtggtgttgggttttagagcattcagttaagcaaggcacagagccctaataccagtgaggtcagaaagcagattaaggtctgacttgccctcttctgttgtgatcgtccaggtgaccaaagtacaggacagtgcagactgtcagaaaacttgagtgtcctaaagaccagtatcatggcagcatatcttttgtgtctttttttctttctttcttttgagtcagggtttcactctgttacccaggctggagtgcagtggcatgattttagctcacttcagcctggaccttctgggttcaagtgatccttccacctcagctcacctagtagctgggaccacaggcatgcgccaccatgcctggctaattgttttgtatttttggtagagactgggtttcaccacgttgcccaggctggtcttgaactcctgagctcaagttatcccccagcctcggcctaccaagtgctgggattacaggcatgagccactgcacctggcccaacatatcttttaggagaggatgagttttcctgcagcaaatgagagggttctcagcagacaccgtgcatgggtgatggtgccatgccctgtcttcccagctcctctccctcctgtagctgacgctggctcccccgaggtcagggttaaccaacaactctcactaaatcctcaccagtcatccctccacattgtctaaaaaatgaaatcttttgattagattttcacctctctgctctggttagtttatgataaaagtactcttctttggggaatgcccaagagactgtgagaagcaaatgtgagagagctgaagactggatcaagtctttgcagtacatgggggccacttgggagagagttggtgggtttttatattgattattttgcttcattccagattggggtcaggtatgtttcatttttctttgggactcagatttgaatctgaattcagagcccacctattgcctggctgctattcaagcatccacctgcccatcccctcccctcccaggggccacagggtcccgagaatcaagagcctggaggcactgcttctggacctgtctgtgccacccaccctgagcaagcacctgactgctctggccttcacgtgtcccatgtgtaggatgagaagggtgggccggatcacagttttccaaacctggctaatgatcatactcacctgggctgctctttaaatgtacacattttctggcgccgccctgcatattctgagtcagtaggtctgcttcagccaaactcaagaatgattggaccagctagcctgcaagaacacttttggttttcagattctgtccgtgtagaaagaaggattttgtcccatcagagcttgcggtgtctggcccacagctttgaaaacatgtagacagtcatgtagatgggcctcaacttagtttttagagaccactgtttacatttcataatcgtccagttatagggactaaataggaccctcagagcaatagggcccacttgctgctttattctggaaaaccaacatggtcagccatctgtggattcaaaatgagaactgtgcaaaatgtggattatggactcactcagcttaatttgcaatgtttatggtggtgaaaagcttgaccaatttattaaaacaacacagatgactgactttgaagaattggctttctgatgatcagcatttacaccagctagtctggtccccttaaagaaaccacgtaggtgaaggcctaggccacagcctgttgctgagggtcttcgaggcttcactgattgtctccaatactcagtcctagaattattgttcttcagtcaagactgggagcaatgaatggtcagtgattaaataatatcagagacttctagtgcattaattccctaacctctctttggcctctcccaaatcctagatttacatatcagcaaagatagggaggactttggaatcagcatctgatcagaggaaccccttcggatgcctcctttaaaatgagtctgccctcttatttcctggagtcatttggatggctaaggagggccttggggacattttctctggcacgtgcgctccttgctgttgcttgtaacgaggaagctcccaagcgaatcctcacgctctgcaggacaggctgtctttcagcatctggacacgtgggctacatggagttgcaatttggagggcccccatcctggcaatggttcactcttcagagtttggggcaagccttgtaatatgcgtcctttctcctcatttgtacagcagcctttggcctcttttaggactagcaggaggagtggtgaggtcacagaaatgagtggacttcaggggaaaggagtgctataaaaaagcccagggacacactcctgaaacctgcatcgcatttgctgaaggggcctcaggtctgcagaatgatgagtcagctttccagcgcagggcccctacaggctgcgtgcacagggcatcatgccgaggacaagttcctcactcagctgggagtgggcagctggggcctgaactgcagagaaagggatgttggaagaacagagacggctttccaagtttctgctagtctggagtgaccaggaagggctgcagttccagcagtcttcggtcagctgagcgagtagttagtggtcaaaggcatagggaccctggtattggagtcatgcccagtgagccagccaaagccttcttttgcctgcccttggggtggaaatccagcatccggtggtttccgctcccctgctcccatgaaggcccattcctttgccacgtctccagggaggcacattttcaagtacgtgtctcttttgttcagttcttgtctcccaccaggacctttctttgaagcacactgctgcatgcgtgcaggcctcatgctcacccacacaccaccccggtcacctctgttctgtttaagtccatgtccaaaccacacgacccatgcatctttttttactgcacttactagatctctctctctctccttatgacaaagactttcatttatttttatttttatttttgcagtagaagtatatctaattccattagcttaaatttttgcaagcatttctaatctcttacaatacgcggtctctgcaaggtaaggcctcaggtcccctggccctttccctctcacacctgaggtcccacccaccagggcagtaccaactggctggctcccagaggtcagtggattctcccagggggctttgcctatcaacttcctctcccaggcaccatgctttccacacatggtccccctaccaactctggccccattttcagcctttccctgccttgccatgtttggaatttctctccctggcttcacctggagtttaagagtgaattagaaacgcagctgcccatcacctgcagatggctctgcaccctgatggtgaggcagctcgttccttggtgcagcctgggaccctgcctgagccagaggatgtgttttgtttatccacagcccccaaatatctcccaggcctattgcgacgggaccccaaccccaattctgactcccctccctgcttccactatacccagaccagggttggggaggggggtgggtgcagatctgggaatcgagaagcgcaggaaaggaagtgttggaaaccagaactggcaagctcactgtcttctctgcctcctccaggatccacacacatcctcaccccacagaaactgctggacacactgaagaaactgaataaaacagatgaagaaataagcagttaaaaaaataagtcgcccctccaaaacacgcccccatcccacagcgctccgcagcttcccaccaccgcccgcctcagttcctttgcgtctgttgcctccccagccctgcacgccctggctggcactgttgccgctgcattctcgtgttcagtgatgccctcttcttgtttgaaacaaaagaaaataatgcattgtgttttttaaaaagagtatcttatacatgtatcctaaaaagagaagctcatgtgcaattggtgcacagcaggagaaatttctggactgttaggatgaatggacgccttctccccgttatttaagatttgtgaccttgtacataaccctgggtgacgtgcacattgcttgggtatggaacggtagaaatttgggtgtttttaaaaccttgtttggggttgttcctgtccttgttgagaatcatagagatgtctgtgttcttggagtatttcacactgaggactaatctgctatcttcattccagtccctacccctcagtgcctgctctcatccaaataacctgggaggtgacaatcaggatatctcaggaggtccaaggtggaacagacctctttgcctttcccagcgtctcatacccccggtagtgcagctgtgggtggaggctggggtgtctgcacgaagtcaggccagcgtcctcctccacagcctgtcactgccccctccccagcctgtgtccacagtgctgtgatcccgagggaagtcctccagtctaagtcacagtgccctgacaggtgagaagcaaactcccgctggaagcctccatctctttggaaaaacagttagtctggagcctgtggcccaggcccttctgtccccaggcatcatcccaacagctcattttccctagtccgccttcgttcaagggtcaggaatggaccagaacagatgggttctggaggcccctgaacagagggctatggctgtggagaaggttcttggcccgttggactcacacagaccctgtaccctctcggcaagcatcttcagtcagattatcctcagtttcagatacttcataataccttgtgttgtgtggggtcatacatcatcgtgtttgtaagagaagatggtcattttattctctgtataaaacttagctctaaagcagaaactaaagcagcaaatgcaggaaggctgtctcgccatcctcaagactcagcagctctcattctccagtggtgagcacaccatttgtgctgctgctgttgtcgtgaaatataataacagtggaagtcacaaaaatgtcccctgcccagccccctcgccgcccttgacctcctgcaggccatgtgtgtattacttgtctagtgatgtcctctcaaagtgctgtacgcgagctcggcgccacctccgcctccctttcagagcctgctccccgccctctctgctcgctgcattgtggtgttctcttctcaaggctttgaaatctccccttgcactgagattagtcgtcagatctctccccgtctccctcccaacttatacgacctgatttccttaggacggaaccgcaggcacctgcgccgggcgtcttactcccgctgcttgttctgtcccctccctcggaccaaacagtgctcatgcttcaggaccttgtttgtcgaagatgttggtttccctttctctgttatttatataaaaataatttatcaaaaggatattttaaaaaagctagtctgtcttgaaacttgtttaccttaaaattatcagaatctcagtgtttgaaagtactgaagcacaaacatatatcatctctgtaccattctgtactaaagcacttgagtctaataaataaagaaatcagcaccccttcccggtgtccagggggctccagtctggctttcctttgggcaacggaaggagaaagcttttgcagtggttcatcgcagaggaggcgaccacctccggctgtggcatggagtcttctggacccaggtccccgttgcttgcgttagatctgtagccgccttacactggggactagccatggagcttgtcttgggcccctagcagcaacagcgtgctgcctagagatgaggccattcttccaccgtgtttctccttatctagaatgcttttctttctttccttttttttttttttttttttgagatggagtctcactctgttgcccaggctggagtatgcagtggcgagtctcggctccctgcaacctctgtctcccggtttcaagtgattctcctgcctcagcctccgagtagttgggattgcaggcagccaccaccatgtccagctaatttttgtatttttagtagagacagggttttgccacgttggtcaggctgatcttgaactcctgacctcaggtgattcgcccacctcagccttagaatgcttttctaacgcaggcactgcagggctccatctttgcagatgctccctctccaatcatgtggtgcctgtgtatttagggcatgcagtgagatcacttcaccagcgttactcctctcctcctctgctcctgctgccgtaccacccaccctacgtgtataatgaacttctctccaggatggaaggcggtgtgtgtcctgcttgtcttggaacctgctcctgacctgagaagactgcagtgaggtgggcccagctctcagagtggacccgtaagtgagggtcgaggccacacgggaaacttgctagaatgctgggccccggggagtgagaccctttgtagggacttctgtctctacttctttttcccccatcattctcattctgatcctgatctcctttatagcactgagaaagctaccaactgaagggcagttagtggaatttgcaccaccacagcctgctatagtctggtgagacatgcctcattaggagggaacaaccattgactgaccctgccaggcccctcacatacttgtctgttaggcagatcctctcccattctacagatgaggaagctgaggctcagagagatgcagaaattcagaaagctcactcccctgacacccattgttctgtcttgttgttgttgttgttgttgttgttgttgttgttgttgttttgagactgggtctcactcccttgcccaggctggagtgcaatggcctaatcacggctcactgcagccttgacctcccgagctcaggttatcctcccacctcagcctcccgagtaactggaaccacagaaccacaggcacgtgccaccatgcccagctaatttttgtatttttctggagagatggagtctttcgtatttttctggagagatggagtgttgtccaggctggtcttgaactcctaggctcaagcgattggcctgcctcagcctcccaaactgctgggattacaggcgtgagctactgtgtctggcccccattatctttatcattagttcaccagcaaacagaaggctttggaacgagatccaagactggaatttttaaaattctaaattgttctaagccaaatttacattaaagcaaaagcagcactgtttgctgcttcccgggatcatctgtccctccaatctcctgggagtggctttctagtatctccctggttgtttctgaagtcttctgtcccagcttcctgtcacctctctccattctaccccttcactaccacccaagagcaaatgagtgtggctctttaggttcttggccaaagccctggtcctcctgtgttacccagaagagatggaacccacaggccactgctaaaaagtctccaacggtgttaaatatccttggaggagcagggaattccaggaacaaatgcttggtgtcattccgaggtgggtgcacaggcccccagcagtctctgctgagtcccgcagcctggaccagggcctctggaaaggcacagtgcctggctgcagctcacagacctggctttagaatggctcagttggtgttgcatgctttgggttgtttggaattccctgctcctccaaggatatttaacaccgttggagacttttagcagtggcctgtgggttccatctcttctgggtacaggaagcagaaggccagagtggttaggagcacagacttcagcatcagcatacctgggttaaatccacccttggcctctttccacatgatcctgacaggtgactttgttccctcctgtagtgcccgtggaggcgggaagctgagcccggctcccaggaagcacagtgagggctcagccattgatgatgatgatgatgatgatgatgatgatgatgatgatgatgatggtgatgatgatgatgctgctgctgttgacgatgagtccaagccaagcctggggagaaaagaataaatagtctcataaatttaaaaaagcccaatgctcatcaagaagagaacagataaactgtgtattcacccaatggtgagtttaaagcagttaaaaatgcatgacacacagttgcatatgtcaacatgaatagatctcagacacttaacaatgagtgaaaagagcacattatgggaggacacagacaggatagtgcatttatataaagcttcaatgttgcaggctgaaagagtgagggtcgtgatcaactcagtatcctggaggctacatgggtaaacagcaaactgttctcataaatgcagaatgttggcaaactgacaaactgcatctgccgcccagaaggaatgcggagggcagccactccctaagcgcagttttcttgtgattaggtacatctgaagcctgttagcaataatgtgaacctgtgatcaattaagcagctgaccaatcattacctcctcttccctgctctttctacccagtaaatacaaagggctgtagaagctcagagctgctgcttttgctcagtagaagcagggagtcctcttcttcttcccccgaccccttcttttaaaacagtttcttttaagttttcatttctgcgttcatcctccttcattcagtcccgtagtaaccgtggcaaaccacggcacttcaaaacctcataaaaagcaccacatattgcttatttggatacatatgttgtaaatgtgtgaaaacatgcatgggaatgacaaataccaaagtcaggatagtgactggccatggggaagggatggttattattgtcgtcttatatcttcaattccaaatgagccacgggcttaaaagtacttcattgaataaaaaaaaaccaacaatgtattaatgcaatcattctgattgtggttatatattaaggccaggcacagtggctcatgcctgtaatcccaacactttgggaggctgaggagggtggatcacttgagcccaggagtttgagaccagcttggacaacatggtgaaaccgtctctacaaaaaattaaaaaattaccctggcatggtggcatgtgcctgtagtcccagctactcaggaggctggggtgggaggatcacctgagcccaggagttcgaggctgcagtgagctgtgattgtgccactgcactccagctgggacaacagcaagaccctgtctgtaaataaataatatatggcacttattatgtgccaggcactgagtgctttgtatgtgacttgctgaatcttctcaacaactctaggagttaggtgccattattagccctatttacacatggggaagcaaaaccacatagagacaaagcaacttggctagggccctccagttagtacgtggcagagactagatttaaacacagccgtctgactccagagccctccactatcagaaaaacattatcatccgggtgcggaggctcacatctgttaatcccagcactttgggaggccaaggagggtggatcacttgaggtcaggagttcgaaaccagcctggccaacatggtgaaaccccgtctctactaaaaataaaaaaaaattagctgggcgtggtggtggacacctgtaatcccagttacttgggaggctgaggcaggagaatcacttgaccccgggaggcagaggttgcagtgaactgagattgtgccattcattgcactccagcctggggaacagagcaagactccatctcaaaaaacaaaacattctcggtataagcagacagtgggattccagtgtgaatacagagtgtgagtctgtataggctggaacaaatgactcttcaaggatgatgattttacacaagcagcaaaaaagaagaaaaagagtggaaataaagtggtacaataaaaattggattttcctgggccagtgagttgtacctgcctggtcccctgtgcattacctgttataaaagaacattgtcacagagtggatgaacacactgaaatattttagttatttcagttacttcaatcaaatatttcaatcaatttcaactgaagcacagtaacctagtccataagccaagcccagttttccagaccaagcactaaagaagacattctagaatgaaactgatgaattccattgctcaaggttgggaagaaacccaaactacagagacagtgatctgagttacgctccttggagtaaaaagtggcaccagctgttggcaagaagtttgtaaaaccagctgctgctggccgggcgtagtggctcacacctgtaatcccagcactttgggaggccgaggtgggcggatcgcctgaggtcaggagttcaagaccagcctggccaacatggtaaaaccccatctctacaaaaaaaaacataaattagctgagcatggtggcttgtgcctgtaatcccagctactcgggagactgaggcaggagaatcacttgaacccgggaagcagaggttgtggtaagccaagatcacaccactgcactccagcctgggtgacagagcaagactctgtctcaaacaaaaacaaaaaacagcagctgttgacctccagcaccagatgacaaggctggtgggaagtgtccgtggcagactatgtggaaggacactgtcaacacatgcgctccttcttacaactgggctgaatggtgctgagcagaatttgagtctcctcctggagggagcgctgcctctttatgaaggggaagtgctcagatagtgcttgctctgtttatcattaaaattgcttgctcggatgacaccaaaagcacagacaaaacaagaaaaaataggtaaactgttctacttcaaaatttaaagctacaatccaaggacacaatctgcagggtgaaaaaggcagtctcagagtgggaaaaaactgtttgcaaatcacatatctgataaggggctaatatccagatgcaagaactcctatactcaacaacaaaaaacaatctgacttaaaaatgggcagaagtttggtggcgtgtgcctgtagtcctaactacttgggaggctcaggtggcaggatggtttgagtccaggagtttgagaccagccaaagcaacacagcaagaccccgaatctatttaaaaataaatgaaatcaaaaccagaaaaaatgggcaaaggatttgaatagccatttctctaaataaattatacaaatggcaaataagcacacaaaaagatgctcaactgaaatgcaagtcaaaaccactacctcatacctattagaatggctactagaaaaacgaaaaacaggccgggcacaatggctcatgcctgtaatcccacactttgagaggccaaggagagcagatcacttgagcccaggagttcatggccagcctgggcaacacagtgagacctcatctctacaaaaaagaaaaagaaaaattagccagtcgtggtggcacatgcctgtaaccccaactacttgggaggcttgcttgagcccaggaggtcaaggctgcagcgagccatgattgcaccacagcactccagcctgggcaacagagtgagaccctgtctcaaaaaataaaaatggttggggcaaattcctacccattctctctgaagcacgtgtgcccctccctgtggatatagaatccctggatctagggtgtaatggtatggggaatccaccaccttgtctgtttctaagaaaaacaacaacaaaaataaagggatgggttaaagttcctgaattagccgcccctggagctgtccctgtcccagcagcggcttcccacaagaccaactttttttttttttttttttttgagacggagtctcgcccaggctggagtgcagcggtgtgatctcggttcactgcaacctctccctcccgggttcaagcgatcctccctccttagcctctggagtagctgggactacaggctaatttttgtatttttagtagagatagggtttcaccatgtttgccagactggtctcgaactcatgacctcaagtcatccgccagcttccgcctcccaaagtgctggcattataggtgtgaaccaccgcgcccggccgaccaaggacaacttcttggtgtttcacagaagccaaaatgcccaaggaacccctggcgctctggcaagggtgggactccacccggagttgccgccagggcgccttctgcccggccgcctgcactcccctcaaccaacgcggaaccgacactcgaggccgaaacactgtgagcaaggaaaaggccgacacccaacaccggtcacgcggcggatcagacgcggcctcgggactgggcttggggaggccgggcttccggggctagtaagcgtctactagccgggctgtttagggattggtcgcctctggccctggaggcgggggttcctggagtaagacggttgctgattggctggctttccgaggcggggttgtgaagcgttggtcattctatctgggtgctgggttaggcagtacgaatactaaaattggaaccagtgacacgcagattggtgaagcgttccatattttttccatgtgataccctaaagtaggatgaaagactgtgctgagcaaaataaaatgggctatcaggggaaaaaaaaaacaaaaaaactggttctgggagttagctgttaccagaacagtctcttcctaggagaacaggcacttttaattctcagtgtctattgcataatggtcaccagatgggctatggagttgagcctgggatttgactcctgacttccctgtgtgacctggagaagttacttaacctcaattttcccatcaatataatgggaataatataaatgcctcccgagactgaggcgggcagatcacttgaggccaggagttcgagaccagcctggccaacacggtgaaaccccgtctctactaaaaatacaaaaactagccggttgtggtgcactccagcctgggcagcagagcaagactgtctcaaaaaaataataaagtcaaataaaaaagcaacttggaacctgcgcttctgctgctgatcaaatactgcactgctccttctctgctctaggaagcttatgtgtcaggctgtctctctgaccccctcttgcccgctccctccttctctcagctgcagcttctctggccttcatcaaatctgagttgtttttcttgctttaggccctgtgctgtctttccacctcccacccacaccccttatgggcagcatctccttctccaagcctagcgcctccatgatgggggctgttcctggctcctccttgtgcttttggagctctctgtacctttcctctgtcaactaaaaatgaaatcagcccttcagtgactgaatggagtcccccttggctaaggaaccccagaaaaaccttaaaaacagttcccagccatgatgagatgggggggtcagacatgcctcatgaagcctctccgttttacagtttagaaacaacaaccgaccagcattcatgttaaaatagagaacataagactggcagagcagactcttctatggcaatacagtatcaaattataaacaggacctcgggccatggcaggtgaggattaagtcacacactccacacttgccacaagttttctttttctctagcagctaaacaagttctagatggcctggagataagcaatattaaaacaattacaattcacccagctcccagaggctgtgggactgaccacctgttccaccagccataactacagctttcattggacaagaggctgacttcagcaactttctccagataagaagactatgaactggctctggccaatttacagagcacttgcatgccctcatcttctgaaaagccctttcaacgaatagggcctaattgtaatatatttaaatgccaagtctccaccccaaagtaaacatgggtcgaatggtacatgcatgtttgttcaatatgcatgtgtcaaaccaccttcatgaatatgcatagcccctcctacaatctgctgaatatgtatgtttagccaacccgttcagcataaagctcctaccccaaccccttctcctacctgtctctggtcttggctggaggcacgcttcctagcctgtgggatgaccaccttgcaggctgtaaactcctctaaaggagcctcctctcctttcccaaatttataaatcatgtgatttttttcaagttaacgtatcatagtaccaaatcacaggtgtaattctgctacttgtgttcacatctgattgatgtctttcccaacacacatggggccactcactttaataagggcataggagcagggatctattagttgaataaagaaagggaatgaatgaatgaatgaatgaatgaaggcacttaatcaagactcagctgtttgccagacaggctccagcccaaggatcaggagtacctgacctgctaaagaaagtgctcttcatctcagagctgatgaacctgaacgttccagtcatttccctggtaaagtgcccaatctacttgaaatctttaaaaattggcatgtttgggccgggagcggtggctcacgcctgtaatcccagcactttgggaggccaaggtgggcggatcacttaaggtcaggagttaagaccagcctgaccaacatggagaaataccggtgtctccactgaaaacacaaaattagtcgggcgtggtggcagatgcctataatcccagctactcgggaggctgcagcaggagaattgcttgaacctagtaggcagaggttgcagtgagccaagatcgcaccattgcactccagcctgggcaacaagagtgaaactctgtctcaaaaaaaaaaaaaattggtatgtttggttgggcatggtgactcatgcctgtaatctcgacaccttgagaggccgaagcaggaggatcactggagcccagaagttcgagacgagcctgggcaaaacagggagacccccgtctctaaaaaacaaattgtttaaaaattagccagaggtaggctgggcgtggtggctcatgcctgtaatcccagcactttgggagaccgaggtgggcggatcacgaggtcaggagatcaagaccatcctggctaacacggtgaaaccctgtctctactaaaaatacaaaaaattaggcaggcatggtgatgggcgcctgtagtcccagctactcgggaggctgaggcaggagaatggcgtgaacccaggaggtggagcttgcagtgagccaagatcgcaccactgcactccagcctgggtgacagagcaagattccgtctccaaaaaaaaaaaaaaaaagccggaggtggtgcatgcacctgtagtccctcctactgggtggaggtgggagtggggaatcacttgagcccaggagatcaaggctgcagtgaactgtggttgtgccactgcactccggcctgggagacagagtgagaccctgtctcaaaaaacaaataaacaaataaaaaccagcatgtttgtgtcatcttaattgacagatcatcatcctgattatcatcaccacaaccatttgttgcgaactcatcaggtgtgaggtgctgggcttttgacatgagcctgtgacgttgtgacatgctttgccaacgtttgtcattatt

SEQ ID NO: 171 - DNA, 3782 bp, Homo sapiens
gtccgcgcgtcagtcggtccctagcgcggctgcggggcggagagctgcggctggcccagcgcgcccacctgaggaggcggcggggtccgcaggcgtcgcgggacgaggagatcggagccgggagactcgcgcagcgccatggcccccattggcctcaaagctgttgtcggagagaagattatgcatgatgtgataaagaaggtcaagaagaagggggaatggaaggtgctggtggtggatcagttaagcatgaggatgctgtcctcctgctgcaagatgacagacatcatgaccgagggcataacgattgtggaagatatcaataagcgcagagagccgctccccagcctggaggctgtgtatctcatcactccatccgagaagtccgtccactctctcatcagtgactttaaggacccgccgactgctaaataccgggctgcacacgtcttcttcactgactcttgtccagatgccctgtttaatgaactggtaaaatcccgagcagccaaagtcatcaaaactctgacggaaatcaatattgcatttctcccgtatgaatcccaggtctattccttggactctgctgactctttccaaagcttctacagtccccacaaggctcagatgaagaatcctatactggagcgcctggcagagcagatcgcgaccctttgtgccaccctgaaggagtacccggctgtgcggtatcggggggaatacaaggacaatgccctgctggctcagctaatccaggacaagctcgatgcctataaagctgatgatccaacaatgggggagggcccagacaaggcacgctcccagctcctgatcctggatcgaggctttgaccccagctcccctgtgctccatgaattgacttttcaggctatgagttatgatctgctgcctatcgaaaatgatgtatacaagtatgagaccagcggcatcggggaggcacgggtgaaggaggtgctcctggacgaggacgacgacctgtggatagcactgcgccacaagcacatcgcagaggtgtcccaggaagtcacccggtctctgaaagatttttcttctagcaagagaatgaatactggagagaagaccaccatgcgggacctgtcccagatgctgaagaagatgcctcagtaccagaaagagctcagcaagtactccacccacctgcaccttgctgaggactgtatgaagcattaccaaggcaccgtagacaaactctgccgagtggagcaggacctggccatgggcacagatgctgagggagagaagatcaaggaccctatgcgagccatcgtccccattctgctggatgccaatgtcagcacttatgacaaaatccgcatcatccttctctacatctttttgaagaatggcatcacggaggaaaacctgaacaaactgatccagcacgcccagatacccccggaggatagtgagatcatcaccaacatggctcacctcggcgtgcccatcgtcaccgattccacgctgcgtcgccggagcaagccggagcggaaggaacgcatcagcgagcagacctaccagctctcacggtggactccgattatcaaggacatcatggaggacactattgaggacaaacttgacaccaaacactacccttatatctctacccgttcctctgcctccttcagcaccaccgccgtcagcgcccgctatgggcactggcataagaacaaggccccaggcgagtaccgcagtggcccccgcctcatcattttcatccttgggggtgtgagcctgaatgagatgcgctgcgcctacgaggtgacccaggccaacggaaagtgggaggtgctgataggatccacacacatcctcaccccacagaaactgctggacacactgaagaaactgaataaaacagatgaagaaataagcagttaaaaaaataagtcgcccctccaaaacacgcccccatcccacagcgctccgcagcttcccaccaccgcccgcctcagttcctttgcgtctgttgcctccccagccctgcacgccctggctggcactgttgccgctgcattctcgtgttcagtgatgccctcttcttgtttgaaacaaaagaaaataatgcattgtgttttttaaaaagagtatcttatacatgtatcctaaaaagagaagctcatgtgcaattggtgcacagcaggagaaatttctggactgttaggatgaatggacgccttctccccgttatttaagatttgtgaccttgtacataaccctgggtgacgtgcacattgcttgggtatggaacggtagaaatttgggtgtttttaaaaccttgtttggggttgttcctgtccttgttgagaatcatagagatgtctgtgttcttggagtatttcacactgaggactaatctgctatcttcattccagtccctacccctcagtgcctgctctcatccaaataacctgggaggtgacaatcaggatatctcaggaggtccaaggtggaacagacctctttgcctttcccagcgtctcatacccccggtagtgcagctgtgggtggaggctggggtgtctgcacgaagtcaggccagcgtcctcctccacagcctgtcactgccccctccccagcctgtgtccacagtgctgtgatcccgagggaagtcctccagtctaagtcacagtgccctgacaggtgagaagcaaactcccgctggaagcctccatctctttggaaaaacagttagtctggagcctgtggcccaggcccttctgtccccaggcatcatcccaacagctcattttccctagtccgccttcgttcaagggtcaggaatggaccagaacagatgggttctggaggcccctgaacagagggctatggctgtggagaaggttcttggcccgttggactcacacagaccctgtaccctctcggcaagcatcttcagtcagattatcctcagtttcagatacttcataataccttgtgttgtgtggggtcatacatcatcgtgtttgtaagagaagatggtcattttattctctgtataaaacttagctctaaagcagaaactaaagcagcaaatgcaggaaggctgtctcgccatcctcaagactcagcagctctcattctccagtggtgagcacaccatttgtgctgctgctgttgtcgtgaaatataataacagtggaagtcacaaaaatgtcccctgcccagccccctcgccgcccttgacctcctgcaggccatgtgtgtattacttgtctagtgatgtcctctcaaagtgctgtacgcgagctcggcgccacctccgcctccctttcagagcctgctccccgccctctctgctcgctgcattgtggtgttctcttctcaaggctttgaaatctccccttgcactgagattagtcgtcagatctctccccgtctccctcccaacttatacgacctgatttccttaggacggaaccgcaggcacctgcgccgggcgtcttactcccgctgcttgttctgtcccctccctcggaccaaacagtgctcatgcttcaggaccttgtttgtcgaagatgttggtttccctttctctgttatttatataaaaataatttatcaaaaggatattttaaaaaagctagtctgtcttgaaacttgtttaccttaaaattatcagaatctcagtgtttgaaagtactgaagcacaaacatatatcatctctgtaccattctgtactaaagcacttgagtctaataaataaagaaatcagcaccccttcccggtgtccaggggg

SEQ ID NO: 172 - protein, 592 aa, Homo sapiens
MAPIGLKAVVGEKIMHDVIKKVKKKGEWKVLVVDQLSMRMLSSCCKMTDIMTEGITIVEDINKRREPLPSLEAVYLITPSEKSVHSLISDFKDPPTAKYRAAHVFFTDSCPDALFNELVKSRAAKVIKTLTEINIAFLPYESQVYSLDSADSFQSFYSPHKAQMKNPIRLAEQIATLCATLKEYPAVRYRGEYKDNALLAQLIQDKLDAYKADDPTMGEGPDKARSQLLILDRGFDPSSPVLHELTFQAMSYDLLPIENDVYKYETSGIGEARVKEVLLDEDDDLWIALRHKHIAEVSQEVTRSLKDFSSSKRMNTGEKTTMRDLSQMLKKMPQYQKELSKYSTHLHLAEDCMKHYQGTVDKLCRVEQDLAMGTDAEGEKIKDPMRAIVPILLDANVSTYDKIRIILLYIFLKNGITEENLNKLIQHAQIPPEDSEIITNMAHLGVPIVTDSTLRRRSKPERKERISEQTYQLSRWTPIIKDIMEDTIEDKLDTKHYPYISTRSSASFSTTAVSARYGHWHKNKAPGEYRSGPRLIIFILGGVSLNEMRCAYEVTQANGKWEVLIGSTHILTPQKLLDTLKKLNKTDEEISS

SEQ ID NO: 173 - DNA, 3908 bp, Homo sapiens
gtccgcgcgtcagtcggtccctagcgcggctgcggggcggagagctgcggctggcccagcgcgcccacctgaggaggcggcggggtccgcaggcgtcgcgggacgaggagatcggagccgggagactcgcgcagcgccatggcccccattggcctcaaagctgttgtcggagagaagattatgcatgatgtgataaagaaggtcaagaagaagggggaatggaaggtgctggtggtggatcagttaagcatgaggatgctgtcctcctgctgcaagatgacagacatcatgaccgagggcataacgattgtggaagatatcaataagcgcagagagccgctccccagcctggaggctgtgtatctcatcactccatccgagaagtccgtccactctctcatcagtgactttaaggacccgccgactgctaaataccgggctgcacacgtcttcttcactgactcttgtccagatgccctgtttaatgaactggtaaaatcccgagcagccaaagtcatcaaaactctgacggaaatcaatattgcatttctcccgtatgaatcccaggtctattccttggactctgctgactctttccaaagcttctacagtccccacaaggctcagatgaagaatcctatactggagcgcctggcagagcagatcgcgaccctttgtgccaccctgaaggagtacccggctgtgcggtatcggggggaatacaaggacaatgccctgctggctcagctaatccaggacaagctcgatgcctataaagctgatgatccaacaatgggggagggcccagacaaggcacgctcccagctcctgatcctggatcgaggctttgaccccagctcccctgtgctccatgaattgacttttcaggctatgagttatgatctgctgcctatcgaaaatgatgtatacaagtatgagaccagcggcatcggggaggcacgggtgaaggaggtgctcctggacgaggacgacgacctgtggatagcactgcgccacaagcacatcgcagaggtgtcccaggaagtcacccggtctctgaaagatttttcttctagcaagagaatgaatactggagagaagaccaccatgcgggacctgtcccagatgctgaagaagatgcctcagtaccagaaagagctcagcaagtactccacccacctgcaccttgctgaggactgtatgaagcattaccaaggcaccgtagacaaactctgccgagtggagcaggacctggccatgggcacagatgctgagggagagaagatcaaggaccctatgcgagccatcgtccccattctgctggatgccaatgtcagcacttatgacaaaatccgcatcatccttctctacatctttttgaagaatggcatcacggaggaaaacctgaacaaactgatccagcacgcccagatacccccggaggatagtgagatcatcaccaacatggctcacctcggcgtgcccatcgtcaccgattccacgctgcgtcgccggagcaagccggagcggaaggaacgcatcagcgagcagacctaccagctctcacggtggactccgattatcaaggacatcatggaggacactattgaggacaaacttgacaccaaacactacccttatatctctacccgttcctctgcctccttcagcaccaccgccgtcagcgcccgctatgggcactggcataagaacaaggccccaggcgagtaccgcagtggcccccgcctcatcattttcatccttgggggtgtgagcctgaatgagatgcgctgcgcctacgaggtgacccaggccaacggaaagtgggaggtgctgataggttctactcacattcttactcccaccaaatttctcatggacctgagacaccccgacttcagggagtcctctagggtatcttttgaggatcaggctccaacaatggagtgagagccaaagaaacaaagatccacacacatcctcaccccacagaaactgctggacacactgaagaaactgaataaaacagatgaagaaataagcagttaaaaaaataagtcgcccctccaaaacacgcccccatcccacagcgctccgcagcttcccaccaccgcccgcctcagttcctttgcgtctgttgcctccccagccctgcacgccctggctggcactgttgccgctgcattctcgtgttcagtgatgccctcttcttgtttgaaacaaaagaaaataatgcattgtgttttttaaaaagagtatcttatacatgtatcctaaaaagagaagctcatgtgcaattggtgcacagcaggagaaatttctggactgttaggatgaatggacgccttctccccgttatttaagatttgtgaccttgtacataaccctgggtgacgtgcacattgcttgggtatggaacggtagaaatttgggtgtttttaaaaccttgtttggggttgttcctgtccttgttgagaatcatagagatgtctgtgttcttggagtatttcacactgaggactaatctgctatcttcattccagtccctacccctcagtgcctgctctcatccaaataacctgggaggtgacaatcaggatatctcaggaggtccaaggtggaacagacctctttgcctttcccagcgtctcatacccccggtagtgcagctgtgggtggaggctggggtgtctgcacgaagtcaggccagcgtcctcctccacagcctgtcactgccccctccccagcctgtgtccacagtgctgtgatcccgagggaagtcctccagtctaagtcacagtgccctgacaggtgagaagcaaactcccgctggaagcctccatctctttggaaaaacagttagtctggagcctgtggcccaggcccttctgtccccaggcatcatcccaacagctcattttccctagtccgccttcgttcaagggtcaggaatggaccagaacagatgggttctggaggcccctgaacagagggctatggctgtggagaaggttcttggcccgttggactcacacagaccctgtaccctctcggcaagcatcttcagtcagattatcctcagtttcagatacttcataataccttgtgttgtgtggggtcatacatcatcgtgtttgtaagagaagatggtcattttattctctgtataaaacttagctctaaagcagaaactaaagcagcaaatgcaggaaggctgtctcgccatcctcaagactcagcagctctcattctccagtggtgagcacaccatttgtgctgctgctgttgtcgtgaaatataataacagtggaagtcacaaaaatgtcccctgcccagccccctcgccgcccttgacctcctgcaggccatgtgtgtattacttgtctagtgatgtcctctcaaagtgctgtacgcgagctcggcgccacctccgcctccctttcagagcctgctccccgccctctctgctcgctgcattgtggtgttctcttctcaaggctttgaaatctccccttgcactgagattagtcgtcagatctctccccgtctccctcccaacttatacgacctgatttccttaggacggaaccgcaggcacctgcgccgggcgtcttactcccgctgcttgttctgtcccctccctcggaccaaacagtgctcatgcttcaggaccttgtttgtcgaagatgttggtttccctttctctgttatttatataaaaataatttatcaaaaggatattttaaaaaagctagtctgtcttgaaacttgtttaccttaaaattatcagaatctcagtgtttgaaagtactgaagcacaaacatatatcatctctgtaccattctgtactaaagcacttgagtctaataaataaagaaatcagcaccccttcccggtgtccaggggg

SEQ ID NO: 174 - protein, 601 aa, Homo sapiens
MAPIGLKAVVGEKIMHDVIKKVKKKGEWKVLVVDQLSMRMLSSCCKMTDIMTEGITIVEDINKRREPLPSLEAVYLITPSEKSVHSLISDFKDPPTAKYRAAHVFFTDSCPDALFNELVKSRAAKVIKTLTEINIAFLPYESQVYSLDSADSFQSFYSPHKAQMKNPIRLAEQIATLCATLKEYPAVRYRGEYKDNALLAQLIQDKLDAYKADDPTMGEGPDKARSQLLILDRGFDPSSPVLHELTFQAMSYDLLPIENDVYKYETSGIGEARVKEVLLDEDDDLWIALRHKHIAEVSQEVTRSLKDFSSSKRMNTGEKTTMRDLSQMLKKMPQYQKELSKYSTHLHLAEDCMKHYQGTVDKLCRVEQDLAMGTDAEGEKIKDPMRAIVPILLDANVSTYDKIRIILLYIFLKNGITEENLNKLIQHAQIPPEDSEIITNMAHLGVPIVTDSTLRRRSKPERKERISEQTYQLSRWTPIIKDIMEDTIEDKLDTKHYPYISTRSSASFSTTAVSARYGHWHKNKAPGEYRSGPRLIIFILGGVSLNEMRCAYEVTQANGKWEVLIGSTHILTPTKFLMDLRHPDFRESSRVSFEDQAPTME

SEQ ID NO: 175 - DNA, 24793 bp, Mus musculus
tgtcttcaggcacaacaaataaacgaacttacaatcctgaaatcagagcagctgggacacattggacctacacacaatctggctaaatgactgccatgcatagaaagggtgggtagagagcatctggagagatggctcagcacttatgagcgcttaactgctcttgcagaggacctaagttcaattcccacacccatgtgaagtgtctcccagccaccaggagctccagctccaggggctacgatgccctttcctggcccccacaggctcctgcttgttcttggacacacacatgtatatgtgtgcacacatatacacatgcatgagtacacacactcacaaataaatattttgcagattttaaaaaaaaattttaatcatgtgtatttgtgcatggtgggaggccagcatgggacacatgagaccctgtctttatattggactcacggactcaatggttacaaacatccttttattgaaagtgaggctgaggaagcttaataatttatcaggcaggggaccctcagaagtccactttccctgagtccatggggtcagtgggcaagtggaagactccagggacctcctgaggactgttgggaccagcacattccatcccaggcacacagacactctcgggagatgagacgggcagcgtcccctctctctgagaatggcgacccaggttgtccaacaaggcacagtggcagagaaggtttggcagactggttgagtgtcaggggtcaacaaaggacaccatgatgtatcgagtaccccgggtggtgggcagcccctcatggtagtgtgtgaggcggccagggtgcaggagggcccagcctttcctcggagaggagattctgcagtcgtaacgcaggaagcggcagccgcctccctggggagatgagatcacgaaaataaaactaaggttagttcacagggtgatgagggtgcaggggggcaacaggcatgtgggagaggtgccaatcaaatggacaagggaggctatgtggttgttgatctggactgccaacttggtggagtttagaatcatcatagaaacaaacctctggagatacctgagtgggagtttctaaaatgggttagaggagggcagggagagccaccctgaatcagggtgagccaacccaccggctggcatctaggactgaataaaaaggacaaagtgagctgggcaccaggactctctctgcttcctgattgtggacacgctcctgccgttgctgtgccttccctgtgagggaccgtccccttggacttagaccctccctcttttccttccactatcttgtcagggagtgtgtggcaggaacagggacgtcaccagtggagtcctggggagcaggaggaaggaggagagcagctgtgctagttgggattttgtcaacttgacacaagctgggattgtcaggacctcgggaacctcaactgaggaaacacctctgtcagattggcctgtgggtgagcctgtggggggcagttcttgacagatgaatgatgtgggagggcgcagtccacggtgggtggggccatccctgggctggtggtcctggagtgtctaagaaaatagctaagcaagccatgaggagcaaggcagcaagcagcatcatggcttctgcatcagctcctgcctccaggttcctgccctgcttcagttcctgccctggcttccctccacgatggactgtgacggagacgcttaagcagtgtaactttccttcttaagtttcttccgtgcggtgttttgttacagcagcggaaagctaattaatatggtggctgagccaagacacgacaggaaaccactgagaaactcaagaaggcccagccggaggctagggggtaacagagacaagaccgtaaaatgaagggtgtggaggagccccccgggccccaagacagaaaggaccctacattcacctcataatctacacccttgtggttgagggcgacattgagagtgaaggtggacgagtcatggtgtggccgaagcgagggctgctcatctggccggtagcggaccacgaagttcatcactgcccgtgtctgtgaggacacaaggtggaagtcatgggaagggcagggcacgccaaggctagccctttacttgttttgtacatgaggtggaagacatgggaacaagcactttatagaccaagccatctccccagtcccgttcctccccattttttgagacaaggtattttttgtagcccaggctggcctcaaactatgtagctcgagacgaccctgaatttctgatccccctgctctaccgtctgagtgctgggatcacaggctgtgctcctacccccaggctatgcagtgctggggatggaagccagggctttgtgcgtgctgggtgagcgcactggctgacccacatctccagcctctctctcctgttttgagacaggcgctcactgcacagcccatgctctcctcaaactcgaccttcctgcctcagtttcccaaatgctgaggttacaggtgtcaacacgccctgccagtgactctcctaatagcacagtggcccgagtaggaggcttaacttccttccgagtccatctttatcctgggccccaagtccgtggcgcctcagttgctaaagggctgagggcggggtccacatagagccttccgagactggggtacaagaagaggtacagcagcggttgggatggcccaccttggtgtggtagccagggaacaggtactccgtcatgggccccacatatgtccgcagcagctgaagccactggtcctcgtatcccacctgtttcatgtggatatcaacggtgggaacattctcgtatcctccagccaacctggaatcctgtgagcaacagacactcagccacccacatccctgggctagcccattctccttcagggacaataccagcttcttcttgttggttcccaggttttttgttttggttccctggaacttgatctacagatcaggctgggcttgaacttagagattcacctgcctctgtcgagagtgctgggattaaaggtgtgcagatgactgcccagccggagtctctttctgtctgtgacatctagaagcagttttctcttctattgtcaaggcagactcactgctgccgggccctttagtctctgctgtccttagctctgctgtgaatccacgccaccttcccatgctatctaacatccgtagccccaagcaacctctgtgttatagctaaccttgactgtcaacttgatgggacctaggttcacctagaagacaagcctctgggcatgctggggagggactgtctagcttaggttaacggagatgggaagacctgaccactgtgggtgacaccatcccctgggctaaggtcctggcctgaaagtgagctgagcaacagaactcatctctctgctttccgactacagtgcaatatgaccacgtgaccagctctctcacgctcctgctgccatgccttcctgccatgatgggcttgtgcccgcagactgtgagccacaagaaaccctttcttcaagttgctttggacatatactttctcctggccacaagtaactagcatactctttatgagccccgcccttggggatcccctctatcccccaagtcccctgtccctcttcaggcccaccctgtccccttgggagccctctgtcctcacctcgtgccggcctccagaccactggccatagtgttccatttcctccaccagctcatcacacatctgctcggtcagcagtgggaaccagtacacatctgggcatggctagggacagagcagggcagcaagggacaaggcaaggtgaagctcacagaagagaggtgggacaggcaacaaggacaggggaggggagacacacaggagaggatctatggagggctgacccaagctctctaggtggagagaggaagggtgttttagcagaggagggcaggaatagggggcctggagccccaacatctagaacaatgatcttgtcctgtcttttttcctcctttttgagacagggtcttttgtagcccaggctgtcctcaaactcactaggtagctgaggctggcactgatcgtcctacttgcacttcctgaatgccgagatcacaggcgtgcaacttcatgctcgggttatactgtgctgggaactgaacctagggctctgtgaatactgggggagctctctactgcacgagccccagctccagcccatctacttacttatttttagacaaggtcttactatgtaatccaggatggcctttttttttttttaagagttatttattttatgtatgtgaatacactgtagctatcttcagacactccagaagagggagtcagatctcattacagatggttgtgagccaccatctggttgctgggatttgaactcaggaccttcgcaagagcagtcggtgctcttaactgctgagccatctctccagtccccaggctggccttgaactggctacgtgtctgatgctgccctgcaactccaaatccctgttatcttcctcgacctgggctctggcattattggcatgtaccacacctctgtttgtttttatgtgcgtgtgcgcacggctgtgtgggggtgtgcatgtgcgggtgggcacggctatgttgggggtgtgcgtgtgcacatttgtgcattcgaaggtctgaggttgacaccaggaactgctccattgttctttcaccttatccaccgagcatgatctcctaattgaacccagagcttacggatgcagccagtcttgcgaatcaacctgctgcgggtcctcagtctggaactgcaggtgggctctggagacctgtactaggtcgccatgcttatgtcctaagcacttgaccactgagttctctctcagcccatcttttttcttcttttgagacttggtcttgccatctgaccatggctggtctggtacctattatgtagcccaggttagcctgaaactctccatccttctgcaccaccttccagacctctaagattacaggcccttaacacttagtgtggccgttagccttcctctcgcccgaataggaaaccctcagtccccgggtgctcagcttagaacccaccaatgccagcagtgggtacttcacacgggccaaggtcctggggcagcttacctgttccactagcccttccccatccagggcccggctgtaattctcgtgaatgtactgttctctccagtcctgtaggaagggttagggcgctcgagcggagccttcttaacgcctgccctcccatgatcagcaatggtggtgggggctatgggctggaagcagggagcaaaggtcccctcttaccacagggttgtcaaagatctgccagaggtctgggtgtaggtggtctgtgtcatagcgagaagtagccagcagccggccaaactcgtgctggttgctgaggtggaggaagatgccctggagcggggtaaagggtgggcatgcgtgaggaggacatcaggaggctgtgggcacagcgtcgagtccccatgggcaacccatgccaaccaccccactcaccttgtcccggacgctcttgcagaaagccatatctgggtctgtgtcgctgctggagaatacctccttttggggcagttcagtcctcagggtctccccgcggatcacatatgcctgagatatgtagggtacattccacacgcccctgcaggcaccgggtatgatcagctaggtgggcaaccccacagactacgctttgctcactgcagaagctcctcctcggtgtcccccagaatcccaagcctgaggccatcatatcaccctttccatagcgggggcctagtgtgtatgtaggaggctgcggagggggaccgagggaagggcctgcctggcactgcacggtacgtgggtgggactcacactcgcttccgctgcaccagttccacgtagtcttcggagcgggcgtagtactcattggggctcagggcaccccagaagttggaccagagcttgccatggcgggaaagcatgggagctattaccttcctatggagaagacgtaggtgagggatggacgagatgggataggactatgccccaccaggggaaggggtgaagctcttctggggctccatgcatgggtggtgctggtcacctgttttgttcaatcaagacacgcaaggtctccgggttcgtaaggacggcatcagcatccaggctaaagtagaactcacactcagggttctgccgacagctgtccctggaggagaagagccacagatagagaggtgagcccaaatgggggcatggaggcagggcagtggggatggagggatgagcggggctctcctggttctgacatgaggtcaagggtcagtgtctccttccccaggggctccactgtctgtgtcagaggatgagggaggggagcgtagtgtgaccacagcccaggcagactcactcacatggccatgtccctggcctcccctgcgctcagggcctcctctggccccaccagctttacagctgaaaaatggtcctggagctgtggccaggcatctgcaatatgaggctcgtggtacacctcctgaagatgggcggagagagggatacactgacggtctgggcagagaggtgggtacatgggggatgcagtcagggaggacagacggaaggaggtgtcagtgcggtgggatgggggataaggggtatgctctccatatctcacgctgttgtgaaggaagagagagatcctgtccggggggtaatccaggagcagtaggcgctgcaggaaccgaggcaggaagggagtaggctgctccacaaacacggccagaagcacccgggggggaggctgggggacaccacaggacaaggctcacacaagcccagacctctctctgcccacagcagtcacccactgcccactcggccaggtccaggtgcacaggagctcagccccaggccgcccagctggccctctgctgacatccgtgctgtcctcacctgcccccccgggagtgtcctcagggtctggttgcagaatccacagcctccctggggagtccagccattggggacatagttccccaggtagttgagctggagctgttgggacagggttgagtggctaaagtggaggtgtctggggacagatggcaaggacattgggctcaggaaaaagtcagcagggtgaggcagccatcctggcacccttttctgctggaaatggagaaaaccagggggagggggtccaggagggttggggtagcagggggggggcgtggagggctgagggcatgggggcaccttagtgggaccatttccatggaccacaacaggaagtgtgtcgtaggccacattccggatgcgcacacgattctggtcaaactttaagatcacttcatctgggggcaaaaaggggaaggttttcaagagctccttcattttggaaccacgaggcaacaggctctttaaggtgtgaagcgataggatcccaactcctctggtgcacaaaggtctttgcaagtgctcggtagatcgatacccgagctccaaacaccagtttttccttttgtttttgtgtggtgctaagaattgaacctaggagtttctgtatgctagacacactctctaccacagagttacacccccagcctttcattgggggattctaggcaggtgctctaccactgagccacacatccatcgctaacacacatgctcaggagttggttaagttagcatactggtgagttgtagatcaacccagttctggcaggaacccatccctcattacccacctctaaccaccgtcctcacctaaggctccattgaggttctgaaagatccgggatttatggtccagactaagtttgagtttctcctagatggcataagatggagcagtgaacggaggggggacaggtgacactatatctctctttctccaactccctttatgcctcccctcccattcaactggagagggggttcctgtccctgagtctccctacccgcagccctgggtccaggtacagttgagtgtagaacaattgatcatcatcgtcgtctttgtagttccactggcggacaatctgatggatggtgggagcgaagccgatgaatcctgggggggtggcaagcagaagtgagttagacctcccgagactgccagggtccccgactcaagcacccagagcatgcaatgcctgctccactgggggagggagagatagagaggggacaagtctgtcttgggaactcggccactcaccaccagagttgaggaagcgcttccccatgcccacctcagggtactgctctgccagcccccactcaggccaacagaagctctcagcagagaacagcagatgactgccactctgaacaaacttcttcagcagctctgttgggctgcttgccagaatcacgtcgtagctgggcaagaaaaggggaagacgagagccaggaggaacctcagtctctttttctctctccataaccagtttcccactctttccaccccagccctccttacctgtccacaaacatgatgatcatgtctttctgatctgcatatttctccatttccttcttgagccacctgaccttctggcctccaccaactgttcgagccacatcaccccctcgccactcctgtcccaggcccagggtctgcaggaaagatcccacccccacgcagcggaagaggttcagctggccaagatgaggaaacaggaccaacccccacgacccctgccctctcccgctggaatttctcccatgggtccccccactcacccgtacagtgtagttaaagaactccgcagactgcagaaaacgccggtacccctctgtctctgccgtagccacagtgatcaccagcaatttgtctgtcatagccagagaactggcacttaagacacggcttagtgtcccacgtgtttagccctctgtatcacccccgacacacacacacacacacacacctccatattacttcactaaagttctttcagcacatttgatctccagaagagtcgggtgagagtaacatacacgaatgggggctggggtgttcctgtctgtctggggagcctggaacccctagttttgcatgaaaggctaatgcactgggttccagaaggctggacactcccttccaggctggcggacgtgtcgaccctgcccactggccgcccgggttctcacctgggttgacagcattggcgccccggggtcgatcggaggcagaagttacggggggcagcggcggcagcagcagcaggagcaggagcaaaagccggggttccgggcctgccgcagccatggctagcagcacgcttaggctacacccaggcccgcaccggcgctgagctgagcgcctggattccgacgccccgggaagattctgggaaaaggggaaaccgagcccgctgagaggaggagctgtgctcgggactccgccctggaaaaaaggcgtaacccgaggccaccgaaaacccgagatgcaaacggcgagacaaggcaaggattgtcccgcgggcgcgggctggagggtggggaggagccgagggtccggtcctgggcactgcctgactcacaccggagcaaccgaatccccccgggaggggaagtgaccttttgaggagggtccaggcgacgcgggggcgggtcttgaccacaagtctgacccggaggaacacaggacagcaaggcctggggtggcgcgcggcgggggcgacgggcccggaggggccgggaagccggaggcgggatcgcgcggacatcctcgtgggtctgggttcaacaaagccaccgaacctgcctatcctgtcccgcagcgcggggacacgcaccggggatgcaaagggcacagggacaagagcgctcccctaaagaccacccacgccagtttttaaaaagtgaccatttgcaggcggctctcagatttttttttttgggtaaccacaatgcgaccggaagtaggtttgcccctatcaaagatggcggaaagcgaaagcttgctgatctccaagggaacatcacgtaatgacttcaagcgggaggggaaagactgcgcacgcgtacgtgtgcacgccaccggaaggggtgtgctcagagcaagggtcggtggttagtacgcgtgcgcagtaggctcttctgtcaactgtgttgcgccaatggtggagaagaaacccgccggtatgtgagccttgagtggttcgcccttttgtgcttcccaagttcaaattcagcctaacatctccccgcctagcttttcacgtcaattaccttcgctcagtgttggggcagtctcggaaccattaattcgtgttttgtgactgcttgcttcagcagacgttggggatggagaggatgtgttgtctctccaaagctcgggtgctatgagcagtggtactcacctcggcttctggattgttttgcttttgttttttgttttgttttgtttttttcttcgagacagggtgcgtacccttggctgtcctggaactagctctgtagattaggctggcttggaactcacagagatctgcctgcctctgcctctgcctccacactgctgggattaaaggcgtgcgccaccatcgccccactttcctccagcttctggatgttggatggagggaacagagaaacttaggaaatcaaagggcttggctttgggtactacacaaacacgtgcacacacacacacgaacatacacacttcattccttcctttctctttttttttaatgtagcctaggctgcctatgtaaattaggctggacctcagcctcttggtgtcctgtagtcctgaagtctgtggtttgggggagttctggtttgagactggcatgttatgggaaacccagcaccaggaatgggcaggtgagatggtgcatgcagtaggtaaagttgcttgctgccaagcctgactacttgagttcagtccccaggatccacatgataggagaaaaggcttccatacagtgtcctctgatctctgcacgtgtactgcaacacctacatgtgcacagaaacactcagaataaatgcactttttgaagaaagatagaaatacaagaaaaagaggtcagagatgagcccctgctgatagggtgttgtccagcatgcccaaaactcttgctctatccccagcatcacataagcctggtgtggctgtgcacaggaggtcatcccaggccagcctgggcttcctgagatcctattgaaggttgtgggggtgagaaagggacaggccaaagagcgctatcaattaaagaaaaaggacaggcagaagcagcctcgagagcaagagaggagacaaaatgtcgggataggaaatatatccaacaagatagggggacatctgggagccacactggggagacttttagtccaaggaaggtagtcggtgcagtcacagggcacaggcatgcgtctcaggctgaaggaacattctagaaatgtacactggattttgccctactgaatcacaggtcttgagaatatggaggccagaagtcaatactgtgtcaattctcaaaggcgctctttattttaatttgtgtatgtgtgctgctctgtgcaggtgagtgtaggtatccatgaaggacaaaagaggcagttggaattacagaaagttgtgagccaccctcatggctgctggtcctgggtcctggaaacagctgtagcactctgcaagagcagggagcgctgttaaccactgagccctctctccagctgcaatttattgtgtctccagttattgctgggactgggaggacttagaggcagcataaagggccgaaacaagcttgccaagctggaagaaagcagggtgaagatctgggaattcctcacagcataatgaaggggccgaggcgaggagactggggctctaggcaacggcagtgcaactttcctcctgtcttgaccccggtaactctctttgccccatctagttcgctcccaggaccctggacagcggcgggtgctggacagggcagccaggcagcggcggatcaaccgacagctggaggcattggagaatgacaacttccaggatgacccccatgccggcctcccccagctgggcaagaggctacctcagtttgatgatgatgcagacacaggtgagatgggggttagggaggaggagcgagacagtgccgtgaagctccttgtcacccgtaactgcagatgatgccaatgagcgcagatgggaattgcatctttattgtgtttttaatttcctcattttgtgtgcatgcatatgtgtgtctgttcattcctgcacacgcttgcctgtggagatcagaaattaacttacaggagttcgttttctccttccagagttgaaattctggttactcaggttgctgagttcagcagcaggttcccttaagcaccaagccatcttagcagcccctgtttctttaaaactgcaacttattcagagagcaggcaatctgagaaatttattgatattaattaatatcaacttattgatattctaaagatccatcttctagcctgggggagccattgctcacatgtgcacgtgtgtttacaaatacacacactcacacacacacacatacacacatgacacaatgacacatacctttaagcccagcactagggacacagaggcaggtggatttctgtgggtcagcctggtcttcaattggagttccagaacagctagagttacacagaaaaaccctttctcaaacaaacaaacaaacaaaccatgttcagtcagcaggttatagacagagacaaaaggctgtcaatcatctggattggttgccatttccccttccctctgtgtcaggtgtcagccacatctctgagactagcgatggccgtgacctttgttatcatcctgtgtacttgttccttactctgctcatgtctgggctgggctccggcacttcttgaaccactgagtcaaattagtgtctgctggtgtcatctttgtactccaaggccatctgacagggagggggtggttagctcagcaaaccaaccaggaacagctgtatacgctaagctagaaacaccatgtatgtgcctgttgtctggtctgtttatagtagggagggttttgtttcttgagagagggtctctctatgtagaccaggctgttctggaactcacagagatccgcctgcctctacctcccaggtgctgggatcagcggtgtgcgccacgcccggcaagatgtttttaaactttaaataatctctcttgtttcatgtgtggcatggaggtcagaggacaatgtttgggagtagcttttctccttgtactgagggccagggactgaactcaggatggcagccttggcagccagcgccttttcccgccatcttgccggctcaagtgtgtcatttatacaaatgtaggcagagagggacagaccacataaaatatccctgcccttgggctggaggaaagggaaggcgtcgggactgtgggagggaaggctggcagtagggcggtgacttgggaattacttctggctttgccagtgcctggctcctgtgttgggagcatctgcctttcctgtctgtgtctctgtgcctcagtttcttcatatgtgtgggataaaaaagatggagcaatcaggtatagcgacccagcacacagaaagtttgaagccagagaactgccaagaatttaaggtcagcctggtctatatagtgagtttgaagtgggcttggggtaggtagtgagaccttgtatcaaagcaacaacaacaagactgtaatccgagcacctgagaggtgggaacagggagatcgatcaaagatcaccgtttatctacacagtgagttcatggccaacctgggcttcatcagctcctgtccccaaaataaaaagatggagtaggttggacttttaagtagctgacggtcgaccaggattgcagatatcagtcagcgttagtgcagatgtaggcagggagggacagaccccgattgtggtgtggataggcctctccaacaggactgtcacagccactgtccagcaactcagtgtccttcatcccccaggaaagaaaaagaagaaaactcgaggtgaccactttaaacttcgcttccggaaaaacttccaggctttgctggaggagcaggtgagagaaggctcagtctgaggttgggaccctagagagcacggagggggggggggggggtgagcaaggtcctgctcttcagcgccccttgtggacatcagctgcatggcggactggagaattccggatgcctgacccttcatgtccttgcagaacctgagtgcatctgagggccccaactacttgacagcctgtgccggccccccatctcggccccagcgtcccttctgtgctgtgtgtggcttcccatccccgtatacctgtgtgagctgtggtgcccggtactgcaccgtgcgctgcctgggtacccatcaggagaccaggtgagcccgagcctgacccagccatgcctacagtcttattccatgtagcatcccaggacctccctccttctccaatgggcttctctctctctttctgcaggtgtctgaagtggaccgtgtaaacctggcatcagggagagaaagtacccccacccttcccaacccaccccagctcattcacaaaggacagagagagggagaaactacccattcacccagcaaagctgtgccctgccgaccaaggaaggccacacggacccaggactgttgtgggggtggtccatccacagagtgctgtgataataaacggcctggtgaaaggaagcctgcctgctcattctggggtatttggaggtgaaggtcagggttgactgtcaggccagcatagactctgcctttcttcttgtagcctccattgccggccctctgtgtcatgggagggttgtgtcccattctccagctactctcaagtcatctctgcctttcttagctgctgctttactttggtttttgaaacaaaattttgtatagcctaggctagccttgaatttactatatgtatagtcattaggctgaactcctaatctttctggctctgcctctgcctctgcctcttaagcgatgttttttaaatagtttttctttccatgtatctgaagattttttcctctttgtgtttgtgcatgagtgtgtgtgtgtgcacgtgtgtgcacgtacgcacacgtatgtcatagagagtgtatagatggcagaggacaactcttgaaggaatcagttctccccttctaccctgctgagacaggacttttattgtgtctgctcctcacttagtggactttaggcccacaggctggcccacaggctgacccacagactcccaaatggttctctttcttccatcttgctgcaggtgtgctaggattacaaatatgagccctggcatgtgtgggtcctatgaatcaaacgagggtcatcaggcttccaagggtagtgcctttacccactcagctgtctcctgcccacgtctggtgtttagaaagcaagagggttgtatgtcctcctacagatgggccccaagagctggtttggagggtccagcagggaagcacaatcactcgtgtacccctggaaaaatattcctcttgagatagatagatggctcagtggttaaaaaacactggttgctcttctagaggacccagattcaatttcaaggacccccacatggcagcccgcaacagtctctagctccagcctaggggatctgctgccctcttcaggcctctgaggttacttcatacatggggtacacagacgtacatgcagacaaaacatgtacacgtaaaaaaaataacggaagaaaagactttagaaaattcctcctcccctgggagcagtcatcctctttatcagatctcgaagctgcctctaaaagcttatcaagtggccaaggaggaagcaggcaccacctagccagctcggccaagccgcagcaaccctggggaccagagtcctgtggaagctccgctcctttacctgctattggttacgctacaggtttttcctcgttttatttttaatgaaaagttgtgtgtgtgtgtgtgtgtgtaggagacacagcatgagtgtagaagtcacaagaactttgagaagttagttctcttcttccactaagttggtccctgggatcaaactcaggtcgttaaccttggcagcaagcatcttcacccactgagccctctcactggccctatttcttggctatgaatttagtttggaaggaggtgggtttgtggtttgttttgatgtttgaagacatggtctctctatatcgttctggatcccctgaaactcactctgtagatcagattggcctggaactcagaaatccgcctgcctctgcctcctgagtgctgggattaaaggtgtgcatcactgtgcctagcttgaaaggaggcactttagtttctttttcctggttctgagttcatgttttatctcttctcccttccctccatttccaccccctcctctcctctgtccctgctcccaccccctttttttctggaacccaaggcattgtacaggttaggcgagcactcgactgctgaaactcacctccaggcctcaatcggaggattctggataagcactcagcccctgagatacatcccagatcacttttttttttttggttttttgagacagggtttctctgtatagccctggctgccctggaactcactctgtagccaggctggcctctaactcagaaacctgcctgcctctgcctcccaagtgctgggattaaaggcgtgcactaccaccacccagcccagatcacttttattttgtaatctgaaacaggatctcactagattgtccaggctgaactcaactctgtagctccagcagcccttgagttcattatcttcctgcctctgcctcccaaatagcctcaattacagattgtaccgtcagcaaccctttaagtgatttcagttttgagctagcttcaagggctgagtgagtaggcagggtggggtaagggctgaggagtgttgcaaaatggtgtaagaggaaaccagatagttctgtctgatatttgacaaaatgggaccagtcaggctgactcttgtccctgatgctactagtgtgcagggacactcaggatgtcggaagtggggtatggagaattgtcacagcattagaccaaggcattcctgggaagcatgggggaagcttagaggttcctgttgctggtggtgctggctgcagagattggcatggtgtctgcaggatcccagactcgctacttgtctaagtggattgcaggctgtaattgcaggctgtaattacctaatccttgaaattaccctgctaagcacacagcaggagcggtcctaagcatttgctggacaaatgaccttaattagctactaatgagatccagcaaggtttttcaaggtttttgagacaagttctcgctaaaattttgggttggtgagatggcttaatgggtaaaggcacttgtgacttgtagctgagtttgatccctgggactgacgcccacaagttgtcctttgactttcacaaacttgaggagtccctaggaagaggaagaggaggaggacaaagaggaaggattggaggaggccgaggggtcaacaccacgaaaacatggcctaaagaatcaactgacctggactcccaggggtcacagagatcagggagcctgcgtggatctgacctaggtcctctgcatgtgttttggttgctgtggtggtttgaatctgcttggcccatgggaggtggcactactgggaagtgtggtcttgttggaagggtgggctttgaggtcttatgtttgagctccgcccaggacagaagagaccctcctcctggcttcctgcagaagataatctctcctgattgtctgtgggtcaatatgtagaactctcagctcctgcggcaccgcatctgcctgcatcctgccaggcttccttgccatgatgatactggactgaacctctgaaactgtaagctagccccaattaaatgttgtcctttataagagttgccctggtcatggtgtctgttcacagcaatggaaaccctaactaagacagttatgtaacttggtgttcttgtgggagcagggactgtctctgactcttttacctgtctttaagacccttttctgtggagagccgtgccgcgagcaattgcgagctgcgagcaatcaccattataagacggtgctggcctctgctgtgcctaactagtaaacaagccttgtacgcaggtgcgagagtgaactcactcctagtcactgcccatctcagggcatagtaatggggtgatgggcgagcaacgaatcaggagctgacacgccatatcaggtgctgaaacgccatggctgagggctatataagcgactccattttctggggtcggggtcttcctgagaagtaagcaataaaagctttgccgtagaagaaccggtggttgcgtctttcttgcggttgagtgggacacaatacttttctactaggttgcctcatgcagccttgatgtaagaatatgtgccaggtcttattgtagcttgatatggagtatttcattgatgtccctaggcctgttcttttctgaaggaaggttgaggggagcagatctgggagagagggaagatggtggggaaaagagaaggaggagagattacagtgtagtcagggtgtaatatatgagagaagaataaataaaaatgggggtgtgtgactcacccccattggactggcggtgatgacttttaatcccagcactcaggaagcagaggcagacatatctctgtgagttccaggccagcctagtctacagaagaaattctgggacagccagggctacacagagaaaagcaaaaaaacacaaagaaagaaaacaaagaaaaaagttcccctcggtcttttatagttctgtgaccacagagcggctgaagaaataggaaccccaccctgcaaccagctcaatactgttaagaggtcagttgtgcaactcggcttaaggctttctgaaaggaagggaagaggcaggcaggggagtcgatacagttgtgtggattctgttacaggaaaaagaaagggccacttgccaaaacccagaggcagacccaggtcaccaaaaagtgctgcagggggccctgtcccagttttcccacaggactcaaggtttctgtttagtggcttcattttcttttctttttttttctttgtgtgtgtgtgtgtgtgtgtgtgtgtgtgtgtgcatgtgtacttgggtgtgtgtgtgtacagatcaaccttaggtggtgttagtttctgctattaacttgacacaaacccaaaattatctgaaggagtctcaattggaggactgcctggatctgattggcctgtgggcacctctgtgggggcattttcctaactgctaattcccgaggcaggtgagcttgggctctataaaaatactactggaatgtgcatgtatcctgtgccctgggaattaaaagctgaaataaacctctttctccctaagttgcttttggtcacagtggcatcacaacagaaagcagatgtgtcttgctctgacactctgacatttgttgagaaggctggccagcctgtgacccccgcccccttcatctcccagcctgtgacccccacccccttttcatctccccagtgctgggattacaagcataagccaccatacctgggcttttttctttctttctttttctttaaaaaactttttttcaagagaggtttctctgtgtagtgctggctgtcctagaacttgctctgtagagctggctggcctggaactcacagatatccgcctgcctctgattcccgaatgctaggattaagggcgtgcaccaccactgcccagctatctagccttttgatttggattctgggactagaactcaggtcctcacttgattgaaaggcaattgcttaccaattgagctagctccctaattaagctctgctagctgcgttttgtagccatggtgtcacgtagcccaggctggcttcagactcaccatagagctaaggatgtccttgattctgccttccaagtgctggggtcacaggggtgcacgattacgcgcagactcacttttaaaatctaatcaggcaccagctctacttggttcccaaaggctcacactaagctgcccacaacataccaatccgctgtgttacacacggaccttcagagcctcttccttgaagatattgtagcttttccacagaaatatgtccatattaggcccagcctattcttgatgagtacactcgggcctaagtgaaataaacaaacaaacaaacaagacacagtcccagggatttccttttaaggagcctgtaccatggtttgatgtcttattctctgagactctttaaaatgccagaatccataatctaagataccattttctttttctttttcctttccttttcttttcttttcttttttgttttgttgttgtttgggggttttgggttttttgttgtttgtttttgttttttaagacagggtttctctgtgtagccctggttgtcctagactcactctgaagaccaggctggccttgaactcacagagatctgcctgcctctgcctcccgagtgctgggattaaaggcatgcattcctaaacctgcagagtatcacattctttttgtttgtttgtttgtttgtttgtttgttttgttttttgttttttcgagacagggtttctctgtgtagccctggctgttctggaactcactttgtagaccaggctggcctcaaactcagaaatccgcctgcctctgccttccgagtgctgggattaaaggcgtgtgccaccacgcccggctgggtatcacgttctcatgagctcctctttctggaccctcaagctcccgcttgtattatttatctctggtaagggactgaagagatggctcagcagttaagagcccttgcagatctgacagaagagcaggattctgtttccagcacccacgtgggttggctcacagcctcctgtgccctctgtgggtctcttcaggtacctgtaggcacatgctgtacccaagccccatgacagcacacacacattcatgcaaagactgcatcatttaaaatatctttattttaaaccccaaaccttcaaacacacatgcacctaccaatgcctgttctagatcaactgcccctgtgtgaggctgtgagaaaataggtcaagagtcaacagagaggaactttcagcaggccaggagcttcacagctattagcaatctcctgaggtgggtgacttggatcagttgttagtgactccccctttcaaatccttttgttgagaatgtgtgcatgtgtgtagtctatgtacaagtctgtgtgcctgagaaggtgggaagagggtttccagctccctgctccatcgcgctccacctcattcccttaagactgcgtctcatatggagcctggagccagggtggaagccaggaagcctcaagaatacctcaacctagcatacttgggttgcaggattgtatccatggcctgccattcacacaggttctggggatttgaactcaggtcctcatacttgggtagcaaacactcaactcactgagccatctccccagctccctgacacactatctcactagatgagacagcccccaaattgggcagacttgacagtctgtggtttgaaaaggactcccttatgtggctgtgactccatgacccctggtgccccctgaacaatcacaatatacatttattcatgcacacatttatatggagtcacatgctgcagacacctctgtccccttgtgtccagctgtaagaagcaggcaagttgcccctgaagcttctgttccagggagaggctgagtgccagataaggtgtgcctagagtgggtagtggcttccaggcacagggtgaggccaggaaatttggcctgtcctgaggttattaactggagactggtctgcctgcaggtcctggagacagtgggacaagaaatggtgtccagcaggccagagcttcctacacgtatgcgtttttgccatatttaccgaagctgatgtcactctcatccgaggtggcacggggtatcacaaccgtagaaggcttgtagggaagcccagccctgtgggatgaagaggaaggtggggtcacaggggtcataggatgctgtggtaatcactccataccctcctcccgctcatcccctcacctggtggctggttcctccttggaggaacagcagcaggtggagaagacacagatgccgcccaggatggagagcagggaggcactccagcccaagtagagggcggggcccagttcatacctggaggagtggaaaaggtgagtgccagcccagaggagtgtgggctgagacccacctgctgtccccaagggtgggttcctcacttacttggttccagcatacagtgggttgaagaagtcagtagtgatgttgacggcgtaccacgagatagccaccatcccacaggctcctggagaaaaaggtctgaggatctggtcctatgtgcccctcccacgccacaaccccccacacacacacacacacatacacaagcaagtgagctacgaggggcttgagagacgggcagagcaggagcagggacggaatgtcatgtccaagagtaatgcttcctttcctcagacatggtcaaactccagccatcaggtcacacaattcccaggggatctttttaaagacaagatcttaggaagcctaggctggccttgaactcaccatgtagcctggcataaccttgatcctgttacctctggagaatatagtcacgagccaccacagagtgcacgactagccttcaatcatatggagggactaggatttaaaaggattccctgggagacagggagaacagccatggctgggtaataaagaagaccaacttcttcctcccttctggacccgagacaaaagcctggcagcttaaaacaaaagccttgtggactttcttctcctgccagcacaccgcactgatggactgactcaacagtccaacacccgatcaggatatgttacacaacacctgagggcccatcagtctaccctgtctttccttccaactgaccaaccctaaattaggaagcatcttcagactgaaaaaaagaaacagccaagcctcagcccttgacaagatactggactttcggcgtctccagcccgccctgctttgcagtctttctctgtgtgtctgccgcatggttgtatttccttgtcactaataaaagcttttcctctactgcagattcatctgctgtgtccaagatttctccactgctctttgtccagcatgggactttttcccctgccatttaataattctttaactggcagagaacatgacctaatcatgacccccagatgctaacaatccacatcttgaaagcccagctgtccaaaaaagtctttcctgcctccgacatccctgtggtttgtcacttacctccagcaaactggctaagggaacttgccaagccttcagagctaggaaatggaaataccccccactctgtgttatttagtgtgtggtgtatccacctgagtggaggtgctcgtatgaaggccaaaggaaaacttcccaaggctggttcttcccacctactatgggggtctctggatcaatcttgggtcaccacaaagtgccttcactctccaaccctgcgtggtttatcatgaagaagtgaaatgtgtgcagaaatgaagtaagctgggcagtaatgggccatctgtatatcattactatgagtgagcatgtgtgtgttatgtgtatgtgtgatgtgtgtgtatgtgtgtatatgctgtgtatacgtgtgatatgcatatatgtatgcatgtgtgtatatgtgtgtatatgtgtatgttgtatatatatatgatatgtatgtgcatatgtgtgtatatatgtatatgtgtacatgtatatgtgtatatatgtatatgtgtatatgtatgtgtgtacatgtgtatgctgtgtgtatgtgtgatacatatgttgtatatatgtgtgtatgtgtatatgtctgtgttgtatatatgtgtgatatgtatgtgcatatgtgtgtgtgtatatgtgtatgttatatgtatatgtgtgtgtatttatgtgactctgtctgtgtgtgtgtgtacatgccctgactctgatctctcagccagtcataagctctggaaggaaacagtctctcagatctgcctgggctttggctcagatgggagcagagacaaccctaccttcgacagtgagttgtggtctagagatctgcagggtacaaacagggtggagagaggggagagctgaggcacagagggctggggtcaactgaaaggggaaggtgagacaagccctgagataccccccaccccgtgggtccactctgtcccccattaccagcaagtatgtggagggtccctgcaatggccagcagcttggccttcttggagagatccatgttgcccacgttggtgcagcggagtcccaccatgcctagaaagaggcccaggaagcccaggaggatggcggtgatcatgagagcccggcagccctggacataccctggagagtgtacagtggggaagccatcagccttttcctgctggtctcttgcacctgaaactcctaggaccctcccccttcaggatccattccagactccctccttatttcttttgctccatcttggctcctcttctctcacccgcagcctaactaagcctcat

SEQ ID NO: 176 - DNA, 752 bp, Mus musculus
atggcggaaagcgaaagcttgctgatctccaagggaacatcacgtaatgacttcaagcgggaggggaaagactgcgcacgcgtacgtgtgcacgccaccggaagggttcgctcccaggaccctggacagcggcgggtgctggacagggcagccaggcagcggcggatcaaccgacagctggaggcattggagaatgacaacttccaggatgacccccatgccggcctcccccagctgggcaagaggctacctcagtttgatgatgatgcagacacaggaaagaaaaagaagaaaactcgaggtgaccactttaaacttcgcttccggaaaaacttccaggctttgctggaggagcagaacctgagtgcatctgagggccccaactacttgacagcctgtgccggccccccatctcggccccagcgtcccttctgtgctgtgtgtggcttcccatccccgtatacctgtgtgagctgtggtgcccggtactgcaccgtgcgctgcctgggtacccatcaggagaccaggtgtctgaagtggaccgtgtaaacctggcatcagggagagaaagtacccccacccttcccaacccaccccagctcattcacaaaggacagagagagggagaaactacccattcacccagcaaagctgtgccctgccgaccaaggaaggccacacggacccaggactgttgtgggggtggtccatccacagagtgctgtgataataaacggcctggtgaaaggaag

SEQ ID NO: 177 - protein, 182 aa, Mus musculus
MAESESLLISKGTSRNDFKREGKDCARVRVHATGRVRSQDPGQRRVLDRAARQRRINRQLEALENDNFQDDPHAGLPQLGKRLPQFDDDADTGKKKKKTRGDHFKLRFRKNFQALLEEQNLSASEGPNYLTACAGPPSRPQRPFCAVCGFPSPYTCVSCGARYCTVRCLGTHQETRCLKWTV

SEQ ID NO: 178 - DNA, 26472 bp, Homo sapiens
tcctgggggcggcgggcactgagccacccgcccctccagccatggcgctccccaccccagggcagtccagcctccttcctcccgtcctccagccttcacacctgtgttcctctgtgcagaacagtcttctttgctacttctcggcctgactcactgctcccggcccttcaagtctcagctaagatgtcacctgtcctgtgaagctccctactcctcccaagtctgggtcaaggcttccccgtggcttctattgcacccaggctgctcatcgcagccttagaagctgtgtggtggctgctgctcacagcagggcagagctcgaccggcatgaggcattcctgcagtgcagtctaggacagtggcccaggaatgatttccttttctctttttttagagacagagtcttgctctgtcacccaggctggagtactgcggcatgatcatagctcactgcagcctctaactctggggctcaagtgatccttctgcctcagcctcctgaatagctgggacatgccaccatgcccggctaatttgttggtttttctgagatggagtttcactcttgttgcccagcctggagttcaatcttggctcactgcaacctctgcctcccgggttcaagcaattctacctcagctcccgagtagctgggactacaggcgcccgccaccatgcccggctaattttgtgtttttagtagagatggggtttctccatgttggtcaggctggtctcgaactcctgaccccaggtgatccacctgcctcggcctcccaaagtgctgggattacaggcgtgagccaccgcacctggcccaaactcggctaatttttaaattttttgtagagacagggtctcgctatgttgcccaggctggcctcaaactccccctgctcgagcaatcctcccgcctcagcctcccaaagtgctaggattacaggcatgagccactgtgcccagcagtaaatatttcttgaatacatgaatgaatgcagttgtgaccccagggtctgcctcccccctgggaacccctctttgctcccattttcctgattccattgtttgtttaccagatcctgcacctcctcctctgggaaggcctctgccctcctcgcccaggcccttacctcatgccggccgcctgaccactggccgtagtgctccatctctgccaccagctcatcacacatttgttctgacagcagtgggaaccagtacacgtccgggcatggctgaggatggggcgagggagaacagggctagctgacgccgcagaacggggaaggggacaggcagcaggcagaatgggaaggggcagggaggagcagggaaggctttgtgagagcagccggggacccgccaggtaggggctgagggagtggcaaggctgaggaccggtttctggcacaggagaggtggcagagggtcctggagcccctcgtgctgggacagtggtttccaaacttccgtaacagtgcatacctcttttttttttttttgagatagggtattgctctgtcaaccaggctggagtgcagtggcacaatcatagctcactacagcctcgaccttctgggctcaagcgatcctcccgcctcagactcccaagtagctggaactacaggcacatgccaccatgccaagctaattttttcttttcttttttttttgagacagggtctcgctgtgtcacccaaggtggagtgcagtggcgtgatcttggctcactgcaacctctgcctcccaggttcaagcgattctcccacctcagcctcccgagtagctgggactacaggtgcacgccatcacacctgactaatttttgtgttttttttttttttttttttggtagagacaggatttgccatgttggccaggctggtctcgaactcctgacctcaggtgatctgcctgcctcggcctctcaatgtactgggattacaagcatgagcaccactcctggcctcatttcttatttaatttttttgttgttgttgtagagacagattctcgctatgttgcccaggctggtcttggacttctggcctcaaccgatccacccaccttggcctcccaaagtgctgggattacaggcatgagccactgagcccagccccattcttcttttaagatgtgatttcaagcataacaccagtatacccaatatacaggagaagaggctgtctgatcaatgctggctttgggggcaagagtcctttctgttcggcctctgccttcatcttgtctgaacagaaaaccctcagatctctggggaactcagtgtgaaaactttgaatccaggcgggggcccccaagaggcgatggccatgagggcagggggtgggtggggaggctgcgtgggctcacctgctccacgattccttccccttccagggcccggctgtagttctcgtggatgtactgctccttccagtcctgtgagagggtggggggcacatcagatctgtgcccccctcgctcccagcccccaggggaccgccccctcccactcagtgtcctgcgctggcagcagccatcacgtttggtgtcttccttagcacaaggcggggaacctgtgtgctctgggcgtggggtccccactcacgacggggttgtcgaagatctgccagaggtcggggtgcaggtgctccgtgtcgtatctggaagtggccaggagccggccaaattcatgctgattgctcagatggaggaagatgccctgtagtggggtgggggtgtccgtgatgcaggcgatgcctggagtctgggggactgcccccaggccagaccgtgcacccgcgctcaccttgtctcgaaagctcttacagaaggccatgtccgggtctgtgtcactgcccgagaacacatccctctggggcagctccatccgcagggtatcaccccggatcacataggcctgggagatgtatggtacattccacacacccctggaggcaccgacaccgcggtcagctgggaggacagccccccaaattctgcccagctcatcccgggaagtccttcttccctcagggtatcccagtccctgaacataaggcccctgcatgtcccttgtcaagcactgctggtcccaaccaccccacctcccaaaatgcggtcagttcctaccccaagctgtggcacttcttttttgtttcttgtttttggtttttgagacggagtcttgctctgtcacccaggctggaatgcagtggtgtgatcttggctcactgcaacctccacctcccaggttcaagcaattctcccaccttagcctcccaaatagctgggattagaggtgccagccaccatgcccggctgatttttgtatttttggtagagatggggtttcaccatgttggccaggctggtctcgaactcctgacctcgagtaatccacctgcctctgccttccaaagtgctgggattacaggcgtcagccaccgcggccggcccttgttttttattttcttgagaaagggtctccctctgtttccaggctggagtgcagtggtggaaacatggctcactgcagcctcaacctcccaagttcaagtgattctcccacctcagcctccgtagtagctgggaccacaggcacgcaccaccgtgcccagctaatattttaagttttttgtagagataggctcttgctacgttgctcaggctgatcttaaactcccaggctcaagcagtcctcctacctcagcctcccaaagtggtggcatcaaaagtgtgagccactgcagccagcctcatggcacctctgactggtgaccactccaaacccctgagagtagggggcttgggtctacctgggccccgggtcggaggaggcggggggctgcaggctggcgggactcacactcgcttccgctgcaccagctccacgtagtcctcggagcgggcgtagtactcatcggggctcagggcgccccagaagttggaccacagcttgccgtggcgggacagcatgggggcgatcaccttcctgcggacaggtgggggtgagggctgggcagacgggagcaggcctggggagcccggtgcccagggcaggagtggggttcccggggcctgttggggtgccctccggctgcggggagagggggtaagccacctgttctcctcaatgaggatacgcagggtctgcaggttggtgaggacagcgtcggcgtccaggctgaagtagaactcacactcggggtcctgccgacacaggtccctggaggtgagaggcgagctgagacggcggcaggtggggaggcggtgtggatggggtaactggcccatgcccccaggagaagaggagggaggcagtgtctatccttccttccccaggctctctgctgtctgggtgagctggcaagggcaggagtgacagcatgggggctgcaaggatgcgaatggggaggcccaggaggggctggatgggtgacaggtgaggcaagggccaggcagcaggtggcagcacccctgaccctacagcctcatcccaccctctcctccccgcaagcacccgctcacatggccatgtccctggcctcgcctgggctcagagcctcctccggccccacgagcttcacagctgagaagtggtcctggagctgcggccaggagtcagcgatgtggggttcatggaagacctcctgggaggggaagacatagggggatgggctcagagggcagggaggcggcacctgagggatgggggtgcaggaaggagatgggggtgggggcacgagagttctgatcagggcagggaaagggtccctcaggagaggctccaacaggggagtctcacgttgttgtgcaggaaaagggtgaccctgtcggggggatagtccaggagtagcagccgctgcaggaagcggggcagaaacggagtaggctgttccacaaacacggccagaaacacccgggggggaggctggaagatgcaacacgcagggactcagagagaagcccggacttccctgctgcccccacccaacctccaccctgacaggtgcagggacccaggagcgatgcccccaccgccccccagtccgctgtccttgtacctcctgctcagcacgctgccctctcgtgcccctccctggcacccccacctcacctgcccccccgggagtgtcctccggtcctggttgcagaagccacagcctccctcaggagtccagccattggggacgtagtttcccaggtagttgagctgcagctgttggggacagactgaggctgagtggctgaggcctccaggggtggaggtgggggtcaggcacctctgatatgggggctgggaagggccagcttctcagaagggttggaggtgcctgggggttggggcagggcggggcgggggttgagaccactggtggcaccttagtgggaccgtttccatggaccacaatggggagcgtgtcgtaggccacgttccggatacgcacacggttccgatcaaactttaaaaccacttcatctggggaagaaaaaggccaggcttcagaccccctttctctgggagctaccaagcaacacattcttctaaatatggggtcccaaattctccagggaataaagggacaccagggctatcctggagtgtggctcgttgtgggcaggaacctttgggttctgaccaggctgctggcccagagagctccactgcctactacctgcgtgatcacaccgcagctgggcgaggaaggggagggtgagctgagcgggaggccagtaggagcctcagcatccctacccctcctcatattctctctctccttgtttttttttttttttatttttattttttgagatggagtctcactctgtcacccaggctggagtgcaatggcgtggtctcggctcactgcaacctctgcctcctgagttcaaaagattctcttgcctcagcctttcaggtagctgagactatgggcacatgccactacacctggctaatttttgtatttgtattttttgttttttatgctgagatggagtctcactcccaacacgcaggctggagtgcagtggcacgatcttggctcattgcaacttccacctccagggttcaagcgattctccttcctcagcctcccgggtagccaggattacaggcgcgcaccaccatgcccggctaatttttgtgtttttagtagagacagggtttcaccatgtcgaccaggctggccttgaactcctgacctcaggtgatccacctgcctcggcctcccaaagtgctaggattacaagcatgagccaccacacccagcctaatttttgtatatttagtagagactgggtttcactatgtcagccaggctggtctcaaacttctgacttcatgatctgcccgcctcagccttccaaagtgctgggattacagatgtgagctgtcgcacctggccttttttttttttgagaaggaatctcactctgtcacccaggcaggagtgcagtggcgcaatctcggctcactgcaagctctgcctcccgggttccagtgattctcctgcctcagccttctgaatagctgggattacaggcacccgccaccacgcccagctcatttttgtacttttttttagtagagacgggttttcgccatgttggccaggctggtctcaaactcctgacctcaagtgatcctcctgcctgggcctcccaaaatgttgggattacaggcgtgaggcaccgtgcctggcctctctctctccccgttctccccatcccctgaggcaagtcaccaacccctccacaagctgttttcctcatctgtacaagaaggataaccagggaccttccctttgttaaatggaatcacagaagtagaccgggcacagtggctcatgcctgtaatcccagcactttgggaggttgaggcaggcggatcacctgaggttgggagttcgagactagcctggccaccatggtgaaaccctgtctctactaaaaatacaaaatgagctgggcgtggtggcgcatgcctgtaatcccagctactcgggaggctgaggcagaagaatcacttgaacccgggaggtggaggctgcagtgagccaagattggaccactgcactccggcccgggcaacagagcgaaactctgtctcaaaaaaaaaagtccctggcccggtgcccaggcacagcatgtgtgcaacagatgccagacacgtttttgcttcccttgcttctggtagtaccatcagcacagtgcaacttacacaaccagccactcagacgcctgacaaaaccacatagaggtgggcttggatcagcccagctcctccagaagcctctcccagctcaagacccctagctgcagaggctgcgcatcgcccacctgcggctgtcttcctcctcacctaaagccccgttgaggttctgaaagatccgagacttatgatccagattaaggctgagtttctcctaaatggaatgagatgcgatggagtggttaaaatggaaggagtggaaaggacatcatttctcacttttctctctctttttttcttctcttgcttttgttgcttaggctggagtgcaatggcacgatctcagctcactgcaacctctgcctcccggtttaattgattctcttgcttcagccttccaagtaactgggactacaggagagtgtcaccacgcctggctaatttttgtatttttagtagagacggggtttcaccatgttggccaggctggtctcaaactcccaatctcaggtgatccacccgcctcagcctcccaaagtgctgggattataggcatgagccaccatggttttcctttttttgtgagagacagagtctcattctgtcacccaggctggaatgcagtggtgcaaaacatcctcaaactcctgggctcaagtgatggtcccacctcagcctcccaagtagctgggattacaggcgtacaccatgaagcctggctaattttttctttctttttttttgtagagatgaggtctcaactatgttgtccaggctggtcttaaattcctggactcaagcaatcctcctgcctaagcctcccaaaagtcttggatgacaggcgtgagccaccacgcccaggcacacatttttctctttgcaaccccctttgctccccaaatcccattcagcctgaggcctccactcccacagagctgcgggatgcgcccactcctctgccttccctaccctcagtcctgggtccaggtagagccgtgtgtagaacagctggtcgtcgtcatcatccttgtacttccactggcgcacgatttggtggatggtggtggcaaaaccgatgaatcctggcggggagggggagtgttgacctcgagactcccagggtcccagggcctgtcccccaggctgtctccagccctcaggcgcctttaacactctgtgtcccaccgctcttggcccctctgccttgggcactctgccactcaccaccagaattgaggaagcgcttccccgtgcccacctcagggtactgctccgccagcccccactcgggccagcagaagctctctgcagagaagagcaggcggctgccactctggacgaacttcttcagcagctctgtggggctgccggccagaatcacgtcgtagctgggtgaggaaggggaggatgggcaggggtccactgggaacctcagcatccttaccccgctccctatccccagccccgttacctatccacaaacatgatgatcatatcctcccggtcagcgtatttctccatttccttctttaaccaccggaccttctgtcctccaccaactgttcgagccacatcaccccctcgccactcctctcccaggcccagggtctgtggagaagattgccccgtgccaggcaaggggtggggagttgtggggggaactcctgaccaggcttaccgtggggacctgggcatccagacttcagcccacccctcctgctgggaccccctcccaggggcctttccctctcctcacccgcacagtgtagttgaagaactccgcagagcgcaggaaacgcaggtacccctcggtttcagctgtggccacagtgatcaccagcagcttctctgttaccagagggaaatggcacttgagatccaccgcccagctccgggcctcacgtgctttgctgtcctccctctcactcgacttccctccctttcttccttcccattcttaaactcttctcacccaggaacactctgaccccaaggagggcagggtgggagtggtgcccaggaattccgagtccctttgcatagggaggctggaaaccccagttcagggtagtgatgggcgaggggcttggcgcgactcagcctcaagagcacgctgggcgggggacgggccagacacctcctcgagcctccgaccctctccgggccaggctggcaggcacgccagcctctgccccctcggccgtgccgggcctccccgggatctcacctgggttgaccgggtctcggccccggggccggtcggaggctgaggccgcagggggcagcagcagcggcagcagcagcaggaaccggggtccaggccccgaggaggtcatggtggggagcgggcccagacagcacccaggatcctgggatctccgctacgcgcctggatcccagctccggaggggagctctggaaagggggcgctcgggctgctgtgcggccgccgcggggagcagcttggctggggctacgccctgaaaaaaaggcgtatccggaggctacagaaagctccagatgccggcgccacagacaaggcgaggattgtcccgggcgcacgggaggcgggggaggggcggcggctcgggccggcgggcgggagacagggactctgggctgagccagccgcttgacacatgtggaagctgaaacctggacaggggaagtgacccctggcggagggtcgggcgggacgcgggggcgggtcctggccgcagccctgcccagagagtgcgggcggaagacggggagagcgagaggctggcggcgacagggagggaggaagcctaggagtccgccgcgggacggaggcctgggggaactgggagttcagctttctgcagagggccactaggaacctcggattgcccacggaagccagccactttctttgacagtccagcccacctcctcttctgcccggagaagctccaggggctgcctttgtgatcacagcatcttcacaaggaccaaaggaaaataagatttcttgtaagaacaccgtgaccacatctttaaaatgacccatttcgtggctcccacaagatttacacctccacactgaggccggaagtggttttgcccctataaaacatggcgaaaagctttcttgtctccaaggaaacgccacgtaatgagtcaaagctgtggcgcacgcgcagaagtacaagctaccggaagtgatggcgcccctactaaagccttggggttagtacgcgtgcgcagcagtttcttccgacagttgtgttgtgccaatggtggagaagaaaacttcgggtatgtgagcccccgcggttcgcccccttccccttcccaagtcagtcctagaattttcttacctagtcattcctcttttttggtctcgctctttcgcctaggctggagtgcagtggcatagtcatagctcactgcagcctcgatttcctgggatcaaaccatcctcccacctcagcctccggagtggctggaactgcaagcatgaggccccacgcctggttaatttttaatttgttatgtggtgacgggctctcgctatgttgcccaggttggtctccaactcttggcctcaaagcgatcctcctgcgtgggccttccaaagtgctgggattacaggcgtgagctgccgcgcccggccccagctattcctcgtaaatcccttcctcagccctcgggtcctggcgttgacccttcattcacgttttattggtgcctgctccaagccgggcgctggggatgaagaggagaaagacccctcttatccaagcattggctttttctggaaggggggcagaaacgcagacctaacactgtattttactgtgatttgtgatttgtgctatggcagagggaagcacagcgcctgggaacagggagacgtggcatctagcccaggttctgggaggcaggggactgtgaaagcttgaaggaaaaatgaaaaagcttgaattgagtcttgaaagtctagttagggtttctctcagtgggaacctcacgtgcaaaggcagtgaagcaagaaaaagcaagtcgcttaggaagccaagttcacagtttggatcttacagagtaataagaaaggatcgaaggctggggaaaggttacattttgaaaggcattatacacactgcccaggagtttgaactctgtagggaaacactggagagccagcaaagactttttttttttagacagagtcttgctctgtcacccaggctggaatgcagtggttctatataactcactgcagcctcaacctcccatgctcaagtgattcttccacctcagccacctgagtaggtggaactacaggtgggtgcaggccaccatgctgggctagtttttatattttttgttgagatgggtgtctcactatgttgcccaggctggtcttgaactcctgagctcatgtgatcctcctgcctcggccttccaaaatgctaggattacaagtatgagccactgcgcttggcccttttagtttttctttctttctttttttttctttttgagacggagtcttgctctgtcccccaggctggagtgcagtggcgcaatctcggttcactgcaagctctgcctcccgggttcacaccattctctggcctcagcttctggagtagctgggactacaggcgcccgccaccacacccagcttatcttttgtatttttagtagagacagggtttcaccatgttagccaggatggtcttgatctcctgacctcgtgatccacccgcctcggccccccaaaatgctagaattacaggcatgagccactgcgcttggccctctcagtttttcaaaggcatcgcagtctcccagccatcagttttttcatgttggcctcaaggtctgaaataccccgctgtctcccctagccaggtcattcaccagttaggccttaacctagacttaccttcttctgggaagtcttccctgactactccaaggccaggttgggtgtttctgtcctgggctctgcagcactttatacttccgtatcctagcctactccatgctgtacttactgtgtttgtttcattaatcatttgtgtttgccactggactgtaagctttggcatccctaaaacctagagcactgcctggcatttggaggggagacagagtagtacagtgatcataatcatatttttttttgtttggttggttttgggtttttttttttttttttttttttttgaaacagggtcttgctctgtcacccaggctggagtgcagtggcacaaacacagctcactgcagccttgagctcctgggctcaagcaatccttgcgcctcagcctcctgaatagctgggactacaggtgtgtcccactacacctggctaatttttgtattttttttgtagaaacatggttttgccatgttgcccaggctggcctcgaactcccgcgctcaaacaatccacccaccttggcctcccaaagtgctgagataacaggcatgagccactgcgcctggcaaggtcatgctttttgatgctgggtagttctttgactcctgacctggccacttgttagctatgtgaactttggacacatttcttaatctctgaatgttggtaaattggggatgatgatactgtcccatacagctgttgtaagggttaaatggttcaagtgttgcaaagagctgagcacgtgcctggctcatagtaagtgtccaacaagtgatagctactggggctgctgctgttattattatgcttaacaggtggttaatgaataaagagatatattatgcaaaattatcagaatctggcaaacagctgataaggcaatgaggaaagaggttttttgttttttgtttttgagacagggtctctctctgttgcccaggctggaatgcaatggcgcgatctcagctcgctgcaacctccacctcccgggttcaagcgattcttgtgcctcagcctcccgcgtagctgggattacaggcatgtgccaccacaccctgctaatttttgtatttttagtagagacatggtttcaccacgttggtcaggctggtctcgaactcctgacctgaagtgatgagcccacctcagcctcccaaagtgctgggattgcaggggtgagccactatgtccagccgaggaaagaggtttaaaataacttctaggtttctggtttggatgtctgcatagacggttccatttgcgtagagagaatctgcaggagaagcagacttggatgggaatttttttttttttttgagttgcagtgtccacagggccagtgggtgatttcttttttccttctttctttttttttttttttggagacagtcttgctttgtcactcaggctggagtggtggcgcgatcacggcttgctgcacactgcagcctcaacctcccgggcccatgtagtcctcccaccgcagcctcccaagtaactgggactacaggcatgtgcaaccacgcctggcttattttttaattttttgtagagatggggtttggctatgctgcccaggctggtttctaactcctggcatcaagcgatcctttggcctcccaaagtgctgagattacaggcgtgcgccaccacacccggcctcaccaggcgctggctgcatggccagttctggagcccgggagcaggttctgtgttgagggagtcactctgggagtcatttgcttgtgggtgatcatcagagccctttgtttggagtcaaaatcccaggaagagtgcatagactgagcagagaagagggccagccacctccatagaggcagggagagcagccgagctggagccggaggattcctggacatggagaaggcctgcagttttgtcaaggaagcaagcaaagggtctctttctactcgatgaaggtagtcggcaccgccacagggtggacagggctcaggtccaaggaggaggaggaaggcacactggagccgctctggggcccagagcgtgggtgggtggtcccccaggatgaccaggcaggtgtcagattttggggttcaaggagaggatgggaggtgaaaaagtgacacatcacgtgagttgctgtgaaggagaaggagctgtgaagccgagtagacacatgagcgtcgccagctctttgatggaaagtgccggttgaggaggaggggttgaagatgggagagggagggaatgggctggaggtgaaggctcggggtcagtggtgggacttggggcgctccagggcaggggtgtgcccacttggcatcacgtttgtgggtaggtggcctggaagatgagcgtatccaagcatgggtggcccctggttcctttgaggtaggaggtgagatgctgagtgtgagggccatgtgtattgagggcccaggacagcctggaagccccagggcgctgtgacctccccagtcagcagtgagctgtctccaggccggggctcactggctgggactgggattgagaggaaggcggagaaaacaggcaggagaaactgaaagggtctcagctggcgggacaggaagtgtgggcccaggggcttggcccgggaggagacaaggggaccaagggcttggcaatggggatgagatcagagagctgcagcttccaccccgggtgccttcctcgccctgcccagagcggcggccacactgctctttcttggaagccctgtaactttgcgtgccctgctccatccagttcgctcccaggaccccgggcagcggcgggtgctggaccgggctgcccggcagcgtcgcatcaaccggcagctggaggccctggagaatgacaacttccaggatgacccccacgcgggactccctcagctcggcaagagactgcctcagtttgatgacgatgcggacactggtgaggcggatggaggaggaagcgggggatgggactgagaggagggcgggagagtccgcccaactcaggctgtgggaggacccaggagctcctggtgcctctgccagtgactggctcccatggctgtgagcaaccacaccccctttctgtgcctcagtttcctctcgtgtatgtgaaataaacaagagagactggataagctctgacacgaagccttaggcttgggggcatggaggtgactgtcagctgggattggagaattggggtggagggcagaggctggtagcgaggggccgacttagagccaggagggcagggccaggtgtggtggctcacgcctgtaatcccagcatttgggaggctgaggtgggcggatcacttgaggtcaggagttcaagaccagcctggccaacatggtgaaaccccatctctactaaaaatacaaaaacaaaattagccaggcatggtggtggacacctgtaatcccagctactcaggaggccaaggcaagaaaatcacttgaacccaggagatggaggttgcagtgagtcaagatcgcaccactgcactccagcctgggtgacagagtgagactgtctcaaaaagaaccaggagggcacatgggcatggggagtgatgaaccagagaaagctgctgtctttctgggcaagtgccaagcaacggatcacccttgacccctaggaaagaaaaagaagaaaacccgaggtgatcattttaaacttcgcttccgaaaaaactttcaggccctgttggaggagcaggtgagaggagggtcggcctgggaggaccccacagggaaggggtgagcctggcccgggcaggtgttcgctgcgtgggtgggcggaggagttctagagccggccccttgtctctgcagaacttgagtgtggccgagggccctaactacctgacggcctgtgcgggacccccatcgcggccccagcgccccttctgtgctgtctgtggcttcccatccccctacacctgtgtcagctgcggtgcccggtactgcactgtgcgctgtctggggacccaccaggagaccaggtgagcatgagacctgctgtccactcccactccctccttcccacagcctccccagacctctctcccctcatcctggcttcccctctgtctgcaggtgtctgaagtggactgtgtgagcctgggcattcccagagaggaagggccgctgtgcactgcccggccttcagaaagacagaatttcatcacccaatgcagggggagctcttcctggaccaagggaggagccgctcattcacccaacaaaactgtgtcttatctgccaggaaagaccagcctcactcctgggaactgtctggcaggtaggctgggccccccagtgctgttagaataaaaagcctcgtgccggaagccttcctgtttggtcgtggtgtgtttgaggtgatggtaatgggtcacccgtctctcctgctcacggctctgtctctcttcctcctgcctcccactcacccctgccaccgtccgcccctctgtgtccctgatcgcgagagattctgtcccattttcctgccacccccgagcccctgccctccttggctgcttctttaagtctttttggttattgatttagttgtttaaactattttatttatttattagagacagggtctcgcactgtaacccaggctggagtgcagtggtgcggtctcagctcactgcaacctctgcctcccaggttcaagggattctcctgcctcagcctcccaagtaactgggattacaggtggccaccaccacgcccaactaatttttttatatttttagtagagttggggttttgatgtgttggccaggctggtcttgagctcccaacctcaggtaatccacccgcctcggcctaccaaagtgctgggattataggcgtgggccactgcgcccggccatgtttttcctttttatttctccagttgctatattttcaaagtacagctaggttccagggatgggtgacagggaggtggcgggaggactgtggaacatgtgcagaatggtaccgcggagggaccttggcctgtcttcctctcaaggtacttaggcaaaggggagtggtccttgtccttggtgctgccagactgagggagcagttgtccttaggaagcccctgttaccaggggctgcagtgtgtgaagttattagcagtacggaaaacccagaagtttctgggaaacatgggggaattcatggtatagagcaaatttgtccaacctgcagcctgcatgtggcccaggatgactttgaatgcagcccaacacaaattcataaactttcttaaaacattatgagattcttttgcgatttttttttcttttagctcatcagctatcgttaatgttagtgaattttatatgtctcctaagacaattcttcttccaatgtggcccagagaagccaaaagagtggacacccctggattagaggcccctggtctgggtggccctgggtgctgtgactcatgtgaacttcttatacccataccttgtctaaatgaattgcaagctgtaatctcgtaaggtccttttggttgctgtattaaggcccagaaccctgttaacctcatagcaaagcaagtgcttagtaagtatccattgaacagatggcctcattaagatattagagagatccagcaaagtcaacgttaggcaccattttttttttttctgagatgcagtctcgctctgttgcccaggctggagtgcagtggcgccatctcagctcactgcaacctccacctcccaggttcaagtgaccctcatgcctcagccttctgagtagctgggattacaggcgcctaccactatgcccagctaatttttgtattttttgtagagatggggtttcaccttgttggccaggctggtttcgaacttctgacctcagatgatccacccgcctcggcctccaaagtggtgggattacaggtgagagccaccgtgcctggccagtcaccatgttaggccttcacttttgggtactttcctgggggttggctcaagtattccccagggttttcttgaggaactgcctccctttctctgaagacttgcagctgggcaggcagtactggttttggtgtcagcttcatgttggggggctgatgtcaggattcagagacaatccaggtgaggtggtttttcaagatggctcaaaaatctttgtcctcccattaaaaagtggagtgttacggccaggcaaggtggctcacgcctgtaatcccagcactttgggaggctgaggtgggcagatcacttgaggtcaggagtttgagaccagcctggccaacatggtgaaaccctgtctctactaaaaatacaaaaattagctgggcatggtggcgtgtgcgtgtagtcccagctactctggaggctgaggcagcagaatcgcttgaacctgggaggcggaggttgcagtgagccgagatcacgtcattgcactccagcttgggcaacagaatgagaccccggctaagaaaaaaaaaaaggccgggtgcagtggctcacgcctgtaatcctaacactttgggaggccaaggcaggtggatcacctgaggtcgggagtttgagaccagcctggccaacatggtgaaaccccatctctattgaaagtacaaaaattagccgggcgtggtggtgggcacctgtaatcccagctacctgggaggctgaggcaagagaatcgcttgaacccgggaggtggaggttgcagtgagctgagatctcaccattgcactccagcctgggcaacagagtaagactccatctcaaaaaaaaaaaacaaaaaaaacaaaattagccaggcatggtggcatgtgcctgtaatcccagctactcaggaggctgaggcaggagaatcgcttgaacccgggaggcagaggttgcagtgagctgagatcgcgccattgcattccagcctgggcaacagagtgagactccgtctccaaaaagaaaagaaaagactatttcggggctgaacaacaccatctgtgcttctccgtggcatcctaggctgggattcccgtccagcttgcactgtcagcacaatctctttggattctttcctaacttagctgactgtttcatattttgtggttataaaaagaggcacactggttctgttcaatgtaagatttctctccccagtgacgtactccgccttccaaaatgaccttgagaggacagggctggaccctgaaggcctctggttgctctctgatgccatccatgacattctctaggaagctgagtccagggactttggacccccattgaaaaaccataattcggccaggcaggtggctcacgcctgtaatcccaacactttgggagcccgaagcaggcggatcacttgaggtcaggagttcgagaccagcctggccaacatggtgaaacccagtctatactaaaattacaaaaatcagctaggtgtggtggcacacgcctgtaatcccagctatttgggaggctgaggcaggagaattgctggaacccaggaggcagaggttgcagtgagctgagatcacgccattgcactccagcctgggtgacagagcaagactcagtctcaaaaaaaaaaagaaaaaagaaagaaaaccataattccccaaggacagcctgaaacaattttgccagcttccttcatgctagggagattttttcctaccttgggagacacctggtctttgggaaatgtatactctgctctaaggttctagaaggtaaacctagtgtcatgtgataagggcagcacccccctttcctgggagcacagaggaggaagaggttggtgccagggtttggaagtgtggacacgggtggttactcctaaaaacttcaatgaggctgggtgctgtggctcaggcctgtaatcccaacgctttgggaggctgaggcaggagggtctcttgatcctagtagtttgagaccagcttgggcaacacagggagaccccatctctacaaaaaatttaaaaattggccgggcacggtgactcatgcctgtaatctcagcactttgggaggccgaggcaggcagatcacgaggtcaggagatcgagaccatcctggctaacacggtgaaactccgtctctactaaaaatacaaaaaattagccggcctggtggcgggcacctgtagtcccagctactcgggaggctgaggcaggagaatggcgtgaacccgggaggcggagcttgcagtgagccgagattgcgccactgcactccagcctgtgcgacagatcaagactccgtctcaaaaaaaaaaaaaaaaaaaaaattaaaaattagccaggtatggtggcgcacacctttagtcccagctactcagggaaggatggcttgggcctgggaggttgaggctgtggtgggcagcaatcactttactgcagtccaacctgggcaacagagcaagaccctgtctcaaaacaaaacaaaaaaaagatcttgattttaattgatgtgagttaggagagccaagaattctgggaagcagggcaattgtgtcttcagtcttggagaaatcctggtctgagtactaactagtggtgtagctcggacaggtcacttcacctctctgatgctgttggagccatgctgcagctattgcaagaattcaatacacctagcccgagacctgacttctagtgagtacgcagcaaatgagagcgcttgatgatactgccaagacctaaagcatgttgttgagtttttcacagccagctccctggggactaaacccagcacctggcccaattgtcaggtagccagcagtttgcatttacatttctttttttgagacagagtgtcactctgtcgctcaggctggagtgcagtggcatgatcttggctcactgcaacctccacctcccaggttcaagtgattctcgtgcctcagcctcctgagtagttagaattacaggtgcccaccaccatgccccgctagtttttggatgttttttattttttcttttaatttttttgagacagggtctcactctgtcacccaagctggagtgcagtggcacgatctcagctcactgcaacctctgcctccctggttgttcaagcgattctcctgctgcagcctcctaagtagctgggataacaggcacccgccacctcgcctggctaataattttgtatttttattagagatggagtttcattatgttggccaggctggtctcgaactcctgacctcaggtgatccgccaaccccggcctcccaaagtgctgggattacaggtgtgagcctctgcgcccggccagtggtttacatttgtgtttgctcctaggctgtgggttctttgagggcacaggcccactccagcttctagcagggaagcagctcagtatgtgttctgaaaaagggcaaatgtctccataaccctttgtagtcacatgtccacccgggaagaaatcaaaactcaacctggtgaccatattaaggcacacacttaaatgccgagttgtaaaactgggcacaggttgtttttcctgaagggggaagaagtgagaagaggcaggctggtgttgggaaaaggaggtagacatgtgggggtggcacactgaagacttttggaagtgcctggaggtgtcagcagttgtaattgacttttgtcttccttcactatagggagcactctcatggcctttcaggattgtaagacactttttgtttgtttttcaagacggagtctcgctctgtcgcccaggctggagtgcagtggcacaatctcagctcactgcaatatccatttcccaagttcaagcaattttcctgcctcagcctcctgagtagctgggattataggtgtgtgccaccactcctggctaatttttgtatttttagtagagttggggttttgccatgttggccaggctgctcttgaactcctgacctcaggtgatccgcccaccttagtctcccaaagtgctgggattacaggtgtgagccactgctcctggccctaatttttatttttttagtagagatggggtctcgctacgttgcccaggttggtcttgaattcctgggcttaagggattctcctgccttggcctcccaaagtgctgggattatggccatgatccactgagcctggcctgtaaaagacacttctactgagcctggcctgtaaaagacagaagacggtgtggaaggagaggattgcagttggtcacagacttgttggccacaggaccctttatgtagggagcagctcaaaaggcaccagggcatctggccaggcgcagcggctcacacttgtaattccagcactttgggaggctgaggcaggcggattacctgaggtcaggagtttgagaccagcctggccaacatggtgaaaccctgtctctactaaaaatacaaaaaaattagctgggcatggtggcgcacgcctgtagtcccagctacttgggaggctgaggcaggagaatctcttgaacctgggaggccgaggttgcagtgagccaacatcgcaccactgcactccagcctgggtgacagagcaagactctgtctcaaaaaaaaaaaaaaaaaaaaaaaaaaaagcaccagtgtttctggctggagcccagccaaaaggatcccaaggatcccagccccaaggtgaaggtgtgtccagggcccaggaagcagcctggtgtgatggtggagcacggtttatccggaggaaagggagcaatggggatggagaggtgggccaggcccaggcggcatgtcaagttcataactgtctggggctttcttctggcggggccaggagctgccaaggcagggcggtcggtggttctccaggagtgcattaggaagaccgtgcttgagacgcccagttgggggaaccctgtagttgtgggggggcaggagagtatgagggcctgccccaggaccagcagtggagaagagagagaagtagatgggtgtgaaaaacaccatagagggagagtctggaggatttggcaatgaacggaggagaggaagtggtggagcagaggggagggagaggttgtccatctgcagacagagatgtcagccatgctggtgacaggggtgatggggactgcagctctgcggaaagtgatgaattcgatgtgtctggagcccacatggtaggaacatacatgtacttctgaagcgcaggggagaggcacaggtggaatgccaatgcagatctctccattccaggggagggttggtgagggcgaatgagatgaaggagaaaggggaggggctgtggtcagaatccagggctccccaagggactggccacttgttcgcactgcagaggatagtgctgggatggggctccattgcccactttgctggataccaggcttcttcctagcggcctcattgtccttttgttttctctctttttttttttgagacaggatctccctctgtcgcccaggctggagtgcagtggttcacagctcactgcagcctccaactcctggggtcaaacgaccctcccaccttggcctcctgagtagctgggactacagtaacgcaccaccatgcccagctaatttttgtattttttttttttagtagagaaggggtttcaccatgttggccagggtggtcttaaactcctgaccttaagtgatcctcctcgccaccccccctcccccgcctcagcctcccaaagtgctgggattacaggcatgagccaccacacctggcctcactgtctcatcttaagcgggtgcagctctgtgcttagcacccactgggcctgcagcaaacccacccacaacccagaaccgtgtctcagccggacaccaccgaggtgcacacatacccaccgacagacctccagaggctcttctggaaggtactgtaccttccccggagaaagtctctgcaccattcccaagttaatgttaaacagaatttcaaaaggcttatcactcctgataaccatccatgctcaggcccagggcacgcagctctgctctagactggccatggagagtgaaaggagcagcttggggtctcaggctggccaggggccatctctgctatttccagtttcctgcagccgggacttccgggatctgctccttggtgactcttaccagcaattatgtgccactggcgaaatcacttgcaacccctcttctattttgctgtacaacacagccccaaagtggtggacagggtggcagtctggggtcccagacctgaaccgacccctggcaccacccctcaccccttgcttggccggccgcttctgacaccttcaagccctgaacggtcacaatatgcatttattaatgaatgtatttatacacaatacaaacgtgcggggacaccgtccccttcacagcccagaacccagggtcagaagatgagggatccagcctcagaggggagatatgcgacttcccaagagcagttcttggcctggaggggccatgagagtgcaagacacggggccgtggccggggcggggctacgggagcggggcgtggccggcccctgaggttactataggggaatgggccccggccaggtcccctctccttggggcagtgggaagacagcggggcccacgggccagagctgctacacgtaggcgtttctgccgtatttgccaaagctgctgtcgccttcttggtccgaggtggcgacgggcatcacggacactggagcctggtagggccgccgggcgctgcggggagggcccggggtcagagcgggggcgcggccctcctctctccaatcccgcccggccccagcctgcgcctcaccctgctcacctggcggctgggtcctcgtcagagccgcagcagcaggcggagcagaggcagaggccacccaggatggagatcagtgaggcgctccaccccaggtagagggcggggcccagctcgtacctgcgcacaagggcggcgcgggggcgggggacaagtgagacgccagccggggggcagggctgagtcccacccgctgccccgagggcggggggtggggggtttcctcactcacttggttccggggtacaaggggtcgaagaagtcccgggtgatgttgaaggcgtaccaggagatggccaccatcccgcagatacctggggaccggaggacgaccccagtccagtccagggggagggatagtgggggagggggcttaggggagaggcaggcaggggctgcccagagtaggacgggggcaccaagtcccagagcagcaatttcactcaattcctttctccccaccccagtttataagccttcctccttcctggggtcaacttctcagggtagcccttaggccccaagtccagcccacccagctcatctcacactacctcaacctcctcctgcctcttctctctttggtcccagatctacctagttcatgcccacctctagggccttcatcccatcatctcctcacccagatggagccccatccaaatcccgcccacccttgaaaccttgaaaacccagctgggccatgggagtccagggtcgtcctttcctgaagccaggcagacccccgggctagcaccaccctactcactgggggcttgtcctcttgcaagccacctgacctttctgggcctgttttacctctggaaaacaagcaatacccaccctacctcaaaggcttattgtgaggcaatgggtacagaaatgttctgcaaattgaaaagcaatggccagatggcattgtttttgttttttgctgagacgggttctcactatgctgcccaggctagtctggaactcctgggctcaaggcagttctcctgccttggccattttttttttgacagtctcactctttcacccaggctggaatgcagtggcacaatcttggcttactacaacttctgcctcccaggttcaggtgattctcctgcctcagcctccaagtcagtgggactacaggtgcctgccaccacgcctggctaattttttttttttttttttttttttttttttggtatttttagtagagacagggtttcaccatgttggccaggctggttttgaactcctgacctcaagtaatccacccacctcagcctaccaaagtgctgggattacaggcatgagccaccatgccccgtggtatggcactgtggacgtgcactgtgtgtgtgcgccatagcgtgcaccctaactctgctccccagctaggatgtaagctcccggaggcagccgctcactcttatcttcgaagtccctcccacacctggccgtggccagcccctactgggagctcaagaaacactgccgatgggctgatttgcagccaggagatctggggagtacagatgaggcaggggtgagcaggtgtccatgcagcagggtaggggaggcgagcatgaggagtgggaa

SEQ ID NO: 179 - DNA, 827 bp, Homo sapiens
gcagtttcttccgacagttgtgttgtgccaatggtggagaagaaaacttcggccacctcagcctccggagtggctggaactgcaagcatgaggccccacgcctggttaatttttaatttgttatgtggtgacgggctctcgctatgttgcccagttcgctcccaggaccccgggcagcggcgggtgctggaccgggctgcccggcagcgtcgcatcaaccggcagctggaggccctggagaatgacaacttccaggatgacccccacgcgggactccctcagctcggcaagagactgcctcagtttgatgacgatgcggacactggaaagaaaaagaagaaaacccgaggtgatcattttaaacttcgcttccgaaaaaactttcaggccctgttggaggagcagaacttgagtgtggccgagggccctaactacctgacggcctgtgcgggacccccatcgcggccccagcgccccttctgtgctgtctgtggcttcccatccccctacacctgtgtcagctgcggtgcccggtactgcactgtgcgctgtctggggacccaccaggagaccaggtgtctgaagtggactgtgtgagcctgggcattcccagagaggaagggccgctgtgcactgcccggccttcagaaagacagaatttcatcacccaatgcagggggagctcttcctggaccaagggaggagccgctcattcacccaacaaaactgtgtcttatctgccaggaaagaccagcctcactcctgggaactgtctggcaggtaggctgggccccccagtgctgttagaataaaaagcctcgtgccgg

SEQ ID NO: 180 - protein, 188 aa, Homo sapiens [sequence omitted]

SEQ ID NO: 181 - DNA, 1308 bp, Homo sapiens
gaagcctaggagtccgccgcgggacggaggcctgggggaactgggagttcagctttctgcagagggccactaggaacctcggattgcccacggaagccagccactttctttgacagtccagcccacctcctcttctgcccggagaagctccaggggctgcctttgtgatcacagcatcttcacaaggaccaaaggaaaataagatttcttgtaagaacaccgtgaccacatctttaaaatgacccatttcgtggctcccacaagatttacacctccacactgaggccggaagtggttttgcccctataaaacatggcgaaaagctttcttgtctccaaggaaacgccacgtaatgagtcaaagctgtggcgcacgcgcagaagtacaagctaccggaagtgatggcgcccctactaaagccttggggttagtacgcgtgcgcagcagtttcttccgacagttgtgttgtgccaatggtggagaagaaaacttcggagcagagaagagggccagccacctccatagaggcagggagagcagccgagctggagccggaggattcctggacatggagaaggcctgcagttttgtcaaggaagcaagcaaagggtctctttctactcgatgaagttcgctcccaggaccccgggcagcggcgggtgctggaccgggctgcccggcagcgtcgcatcaaccggcagctggaggccctggagaatgacaacttccaggatgacccccacgcgggactccctcagctcggcaagagactgcctcagtttgatgacgatgcggacactggaaagaaaaagaagaaaacccgaggtgatcattttaaacttcgcttccgaaaaaactttcaggccctgttggaggagcagaacttgagtgtggccgagggccctaactacctgacggcctgtgcgggacccccatcgcggccccagcgccccttctgtgctgtctgtggcttcccatccccctacacctgtgtcagctgcggtgcccggtactgcactgtgcgctgtctggggacccaccaggagaccaggtgtctgaagtggactgtgtgagcctgggcattcccagagaggaagggccgctgtgcactgcccggccttcagaaagacagaatttcatcacccaatgcagggggagctcttcctggaccaagggaggagccgctcattcacccaacaaaactgtgtcttatctgccaggaaagaccagcctcactcctgggaactgtctggcaggtaggctgggccccccagtgctgttagaataaaaagcctcgtgccggaagcc

SEQ ID NO: 182 - protein, 199 aa, Homo sapiens
MVEKKTSEQRRGPATSIEAGRAAELEPEDSWTWRRPAVLSRKQAKGLFLLDEVRSQDPGQRRVLDRAARQRRINRQLEALENDNFQDDPHAGLPQLGKRLPQFDDDADTGKKKKKTRGDHFKLRFRKNFQALLEEQNLSVAEGPNYLTACAGPPSRPQRPFCAVCGFPSPYTCVSCGARYCTVRCLGTHQETRCLKWTV

SEQ ID NO: 183 - DNA, 1173 bp, Homo sapiens
gaagcctaggagtccgccgcgggacggaggcctgggggaactgggagttcagctttctgcagagggccactaggaacctcggattgcccacggaagccagccactttctttgacagtccagcccacctcctcttctgcccggagaagctccaggggctgcctttgtgatcacagcatcttcacaaggaccaaaggaaaataagatttcttgtaagaacaccgtgaccacatctttaaaatgacccatttcgtggctcccacaagatttacacctccacactgaggccggaagtggttttgcccctataaaacatggcgaaaagctttcttgtctccaaggaaacgccacgtaatgagtcaaagctgtggcgcacgcgcagaagtacaagctaccggaagtgatggcgcccctactaaagccttggggttagtacgcgtgcgcagcagtttcttccgacagttgtgttgtgccaatggtggagaagaaaacttcggttcgctcccaggaccccgggcagcggcgggtgctggaccgggctgcccggcagcgtcgcatcaaccggcagctggaggccctggagaatgacaacttccaggatgacccccacgcgggactccctcagctcggcaagagactgcctcagtttgatgacgatgcggacactggaaagaaaaagaagaaaacccgaggtgatcattttaaacttcgcttccgaaaaaactttcaggccctgttggaggagcagaacttgagtgtggccgagggccctaactacctgacggcctgtgcgggacccccatcgcggccccagcgccccttctgtgctgtctgtggcttcccatccccctacacctgtgtcagctgcggtgcccggtactgcactgtgcgctgtctggggacccaccaggagaccaggtgtctgaagtggactgtgtgagcctgggcattcccagagaggaagggccgctgtgcactgcccggccttcagaaagacagaatttcatcacccaatgcagggggagctcttcctggaccaagggaggagccgctcattcacccaacaaaactgtgtcttatctgccaggaaagaccagcctcactcctgggaactgtctggcaggtaggctgggccccccagtgctgttagaataaaaagcctcgtgccggaagcc

SEQ ID NO: 184 - protein, 154 aa, Homo sapiens
MVEKKTSVRSQDPGQRRVLDRAARQRRINRQLEALENDNFQDDPHAGLPQLGKRLPQFDDDADTGKKKKKTRGDHFKLRFRKNFQALLEEQNLSVAEGPNYLTACAGPPSRPQRPFCAVCGFPSPYTCVSCGARYCTVRCLGTHQETRCLKWTV

SEQ ID NO: 185 - DNA, 24247 bp, Mus musculus
  misc_feature (1)...(24247): n = A,T,C or G
tcttattctctagctcttttctctctttccctttctccctctctccatgtggccagggccggactctcttttaccttttctctttcccctgcctttctataataaagctctaaaaccatagactatatctgttcatcaaggccggccatgcttggatgatgggataggctttttttttttttttttttttttaagatttatctatttattatatgtaagtacactgtagctgtcttcagacactccagaagagggagtcagatcttgttacggatggttgtgagccaccatgtggttgctgggatttgaactcctgacctttggaagagcagtcgggtgctcttacccactgagccatctcaccagccccgataggctttcttctaaggagccacttctaacctcccgtcagaaggccttcctatgctccagccacagacagaccagagtaaggactctcacctgcgtgggaacctctctccctctgccctcttcccttatctctggggctgagagtgtcacccctgggcccctattctgttctcagctcctctgtcttatccagtgtggaatgccagagacgagaacctggtacagggactgccccttgtccgtccgtcccccctgctgtgttaggccagcggcttcacacagccagatgcccacccggggcctcatggaatactgcagtcctcctgcgtccaccgacccagagcacaggaactctggtcagacgcgggctctctccctcccttcttcccctacactcacagccccgcacacatctgcaagggccaggtctacaccttgaacttgagattcccaaatgtagccctgagccacattagtcaggggtttatataggctaagaacataaagttacattctgtttacatgcaagcagaaggctgcattctgttttgcaaagtcttggttatctggaacaaaataagcttctgtttacagaagcagaaatagcagttaacctaatgacctagtcgcatgtcttgcataaacaactgtctggttaaaatgtacaaggcaagacaattgcaaaaacaacctgtaacagacgttaccgcttgtagtccaattttgtttattcgttctcttaagcacagtaattttagacttttagacataaagtttgccatcacagctcttttttgactatatgctttcttttcaggtgatttcatacacaccacacagaacatacacctatctcagcaattgtctttttatcttcaataattcctgactaaaagccacctccagtatgctccccaagtactaaagcacaaaacaataataaagaacaaaaaagtcacataaactcaaaacacagtgtccctccctatttcaaaagaaaagcatcccaagctgcctggttgatacccaggacctccgatgatccaaaccctctgaacccagcatccctcaagggattggttctagtatgggcaccaatacagcatggctcaagtgccttgtgagatagtgtagtgtttttgttgctttttttttttttctattgttttgcagtgctggagttgaacatagggctagtggtacataacagtttcttccatgattgatacattccatctgcagggaaactattaaggcacaaggtgaacaactcaaaatagcttcaggtagtccctgagactgatctgattctctagatccctccctccccaagagtatactgtgaagactgctaagagttgtaaggtctgaaaatcactgaaggaagtccccagactcagtatacaaaaccaaagagcgtttattctgcaaaaacaaccagcatttgggggtcaaccattctttgaaatgggaacagggaactctctagaaggattaggtaatctaaaatgtcattggtgggttctagggagtcataggtggtcagtggtctgcattcctatgtcacaaacattcaatcatgtgatgaaatagggctggctgcccagcacggatggcccattctaagatgagatttttccccatttttgtggtcatccccaggctgttctttgggagggggatttatgatcttgtgctggaatttattgtctgttcctagagctggtgtcttatgacttagtttctgggactgttggtctattcctgaagatggtgccttacagcctttttttgaaatcaggcctggtccttagaatggaggcaaatggggtttaatgttgccctttcagagtgactctcagagaagccaagctccctgaaaagtttagaccaactgagttacttgggaaagatatcctctagtctgttgagctgctataggctgtgcagtgcactccagactcccggttttgtgagctgttgtccatgctgaggtaggctttggtgatgcagctgtctgagtcatttctgttcctgtaagtaaccccaatgttggactcggggtggaagctgggaaaattcactttagagacggaagctttaaaatgaagactttattttctgagcacccagggaggtgggcaattcaggatctgaatgagtccccgaagggaaattgtacaatctttttaaaggatgagaacagaaagttgggaggagggagctggggagagctgcagtgttatgcaattgtatgttaacattatgggttaaacaagggagtaccactggagactgggatgtatgcagggggcttcaaggtccttaatgcattttcctagatgttaggtccagagctcataggaggacaaaggaacaggtcagctgcatgtaattatgtaattaagacataacaggtgactcgttatgtatttttatagcatgcaccttggtgtaggcgagagtagtttttatagtctctacctgttagtagacaattaagaaaacatttggagaggtgggatgggagttcattcctaggcctggggacacgaacttgtccttgagatgtctggacttggacaactgtctccttacaaggtgtctctgagatgtctggactcagataactacttacaacaaaagctacttagctatggggaagtccccagctcccctaggacctgggacctggaatttatgtttctccctgtgattaaatggagtctgacaatgaagtggtagcactcagagtaagtttcttttgcttgttcacaacacccaataaaactcataggttcactaagttggactttggtggcatcaccacatcgttctgtcccagattccctagctgggctaagagaatgtgtgcaatgtgtctctccagatgtactagctggttattgtgaaaccaaagcaggagcctcattgttgtcaaagagccagttgttatacattgttactaagtctccattcctttcaagagtatatttctgcttcctaagtctaaagtatcctgcaaaccttgttgttcaatctaaaacgaacttgttaccccatatttgcccaccctcttgccttgctaagcttcgggacctgtgtgatatatgatttcccgtttgcttgggaaagtgccttcccagatctcttgatggctccccttccacatgatgtagtcttcaacttattcttattgcctcctttctaacggccaattatccagacaactgtctggataatatgcccaattaaaattaaacacctcatcctaacacagggtttccccttgtacctttataaatggccgtctgcttatgtgccatgtctgtttcctctctctccctctggaacagacacccctggcccctctcccttgttcctcttcccttcttgctcatcttctatctcgtctttgcctcttattccccaccctttctcccattggggcaaataagtctccttcatgctgagaatgtggatttaggggtcctgagcccttttcccttgtgcaactctaaatacagcttgttttaattagacagtcatggaattggtgttttcctcaggttgaacattatatatcaacttgacacaagctagttatcagagaagaaggaaaaccaattgagaaaatgcctctatgagactgtgggcaagtctgtagggcattttgataattagtgatagatggaggaaggccctgcccattatggatggtgccatccctgggcaggtataagcaagcaggctgaccaagccacgaggagcaagccagtcagcaacagttgtccatggcctttgcaccagctcctgtcttcaggttcctgccctgcttgagttcctgtcctgacttcctttgatactgaactgtgatgtggaagtgtaagcagaaaaacaaaacaaaacaaaacaaaaacaaaaacaaacaaacaaacaaaaaaaccctttcctccccaaattgtttggtcatggtgtttttatcacagcaatggtaaccctaattaagacaccaggaaaaattctgtcacacagcaactatgcaagcactttaacactgagctatattgctaactctttttatttttgagacagggactcacttagttcccaggctgggcttgcactcactatgtgacccaggcaaaccttgaatttgagatcctcctgcctcaacctcttgagtatctgggattctaggcctatgtcactagatcaagttcttatatttaaatgtaatctgtttacttcaagtctaaattacttataatgtttaatactatgtaagtgtcatggaaatagttgttatattgtgttgcttggaaaagaaaatagtctgtgcctggtcaggatggatgcaatgtttagttcagctaagttttttttttttttaagacaaggtctctcacctttaatttctgcactcaggagaaagaggcaggcagatttctgttcgaagctagccttgtatacatagcaagttccaggacagccagggttacacagagaaaaatcaatcactgcaacaacataaacccactgggggtccgggtgggggagcaaggtctcctactatatagtcctggacggcctgggatttgtaacatagaacaggctggtttgtcttaaactgagatctacctgcctctacctacccaatactggcattataggtgcacaaccatgtcacattttacacacacacacacacacacacaccttttttaaaaagatgtatttattattatacataagttcactgtagctgacttcagacacaccagaagagagtgtcagatctcattatgggtggttgtgagccaccatgtggttgctgggatttgaactcaggaccttcggaagagcagtcagtgcccttacctgctgagccatctcactagccccatatatacttttaaaaaaacaaactacacacacacacacacacacacacacacaagaactttccttaataaacttcaacttttatttcatactgattggtcctagaattctattctacagcacaaaacaagaatcctagcttaaaatgagtaaggaagtcacagactacagatggcaacataaggcctgggtcccagctcccactgacagtcccagctgcagagaaggctgagacaggagggttgtcctgagctcaggagtttgatacccgcctgagcagcaccccaaacctccatctccaaagagaaaaaggcaaagctctggaagactaaactgaggggctagcccagaactcaaggggactaaactaaggggctagcccagaactcaagggactaaactaaggggctagcccagagctctaaaggactaaactgaggggctagcccagaactcaaggggactaaactaaggggctagcccagagctctgggagactaaaatggggggctagcccagaactcaaggggactaaactaaggggctagcccagagctctgggaggctaaaatgaggggctagcccagaactcaaagggactaaactaaggggctagcccagagctctgaaggactaaactgaggggctagcccagattagtgaagatgaaaagacagcagctggcaagtttgggtcagggtcatggaacactttctgattattcagattgttatgtaagacaatgtctggccgtttttaatgtattgggagaacactaggaacctccagagaaataaagccacgagaagagaaagatggacgaatggcagggtaagggatatacagggatcgtctgtactgtttgtataacctcgggtgtacaaacagaaattgttgttacacttccgtctcgtgatctaccgccccagccttgcctgcttgccttttgccatgccttataccagagtgtctgcctgcctctgccacctccttagctcaggttgagacgggacagataaacaggaacaattcagggaacctaagaaagaaaaggaatccctcactgagagtgaggcactccagcccagtagtcaaaactgtgggagggaagttgcctccacacagttctcatctgtacagatgtttcaaacaagaatattgaaatagttatgaagcatgctatgtctatatgtatggcttttgaatgtgaccttattccttacccagatacaaatctgaaaatccaaaaggttctggacaagactctttaaaataagattttaaaacgttgtttgcagtaaagacaccttaacttctctgcatcctactgtgaagatgtgatcagccgtgatcctattcattacttcctaggccccactctgtgatctcctacgagttccttagcaaccgtggaatctaacctcagaagacaccaaagtcccgcatgcataaggacacgggcgtgaaacactctagagctcctgtccacacctgcgtgatgattcccactcggaaatctctgccaatgcccttcctctggactccaactccccttcatactagcacatcctgaaattcctttttgtggtgacgcgaagctcagctgaatctgaagggggcgctctgcaaggaaggcagccactgcaagaggccgcagtgacctgagcccgctctcctgaggtcatccttgctcacgactttgctctccagctgcttcctggcttccttgctcatcttttataatccattttccacgctgcagacagtgagctttgcaaaatggaaattcgaagccaagtaagtccgtgtctaaaaattcagcgttggatgggatgctgtcttcatccaaaatatcactggctgataaagaacatgtttgtttgttttttcccagttctagaccaataccaaattgctgacaagcttagtgtctggtgaaggtcagtttctcatagatgacactgtccagatgtctttactttgcaaaagggctgaaggcgtgactttgcttcctcaagcccttttctaaggcactaattgattctgagagcagcaccttcacagcctcaccactcctaaagccccacctcttaatgccactgcagtaaggactgagggacaacatggctttggaagacacagtttagttagcatgataaatgctaactaaagagaggactgggtaaactggattaccagctgcacagtagacaggcagggtatatgaacctttgctatgttcagtgtatagtggtattgtaggacaatagaggataggtgagtgtttatatagcagttaagggtcgaatcttctgtacccaaaggctggagagatgactcaataattaagagctagtattgttcttgcagaggacctggatttagtttcccagcacccacatggtagctcacaagagtctgtaactccagtttcaggggatcctccaactgctgcaagcctcctcaggcaccaggcatgcagatggtgcacttatatatagccaggcaaacactcagacacataatttttttttaaattgtaattaactgaagtgattcagcaaaagtaattattttgtcattattaaacacacattcaatgagagatacaaaacaattctagcaaaatgttgccagtgaaaaacaaggattgatgactgggacctgtaatcctggcacttctaatgcaagagaggtgggactccacgagctcaaggtcagcctggtctacacactgagttccaggacagtcaggactgcacagtgtgactgtctcaaaaaatgagatgtgtaaggggtgggagtggggggacaaaaggtcagtggagctaggtaaaaggtagatacgttgtctgctgttatgccaatactgcaattctcctgcacatcttagatgtctcagaggctagggaagatgtcattttgtgttaactatcttgagtccgacgatcagtgttatggttgtatagcaaattatatataaacatataaattaaaattgtatgacatctaggaaaagtttcctcttgttgcatctctaactaaaagtagctttcagctgccacctagggtctggagagagaaagtcatgtaagaaagtcatccataattagcaggatctggcccctgcctcttctgcccactcccaattgttcctctggtcaagaagatgaaatctttgttgtaggtggaaccttaatgttccaagatactcaaaacatgaattaccccagccattcaaccacttgggctgggtgagacacgtatacccttagaaagccaagcacatccaggcagtgataatgcgtgcctttaatccaagcactgggaggcaagtggatctctgaggccaacctggtctacagagcaagttccaggacagccaggactagaacagaaatcctgtttcaaaaaagaaagaaaggaagagagagagaaagaaaaaaagaaagaaaggaagacaggaaagaagaaaggaagggagagaggaagaaagaaaaagagaacaagaaagaaaatatataaataaataaatccaggctcgccttaagccttcttagagacattattggaataactatctctttaatgagatattctttccttcctttaatccccactacacccatacacaccaggacagtccctacaaacagtcctgaggttctgtgtaaacatgactgaagtggaaacttacgggttctttggaaagtcagttgtgctggatgttgctttgctagggtggacactggtgaaaggatggtctgctaaagcaagcacgtgaaaggtcacatgatggaggattcttcgctaacgacagaaatatattggtctgccttaagtagttgagctccatttgttgggactccatagagagaaatgcacttctgatggtgtgctgcggtttcttgttgattctacagattggagtgactgacagagtgatgtcagctgagacagattcatacgcccgccgaggcaagacacttgctaaggcaagacctgtggagcacatgagatgtctagagggagtataaaaaggactcgatggacagtggcagaggctgagctaggcttgcttgcatagctaagtgcttcttggtctttgctgagagaagcacagctgagaacttttcctattggtcttggcaccctcctgctgactcctgctgaggctgctgctatccagactgcggaactggactgctggtgtgtccgtgaagtgtttgctagtggatcaagttgctactgctgacctgtgaattgaactgccgatttccagacaacacaaagttgctccaaagaacctttccaaacaggtccgctccccctcaacccctatcctttcttttccactgcctctggtgagtggtgggctagaagagaggtttaaagcatttaagaactgtagtggctattcctggttgtcaacttgacaatatttggaatgaattacaatccggaattggaaggctcaccagtgacccttatctggaggcttggagatccttatctggatcttggtttgaagatcttgagccacagtggctatgaattccagaagattgaatctccgagtttaaggaacacacatttaatctgggctacgcctttcatctgggattaaaggtgtggtggaacacacctttaatctgggctacaccttctgctggagacaatataaggacattggaagaagggagtctagcttcttgctcttgctccttcgcctgcttgctgcgtgagactgagtaactgctagatccttggacttccattcacagctgcgactgaacaattgttgggaattggctgccgactgtaagtcatcaataaattcctttactatctagagactatctgtaagttctgtgactctagagaaccctgactaatatagaagttggtaccaggagtggttctagagtaacagaagtacaaggatgaatcttttaaaattctggaattggcttgttgatccaccagcactttcaactattgaaacctctccagattctctccctcctgggagctcagagaattttgaagacccatggttgaaactatattccgaacttaaagaagctaatgcccttgattttcttaatgaattaggtgattcagtgcacaaagctttctacaagatggggaaaaaatcgaaaaatgattttactggctggctgctcttagtatctgtggaaaaaatgatgaatgaaaggaaggagttgtgtgataaannnnnnnnnnnnnnnnnnnntaccaggaggtgtggctggggggagggaaaacctgtgggctgcagggagtttagggtaagagaggaagtgagaagggctagcagggtgctagccagactctgaactctgttaagaggtacttgagatactgagggagcctggaggccagcataggctttggtatactaactggaagctcaggtagccatttatcccttctctgccttttggaatttggggaagtggaatttccttgggatccgacagttgggtctacccagagaggtacaactgttcctttattctttcttaggatgctgtccggaccctaggtcttctttttctggtaatttaggattccttatttttctctagagctctggtctccatcatgtggctgtctttcatgcctgcttaactcaaacaacatggaatgtttccttcttgtctccattctcccccttgagattacagcttgcctaccctagtatttgtttggttttgtttaaaaaaacaaacaaatgtctatagcattgtcttcttttagtaaactttgatctttgatctggcagtagtggcacacaccattaatcccagctcttgggaagctgaggcaagtggatctttgggttcaaacaaggccagtctgatctacagagtctgaggccagcctagtatacattatgagtttcaggacagcccaaagacaaggctgctgttgggtcccaaagaagccagggacaaataggtaactatggtttctattacaccaaagtacacgctggcagcagaactcgttatctatggctttccttagctcttttcaccctatctccaaactgctccagctcagggcttcccttcccttctccagcttctgactcctatactatataacccagccattttggccatgagctttcttggttctcttgactctggctctggctctggttctctctctctctctctctctctctctctctctctctctctctctctctctatctctcactctccctcccctcctctcccttcatagccctgttcagtctgctgtttagcctgctctattttcttcctgcactagacccttccagatgcctctggctgtgttctccctcacacacagagtaggaactgcctcagccattccttggagtggtcatgtgttgtgtccggccagcagaccacaacctgggttctagcctggaaaggcattttggaaacctggaagagaagaggggctaggtggcgagagaaaagaatgtagccaagacagttactctgatcaaggctcaaattttattgttgcgacactagttatgaaggaagggggaggggacccgattcccgcggaataatctctggtccagtagaaaggtgcacgtgtgtggctccgcaggttccagcagtgggcgtggcagaacgaatgagcaggaagctccacccctgagcaagcaggtttcaggctaggggaggggagactacagtcatgtgctgatttcattcagttaccacatcctgaccaaatgaggtgagaaagtggtcttcttgtttctcctacactgctctaagaagtctcttgtcatttctttggtcctcacgtgtaggtaatatgcttacagtaaactgtgtgtatttccaccacacacttgacacacggtatcacaatgaacattatgactatttctctagtgctttgtaaactctgagagcagggctgtctttattctatctctctcaggaacaaaggaatctccgaaaggaacaaagctggggtcctacacagaagcgcgcgggggcaaggcaagttagtgcagctcttagggaactgtgtgacgatcttcattttccttctcactggaattctctgtttggggcaggacagattatcttgggaagaaaactgtcccagcagacattcccctctgaattgagcaaggtccgctgtaatctcataagaatctgtttttgctatggaagcactctatcaataacccaggacagtaatcccagcaggtaggaggtagaggcaggaggatcaggaaataatggacatttctagagtggtaaaggccaacctgggctacatgagacttctttttttattaattacatacaaatgacttaagctatttgggttatagatcaagaagctacaaatctggtgcaaccatcttaaatttacaggaaacacttttgtttttattgctctaatttcccgactttgcaggattttaccggtcgggagaagcagggactacaattcccataaaacctctgggtactgggtaacgcctgccagacgcaaccggactgcgtttcctagcgagcctcctgacgcggcgtttgcgtggtccgaccggaaattcggttgttagatcaagcggtggtacagcaggctgcgcagcaagtacaaaggtaccaccctagggttcggagagacgatagggctctgactcagccaaaaggaccaagttgtacattttccatttttcagctcccagccatgctttcccagtgcccttagtgcctagcgctctggccgctcaatcgcctttgtctctccgctaccggcgtagaagccgcgttaacccgccacgcagagtagaggcggttccagggtgtgcttgtctggggtgcgtgggcagggtgtgtggactcagtcccgtgtccttcgtttctccgcagcgaatgctaagtgcgcgatcggcccagtgcatggtctccatggccacgcgctcgtgtgtatcgcggggcagcgcgggatctgcggctgcaggaccagtggaagccgctattcgcgccaaattggagcaagccctgagccccgaggtactggagctgcgcaacgagagcggtggccacgcagtcccagcaggcagcgagacgcattttcgcgtggcggtggtgagctctcgtttcgaggggatgagccccttgcaacggcaccggttggtccacgaggcactgtcggaggagctggctggaccggtacatgccctggccatccaggcgaagacccccgcccagtggagagaaaacccacagttggacattagtcccccctgcctaggtgggagcaagaaaactcgagggacctcttaataaatacctggattgggagaacgatccgaatgggtcgactgagaataaactactacatcactactaccttattccttgatttgtacggaccaggagctctgccttttctgctaatgaacaccatgcagaggcaaagacacctctggtgaaagctaagctagcccagggagagagcagccactccctccctcttgcccttgcctgggctagactagagaaaggtcctgatgaatcggaaagggccatgataataaaagagaagctggtgcatgaggtcaaacggtgctcttaatacctgttaaattggagctacacatcattagtgcatatgggggctgggggaggttgcataacaccactgcgcacttgggtgtcagagagtaattttcggagttactcctcccccagttgcatggttctggaattgaactcagagaggccatcaggtttacacagctgttaggtccctacagacgttcttatgagaagaaaattacctgtaggctagagaagggatttgtgaggaagtgaactatctgggttttgcaaggataccaaaattaacccggaaaagagggaattcctgcatttgacgcaggaaaagaaccgaaataaacattggctaggtttggggaatggagatggctcagtggttaagagtactgactgctcttccgaaggtcctgagttcagttcccagcaatcatatggtggctcacaacaatccgtgatgagatgtggcgcccccttctggagtgtcagaagacagctaccatgtacttacatataatacacctttaataattacacacacctttaattccagcattaggagcagaaaagaaaaaagagaaatgtagcgcagcgtggacttgaggcaggagaatcgaggacaagctgcaggtagcagggattcccaaaagaaattgcttaaaactggggggccagagaagtggtggaacactttctgctctccagaggatccagagttgattcccagcacccacttggtgactcacgaaggactggaactccagttgcaagggatctaatgccctcttctggccttggtgggtaccaggcacatggtgcatatatacatatgcaggcaaaatgctcatgcaaataaaatatgtttatgtcgatttttgcaagaataacaagggctcttaaccgtctagagccagaataagtaaatgtttttaaataaacaaaatgtaggtttgaggtaccccattccatgttgataagagaaggaattgtttctccaacactagtttatcttccccagatagtcagtatggaagaatgaatgaagaagccaggagcagacacagccactttgggttttaagggttcgaaccctttatttttcagcagtatttttcatttcatttttttttcacatcaatggagtcaggtttagggttccccaggagacaggaaggtggatgtgtatcccctggggatgcagtaagggagaaggctacgtccagccacggaatggtgaaagaagggtcgcacattcacacactgggcactggaggagaaggcagtcctttgagcacagacactagagttaaacagtcaccacctggttcagttacaaaatcggaatggccttagggttgagggcaccagacgtagcgtacggagggtgaatttagatttttttttctttttgtggttagtttaacttccttttaactttttttttttttaacattttacaaacagctaaaaactacaacacgtcacagctacgttgggagtggggagagagtaccaaagaaagcagccacacagagtagggtaggacgggggcagctctacctacaaggctgttctgtggaagggcaaaacggggaaactgaggcttctggtccctgcattaggggttcctcacgacccagcctttttgagaagggttagggacggacccctgcttcctgccccagctccttgtgctttcggacctgctggtttgaccatacgtgcctggttattctccctttctttcctctggtccactgcctgtgtgaacaggtcagatggagggctgtggctagtgggtagaacctctctagagcaaggagagagtgagtccttgtcaggtgccctcaggtcccccaagattgcaggactcatcccagcctggcctaggggttctgcctccagccccagcacagatacaagattctgggaggtactatagaaaaacagtgttgtgtgtgttcactgaaactactactcttggcttatattagacagtagagtggtacccctaccccatggtacacacacacacacatgcgcacgcacacacacgagtgtatgtatacatccacacacagtccagctaagctgcctcagaacttacatataaataaaactcagaaaactaattccataaattaaatccaggcttcacacttgtagcctgaattgaggtgaaaatggtggccagagggctgaggtttattgctactccccagcatccttgggaggctagagggcacccaaggccttcccactcaagaagttcttttggtccaagcctcagcccccattataactccatacctgtggttcaccagggcctaggcggagggaaagaaggggaaggcagaagttccggaaccctcggagcagggaaacagcccccctgctaacactgggggagagaaggatgcagcgcagccttctccttgtgcaaagttgagggtggcagcaggtaaggagtacctcatcccaaaagtggaacgaagggaccgtccctgtagtccctgcccatcagggtcacacacatgcacacaggcacacacagctaagacaccaaacacaggagtgaggaccaggacagcagggcagggtagggataaaaggaattattggtctcacagtgtgcctgccatccctaaagcccctgagacagcccccatccctcactgcagcacctgtccccgggtctcaggcagcttcagagccagagagctaccaagggcaagagcagccgaggcaaagagaatgggagcagccttggtgatgcccacaaaggatgtgaagatgctgatccccagcacagctgccagcttacacagggcattcaggaagccaaaggcagtagtcctgctcagtgccaagccacggcgcggtggcggtccagaagagggaagatgggcaggtgggaaggcaaagtggggtcagaggaaaacagtgtgcgggagcgggaaggaaggatggagaagtgacaggagggggtggggcaacagacacgttgggagacaagagagaaaggagacagaagcagaggttagtaattagcagttccagaagtgaagacaaaagctcccagctgttaaggaaaagctcagcatggatgtgtgtcctaccccaacaacatccttatcctccaccctattctcttccctaaggatattctctcagctctcttcctcgcttctccccagtcctgtagctcctcccctgctcgcccaccacactccaaactacctcttgtcggaagggtagagctcaacggtcagcacgtccagcgcgttccaggatgcgatgctaactcccccaaaaaggcagagcagagcgatcatggctgactcgctgttcccaaaagacaggaagaagcaggacacacaggacaacacactggaaccagctggaaccaggagaagagacgacaatgaaacccagccacggcccagcttgcaaccagctggctttgattgccaccggctggctttgaggcaactccagataactgtgtcccagagtagccaaaggaaggcttttcacacaacctctgtgtttgttagtaccagtttcagtagcagccatttattcaataccaactatgagctaagtaatgggatgttttctatggacctgagagatcagccttctgagagaggtgctatttcctctatgagaagtgccatgattgcaggtgcaagctcacagggtgtgacctgtccaaggtggagctgaacctcaaatctagcctcaaagtctataccctacttgcttaccatcctacctatttctttaacccccccccccagagtaacttctttgccagatccacccccattttgcagcacctctaaacaaaccatgaaggagaaggctctctggccaatggtttccagctggagatgagacgctgacagcccgccctggctgcctctattcccaatcagccagcacccagccctcagccccttaccaagcattctgagcctgccaatcttgtccatgagcagagcagacacaatgtttccaggaagcacagccagtgtccccaagaagctgacaaagtacaccatgtaggcaccttcgcctgtccccgtcacgtctagcgggcagccttccttattgtgcaggaacgtgctgttcaccagccggctgttcacgaacttgtactcaaataggtctagaaggtcaggacacagggccaacatgagacctgctacgtcagggtctctcagcattagcactgacactcactgcaaagcatccaacatcaccatgggaactagcaattttctcagcagagggaccataagcaagaattgggcatggcatatctgagctttactagtctttgtttcttgttcatcctttttgtccacctgtgctgactataaacagaagccctgttgctggcctaggagctgctcctgaagaaaacatttcaaataactttttaaagtcagtctctctttgtgtgtctctctgtgtctttctgtgtctctgactctctgtgtctcaatctctgtgtctttgtctccctctccccctcctccccactttcctgcaaggtgaggaaagcttacacaatattccatttagaggcaggatgttagcctggccgtggtggcacatgcctttgatcccagcactctgaaggcagaggcaggctgagatctaagtttgaggccagcctggtttagagagtgagttccaggacagccagggctacatagtaaaactctgacttgaaaacaaacaagaacaaaacaaacaaacaaacaagaaaaaagggagaagaggtgtttcagtttagcagaggactcagcctttcagctaagaccattactcaggcttttgtttgtggtttgtttcttctttttcttacatatttttaaaaagacttatcttaggctttttaatttttgttgttgctgctgttgttgttttgtgtgtgtgtgttctcgtacatgtaccacgaactctcagggccagaagacaatgttagctcgtctagaacaagagttacaggcaggagtgagctgtctgatgtggttgctgggaattgaaccaggtactccgcaagagcagtgagtgctcttaactgctgagcagtttgttgtttttgtcttgttttttgctttttagaaaaggtctcatgcagcctagcctggtctcaaactcgatctttagtaggacttgaacttcctgtcctctgtcctctgcctccagagcgtgctgccatactcagacttttgtttctgtttttgtttttatttttgtttttgtgtttgttttaatcactagggattaaacctagagagcatccccgagctggccaggtgctcctccaccaaactcgctactctcagccctttcaaattttgatccaggaccttacaaagtcacccaggttggccttaaattttctcaattttcaattctcctacttcagccttctgaggagaggaattgcaggcctctgctaggctgagctaagaagtagactgatgccacgattcccactttttctttattaaatatcccttgtattgtctttcatttccccaaacacccagtttaccctaactcttcataattacattagcattacctcactggaactttataattacagctgaaggtaaaggaactcgaagttttcctcagagagtagatcccaggaaaatacccattatatttcccagatcactggtggtagccagtaagcaaccccagggctccagggcactctcagcttgagagcaggaagcaaggggacaaggaagcctcctcccttcatcaaagtcccctgggccaccactggccaccttaccagtgttatagaacacagtgttgatgaacgtgcagttgcggaagaatgtgttgctggatgtaacatcttcaaagtaacactcctcaaacagggaatcctcaaaggacactgacttcagacgcagcccgatgaacctgcaggaccaagatggtgagacacgccccctcactttgcccctcactgactcacgtccctagagaaccctggttatacataggctttgccctaaaccaccttgtcttgagctcagactcatcaccaagaaggaagtaggaggaatagggagaagtggtgtggaaacacccccacatacttgtcattgaagtactgtccccctcggtggatctgattctccagtgtgaagttaaacgtcacatgctccacgcgctcccctgggaacactttggttcgggctgcatagtccacagcctggagatggcggatcatgtcgggaaaccagacagtcaaaccatagtagctggggagtcagaggcatggagtcagacggggcagatgagacaccagaaccccaatcagagaggcagatgagcagtctacctgcataggggcatacttacccccagcctcatcccacacattccccaaccacctacggtggttctggagacattagggtcttctacactacccattatactctccttcccattcactctgaggatttagatccctcccaccaagccccaagtgtccccataacacaacatccttacctcaccatgtcaccactgcactaactctaacagcttgttttatctcttcctgatagaagataaactaaggactggaacacagtttcttatcccaggacattgtctggtaaagactgactgcctgtcagtttgaattacaagtttgatgacttaatttagtagaagacctggagcatgcagacagatagcaccctccctagggacacgccccttcatctcctgtctcatcactctgcttcagccaagcacagccaagcacagccacaatcgacacttagccccctcacctgaaagacatggtgaaccacacacccatcatcatcagcgtgatgcgccgatactctggactgaagcaggagaggaaattcccccaaacctgcacaggacacagtgaaggcaaaaggtggccacactaacgtctgcctactgacctccagttcttgctttttccacttccctcagttcacctccaaactcacacaggctcaagccctcccttctcctctttccccactcctcctgttgccctgccgttcactctatcattacctgacccccaaggctcaaagcccgtactccccagcgctggtaccaggttcctgtgtcagactggatctcaatcaattcatcctcttgatgaatcgttttaatgtgggtcacctgggcgcaagaaagggagtgaactgtcacatgctattccccaacccactccacgtgtctctttctctcagtagcaaaatgaaaggcaggacgcagcataacaccctgggaaggccactgaaccacagtgtggtctgagacatctaggaaatgggtgacatccagaagggtcctagtggggctgtcggggttgagtgggaagagtcgtggcttactgagaagacgcgctcagggtggcccttggctcgcatgttggtgtcgtgaacctgcttcagtaccatccaggcttcgtcatgcttcccattctagaacacaaacgccattccatgcagttcaggaatgccagatccggtgttacagaccccatcccttcaattgggctcctagagtcccaaaatacaaaaagactccccgctctcccctgcaaccctgatctatggtatagacatcagcccaagctggggtacagcaaggtatgatgagacttggtcaagacttgggaggggagtttgcaaggaaacagaggacagcctagacagcatagatctttgggggctcctccagtaaaacaaaggaagcctaaggtgagggaaatgatggacgcagaaggagccacatcccaatctgctggagccaggaatagcctgacgggagatgtaaagggtgggtcccaacttgagcctgcagaatcgtaagccacccgttaatgagcaggtttcctggtctttccaaacccctcaggagacacattttaagacgaagcaagataagatcctccagagttatgggcttgtgaaggagaaagaagtcaccagagtccagcaacctcacagcaagcatttccaccccccacccccacccccacccccaccctccttcccccccggagcaatccattcacctctaggaagaagcggggactctctggctgcgtagtcagagccccgatggcaaacacagagggaaaggcacacacgaggacaaacaccctccagctgtggaactggtaagcagagcccatctggaaactccaccctggcggatagtcacagagtcagcagagaagcagggagcacggcagagctgggaggactgagagtctgacagcttaccatagtgagggatgatggcccaggccattgcagctgcatacactccaccgatcatccagaacatacagagccagctcaaatgctccccacgtttctcctgcgccagaaactccgaaaaataggagaagactatggggatggaaccgccaatcctggacatttcaaaagtaaacattaggaaacagccatcttcccaattcctttccccagtgctctgggacctcagcccctcccccccccctttattctcatcccatacattatgtcccataagttccttcagccaccaacaccagtcactactcttgggatggcaggaaacaggtaaacaggtcttggatcaaccctgaaagtggctatgagttgggaaggaggcaagatcactgcagaaaatgtggtgatcccagcaccagggggcagaggcaaggtgagtatttcaggttccaggccagccaggactatatagcaagattctattcaaataaaaattcaaaaacaaaacaaaacaaaaaaacctttaagatggatgtccacacctttaattccagcttgtgggaggcggggttaggtaagtctctgaattttagactagcctagtctatttacatagtgtcccaggccagccatgtctcaaaataaaaacaaacccaaaaaaacaataacaaaacccaacaacagatggagaccgtgcaggtgcaggcaggggaaaacttcagattctgccaaggagggtgtcagcaagccttcttaacaaactcaggaaaaaatatactttctgggaggggataactccaggatatgcatgagcccaggggcaaggctgaggtccagtagacctcagtgtagacagcctcagaaacagaggtaagctgggggactcggggacagaccccgcatggtattctggatgttagcaggcgagcactggacatgggtatctggcctgaagatggggtaggaagtgggaaaggcattcgttcactcatttcacacagatttaagttgtgcccaacatgcctcacactgtgccaagggtacactacggcagtgaccagggcacagttctttctttaagggtttagaatgtggacactcacccgaccccggaaaggaggcggcagaagagaaaggttccataaccctggacgaaggacgagaagaaggcgaagacgctgttgactgagagtgagatgagcagacactgtctccgacccagccgatcagccaggcctccccagaggaaggcccccaccatcatgcccaggtacacaatgaggcctgcggagaggaggaaaccccgggaggggggtgggtaggagacatgagcggatattcctcaattctcccatgaactttgtattagagccccaactctaggggctgaaactcctgtagcagaatggatctgagaacatctaggagggaggtggggagaggtggtgaacagtcaccactgcagaccaaggctcaaaggcaagaaggcaaacatttgaggaaaacacccctcacttttgctgcttcctctccctcccccttaaccctctttctttctctctgtcttctaccactcctccagaacactcatccctaactcacccagaagtgaaatggacctgcctagacgcctagatacctcctgcatcctctctgttctcccaggttgtttgaggatgtcattgtcatcgtgttttagactgtgtctcactgtgttgctctggctggtctggagctcactgtgtagactggaccagcttcaaactcacagacccaccagcctctacctcctgagtgctccaactaatgatgttcgagctttttctcccagtttgataccctcaaagaagatctcttgttccttgggaaagaggctccaataaaaggtttatactttatccttcaagccccagtacttgggaattctaaaatgctccccgcccgagtttttttgtttcctacctaaaaccagaattggaattgatttttaaaatcatctctaaaactttgcattttgtcaat

SEQ ID NO: 186 - DNA, 1325 bp, Mus musculus
ccttcgcctgcttgctgcgtgagactgagtaactgctagatccttggacttccattcacagctgcgactgaacaattgttgggaattggctgccgactgattttaccggtcgggagaagcagggactacaattcccataaaacctctgggtactgggtaacgcctgccagacgcaaccggactgcgtttcctagcgagcctcctgacgcggcgtttgcgtggtccgaccggaaattcggttgttagatcaagcggtggtacagcaggctgcgcagcaagtacaaagcgaatgctaagtgcgcgatcggcccagtgcatggtctccatggccacgcgctcgtgtgtatcgcggggcagcgcgggatctgcggctgcaggaccagtggaagccgctattcgcgccaaattggagcaagccctgagccccgaggtactggagctgcgcaacgagagcggtggccacgcagtcccagcaggcagcgagacgcattttcgcgtggcggtggtgagctctcgtttcgaggggatgagccccttgcaacggcaccggttggtccacgaggcactgtcggaggagctggctggaccggtacatgccctggccatccaggcgaagacccccgcccagtggagagaaaacccacagttggacattagtcccccctgcctaggtgggagcaagaaaactcgagggacctcttaataaatacctggattgggagaacgatccgaatgggtcgactgagaataaactactacatcactactaccttattccttgatttgtacggaccaggagctctgccttttctgctaatgaacaccatgcagaggcaaagacacctctggtgaaagctaagctagcccagggagagagcagccactccctccctcttgcccttgcctgggctagactagagaaaggtcctgatgaatcggaaagggccatgataataaaagagaagctggtgcatgaggtcaaacggtgctcttaatacctgttaaattggagctacacatcattagtgcatatgggggctgggggaggttgcataacaccactgcgcacttgggtgtcagagagtaattttcggagttactcctcccccagttgcatggttctggaattgaactcagagaggccatcaggtttacacagctgttaggtccctacagacgttcttatgagaagaaaattacctgtaggctagagaagggatttgtgaggaagtgaactatctgggttttgcaaggataccaaaattaacccggaaaagagggaattcctgcatttgacgcaggaaaagaaccgaaataaacattgg

SEQ ID NO: 187 - protein, 178 aa, Mus musculus
RLPDATGLRFLASLLTRRLRGPTGNSVVRSSGGTAGCAASTKRMLSARSAQCMVSMATRSCVSRGSAGSAAAGPVEAAIRAKLEQALSPEVLELRNESGGHAVPAGSETHFRVAVVSSRFEGMSPLQRHRLVHEALSEELAGPVHAIQAKTPAQWRENPQLDISPPCLGGSKKTRGTS

SEQ ID NO: 188 - DNA, 33478 bp, Homo sapiens
  misc_feature (1)...(33478): n = A,T,C or G
gcggtggctcatgcctgtaatcccagcactttgggaggtgggcggatcacgagatcaggatttcgagaccagcctggccaacatggtgaaatcccacctcaactaaaaatacaaaaattagctggccattgtgactggtgcctgtaatcccaactactcaggaggctgaggcaggagaattgtttgaacccgggaggtggaggttgcagtgagccgagatcataccatttcactccagcctgggcaacaagagcaaaactccgtctcaaaaaaaaattaataaataaataaaaataaaaaatactaaagaataatttttaaatgcatagaaatatactttttcacaataacacataaaagcaaaaagagtaattgtctcagactaaggaatgcacataaaatgggataatactaaataaggaaaagggagatatctccaaataagtttgcattaaaaacaaaattttaaggaggaaatgtcaggggacacagtgcagccatggttctaagtaacgtgatatgagctgtgtatacagtcggttaatttgggatggagggtgcaaaaccaatcagaagggagccatacccaaagcaggaggccaagtcttggggacaaagatgagaggaccaaggatgagaacaagggaaccagacacaggaatggacaggaggggaactgttgactttattgcacatagaagattgcctgaacctggataggggaaagagcagaaagggagttgttggggcaaaatgtaatccaagatgactctgcaccttcctgcctgaatgactaggagaatgatgccaccttcacaggaatagacagcctgcaaggaggagctgctgaacagagttcacttcaggccacactggatcataacggtcaactggcaatggcaagtggccacgtacttcagacaactgggagtgtgtatctggaggcacatctagagacccagttggcttctctcatctgcccagaggagctggagaaagccctgggagtccctgggaagagcttatgaagaggtggccccggccggacacagtggctcactcctgtaatcccagcacattgggagggccaagcgggcaggtcacttaagcccaggagtttgagaccatggagaaaccccatctctaccaaaaatacaaaaattagctgggcatggtggtgcacacctgtagccccagatacttgggaagctatggcacaaggatcgcttgaacccgggaggcagaggttgccatgagccaagatcacgccactgcactccagcctgggtgacagagtgagaccctgtctccaaaaaaaaagagagatgatcccaaagatgggcctctaaagaacatctactccacttagggatctgatggggacaggaggtgagagaataattttatactaaaatcagggaaaacataatatggggaaattggaccagatgatttctgggttccttccagcactaatattctatggttctattaaacagacatggaaaatatgttgctagatcctcagattatttgctatttgcaaattttagacaaatgttttagtaaaattcaggagcaccatggtgtatcagggaatgccaagttatttaaactgcataaatatccatttctttctttgtaaaatgggggtaatatttacttttttggggttgttttgatacaacatgatgtactagaaggaaaattccaagttctttgacatgtctgaacctcagtatcctccacgataaaaaccataacatttacctttcaggatttgttctgaggatttgaaatggtatgtctatagtattttgcacactgtgggctttcagtaactgggaatttttactttttactcttttattttaaaattaatttaagtcacagaaaagtatctgacttcagacacacagttcctctatattcctgtagtaggcaaaattctgcgatggctcccgtgagtcctggcccctggtacccgttgtttaaatcccctccctttgagtatgggcagaacctgtacttgctgttaatcaagaaaactttgcagatgtagttaagatccttcatcagttgactttgagttaataaaaagggaatccctgacttaggtaagcctttttttttttttttttttttgagacagagtcttactctgttgcccaggctggagtacagtggtgcaatccagggtcactgcaacctatacctcctgggttcaagtgattctcctgcctcaacctcctgagtagctaggattacaggcacctgccaccatgcccgggtaatttttatatttttagtagagctggggtttcaccatgttggccaggctggtctcgaacctcaggtgatctgcctgccacgatctccccaaagtgctgggattacaggcatgagccactgcactcggcctagtgagctttttaaaagagggtcaatgccttccctgaattagataaagtggaagcaacagagatgctcttctgctggccattagaagcaaatatccatgctgtgacatgcctgtggagaagggcagcctctgagggcctcaattctacacctgcaagaaactgaattctgccaacaacgtggatgagtttggaagaccccaggcttcatatgaaaatgcagcccagttgacactttgattttacccttgtgagattctaatcaaatactcccactatgccatgcccagacctacagaaactatgagaggctaaaggagtattgtcctaagccacttaatttggggtaattttttacacataaatagaaaactaaaacagttttttgcctccttcattcagaacatggtttttgtttatcttctctctccctgctgtctctatacttgtctaagacctcattactggttgcagcagcctccccactggtttctggtttcctgtattctctttcttctatgcatcctgcacatttcttcagaataaagatacaaaggtcataataacctgcccaaaatattgctcttgacttgctcaagaacctataccaactctcccaggccagttccatcaactctgatttttagctagtttcacagttctcgatgacccaggcctccttaaagagcctgactggctctcttagtccgtctgatgaccaaacctgtgaccgaggacacattagtgaagttaactagtcaggaaaatcactccagagactgcctcctgcaaagcaagtgttcataatcttgagggatttttaaaaaataggttaggaatagtggagactcaatcccaaacctatatgttacctcatccaccctagggacttctggagtttttgttgttgctgttgctgctactgttattaagttgattgctatttgcattgatgaagtttttttaaccattttttagaattaactacaatgtattgagagcctactcagtgccaggcagtagaacaggtatttttaaatacattattttcaacaaaaaaaaatcttataggcttttttttaatggccaataatcccactgttcacataacctctgctgacattgtttttaagtgaacattgatcataaatttaaacagtactgaaagatataaaggaaaaagcaaaatcttttggcccaaggaaattcttctccttaagagtagccactattggccgggtgcgttggctcacgcctgtaatcccagcactttgggaggccaaggcaggtggatcacgaggtcaggagttcaagatcagcctggccaacatggtgaaaccccgtctctgctaaaaactacaaaaattagcggggcatggtggcacgagcctatggttccggttacttgggaggctgaggcagaagaatcacttgaacccgggaggtggaggttgcagtgagccacgatcgtgtcactgcactccagcctgggcaacagggcaagactccatctcaaaaaaaaaaaaaaaaagagtagccactattggtcaggcacagtggctcatgcctgtaatcccagcactttgggaggccgagacaggtggattacctgaggtcaggagtttgagaccagcctagccaacatggtgaaaccctgtctctactaaaaatacaaaaaattggccaggcgtggaggcacgcaccagtaatcccagttacacgggaagctgaggcaggagaatcacttgaacctgggaggtggaggttgcagtgagccaagatcgtgccatggcactccagcctgggcaacaagaatgagactccatctcaaaaaaaaaaaaaaaaaaaaaagggtagccactattattagttttgttatgtgaaatccccggaaagtgttttatttcatatcggtgcatacatatcaatacacacatatccttttttatttccaccaaaagggaccctaacattttattgccacatactagtagatatacaagtagtttccagatatttactattaaaaataataatttttcccagcgatttgaaaagaagtgagaggatcacttgaggccaggagttcaagaccagccttggtaccataccatctctacaaaaaacttaaaaattaactcaacgtggtgatgcctacctgtagttctagctactgggaaggctcaggtgggaggatcagttgagcctaggagtttgaggttccagtgagctatgatctggccactgtactccagcctaggtgacagaacaagaccctatctctaaaaaaaataataatattcctctttactgaagtattccagctaatatatgaaagaagagtgacagaatatcattattttgcaattgataatgaattaattgatctaagcattgagaatcaatcactgctgttaccacaaaaaaagaagcagctagacattacatgtctcctgatagaaaagaaatagtaccacctatgaagtagtcatgtcatggggtgaaaaactaaacctaaatctaatcaagcctctaagtaccaatttacagaaaatagagcacagaggctcatgataaactacatcctgaagacaactctctaaagagcacatattcggttcccctgatccacccatcattctactggaagcagagttgtaaagaaaggcaaactataatgagaaggccacctgcagcacacagaggcaggtgaccatggtagttggtgtcaatctggttggcctgacaaagccatttccactttaagggaagccctgttgcagggaacaaacacacacttttgagggtcagggtccatctgctccagaaagtgcttgatgggcataaaccatgtggtctctgagactttaactcttctgtttttagtgccacacagctcctttctgttcccatagtcaggtcagcctaggagctcattggtttctttaaaggcagtttatacattctggcctaatcctgcaagatctggctctgtctacctgtgtaacctcttgatgctgcactgtcctccttgccctctaaccaccacctgtactagacttcctgcagttcttcctatctacctgaccatgatcttttccactctttccaggcctttgcccatgccatccactgcctggtacacccttcctatccttgtcaagtgtcatcctaaaggttctttcctcagggaggccttccctacacccaccaatgtgaagttacgactccctccattatactctctatatctatacttctacagtcgtaatacttgtcacactttctcatagtcactggattaatatgtcttctcttctagtcactagaggtccaggaaggcagaagccacgcctgttcaattttctgtcctcactacctagcagattgcctgccatcttcacagataataaactcttgaatgaaagaacaaatgatatcacacctaacaatgcttaggagtcagagagaagaaaattggtcccagaatgccgttcttatagaatttaataatgtgcatagatacttaatatttataaaaattagtagatacagattttcaatcacacatattaaatggaattattaaacctagtcccctcggttacagggacagtctctcacttaagggtcaatttctgaaacccaaacagagctgccctttaggcctactccagaattattgataagccatattacagagctatgacagtgtccttttggtccttcatttttttttcctttttttttttttttttttgagatagagtcttcctctgttgcccaggctggagtgcagtggcggcagcctccacctacccgggttatagggattctcctgcctcagcctnnnnnnnnnnnnnnnnnnnnnnnnnnnnnnnnnnnnnnnnnnnnnnnnnnnnnnnnnnnnnnnnnnnnnnnnnnnnnnnnnnnnnnnnnnnnnnnnnnnnnnnnnnnnnnnnnnnnnnnnnnnnnnnnnnnnnnnnnnnnnnnnnnnnnnnnnnnnngaggcgggtggatcacgaggtcaggagatcaagaccatcctgctaagtaagtgtaaggtaaactcttagcttactgctaagtaagtttaaggtaaacagttaagtgcttagtaaggggaagcaatcattattttaacaattattgttattaaccccaacataagcaaatgtttaaagatgtctgagcaggagaaacgatcaaagaggttcttgaggattaatctcaccaattacttcccctccagagttaaaatatcaaaatctatcacctcttcccccccttcctcactctataacatccttcccagtgaacatcatccccaggtggagcccaaaaccagcaactaaggctctctcatgttagtgaaaggattccagctggtgagccccaccactgtggggacaaactcaattgagttgagctatggcctctgggatgaaggatcacagccacctaatcccaccctcaatgtactcagccaccaccacccaggatttatatccagggtgcactctgaagagaataaagccagtggtatttcttttcaattctaaagcatagatatttccccctaaaacacaggaagggtccaggttttcagaatgaccctgtttctcaagtcccttaactgctaacctaggagcttattctctggagagtttctgaagaaaggcttctctttgcctcagtttccttatctgtaaaatgggtgataataacggtactacttcctgaggtcccagtgagaattagatgagtcaatacatataaagggcctaggacactacctggcacgtagtaagtgctccgtaggtgttagcttaactttattatgaactttatttcttccatcttatttgtactgctgtctatttgtgatcatatatttttcaattactaagcattaacagtggccttgtaacagactatttcagccccagtgcacctttggggcagcagtttggctggtggcttataaatagtcatcccccagatcagaggcacccacgcttttctacagacacagtggaagttgtatctgttaatttcattcattgagaaaatacactgtagataaaagaatccagcaaagcctttaaattaattggtaactttattaataacaatagcatctatacacatttgaaaacacacatgtaggagacagttaagatctattcagtctgtgataatgtctagagctcatttggattcatcaaacccctgccatcagctccaaaagcccttagccaaaaacagctgaatcactcatcaaaccatcagtgtcttcctcggcagaatcaagggttggacagaaagagtaaatattctgcacctccacaaaataaaactaaaatgcaattgtcctgcatctgagaatacaagggtggacagtatgagctgcatgactgtgaaccaatgaggcttctcttggcctcatttgtaaaaaggagattaactctgtagtcccgcctatattgcatggcctccagaaaagcaaatgaggtggtaagtgtaaattaaaagctcctctcctttaagaggggaacaccatgaggggagagtaagaaaaggagaaggaaaaggctctttccagtgaccaacacgctgaatttgatgaaaatccataagaggttatgctaaactgagaagcataagggtggatctaccattgccacctcctctttgtagcaaaaaaaatcttaacacggccccctcccagctgttgcactgaggtgactaaggatacattttgaggaagtagctccaagaacatttccattttcactgtgccttcacatacatctaatggaaatgaacagcacccttcatccatccacggaagcgattaagaaaagggtgggatggaaaaattaacccaacaatattagatcaatacgtagtatttaagtgtccataatgtgccaggctgaagatgcacgggaaaaccacactagccggtctgtcaagggcttgagaataccataaacaagaaaacagacgaaccaatttcagacagctgctagaaggaagataaaatgagacaggcaagtatgagaggcgcgaattcctgagtggatgacgtaggtctctgagaggtgacttttgagcccgtatctacatggtaagtgcctcgcagtgacctggggccgtagcgttaccatttaaagcacagaccattaaatgcagaaattatcaacaaaatgagaaataggaatttcaaagtctcaaagtgaacgacggaaactgaaatctacaaattagaaaaaggcgcagaattttgaatattcttgtcgcccaatcaggacaaggctgggacccggctgcgcggccttcgtccaaaatacacagaacggctggtatccacaggaggccccatcgcacggcagaactggtgaccggacacaaaagctgctgccaagcgtcagtcatacagagctgtcacgcagtgtttgcggaacccgggctgaattgtgtcctggagttctcttaaatgacagccgaactcagccacttcgttttagaatgaaacagacccaaggagccaccagggcgcgtgtggggcgggagtgggggcgggtaaagaggcggattcccaacagcctaattgagaaccgactcctgggaaggctaagcagcacaatgagtaaagacacgctctagattcaaaagcaaatccaatgacgcactggggacctcgagttccaaatagttaaaaagctacgtatgccatttcccatgaccttcacactaaaataacttactttatgaaaagaaactaagggaataagtgaacaagctcttttctagtgattaggtgggtggctctgaaaagagcctttggagtcaagcagccggcgactcgagcgagcgagcgccaggtcccggcagggactcacttggagctggtgtacttggtgaccgccttggtgccctcggacacggcgtgcttggccagctcgccgggcagcagcaggcgcacggccgtctggatctcgcgggatgtgatggtggagcgcttgttgtagtgcgccaggcgggaagcctctcccgcgatgcgctcgaagatgtcgttgacgaaggagttcatgatgcccatggccttggacgagatgccggtgtcggggtggacctgcttcagcaccttgtacacgtagatggagtagctctctttgcggctgcgcttgcgcttcttgccgtctttcttctgggctttggtgacggctttcttggagccctttttaggggccggagcggattttgccggttcaggcatggtaagacacagtacaaacgcggcttagccaagaaaagaagtaagagaatgggcgggcctgattcttttataaccaccttatgcaaattagggctccgaaagtcgttcatttccattggtccgtgtgcggaccttgcgttttcagcaatgcgtacgtaacaacaccgactcttgacttgattggccggttctgaagccatattaggaccaatgaaaaactcgttcttgaccccacccctaggaaagcttataaaggctttcctcttggttctctttcaatcttattttgttgcgaggttctgagcgttgtctgtgtttaaccttgatttcagtcatgtctggtcgtggcaaacaaggaggcaaggcccgcgccaaggccaagtcgcgctcgtcccgcgctggcctccagttcccggtagggcgagtgcaccgcttgctgcgcaaaggcaactacgcggagcgggtgggggccggcgcgcccgtctacatggcggcggtcctcgagtacctgaccgccgagatcctggagctggcgggcaacgcggctcgggacaacaagaagacgcgcatcatccctcgtcacctccagctggccatccgcaacgacgaggaactgaacaagctgctgggcaaagtcaccatcgcccagggcggcgttttgcctaacatccaggccgttctgttaccaaagaaaaccgaaagccacaaagccaaaagcaaataaatgcagacaaacaaaccaagaccaaaggctctttttagagccacccaagttttcaaaaaaagagctaatgcgctatttcgtgatcagcccttcatttgacactttggtggctcttaaaagagcctttggggtgaatgagtatggtgtcaagcctcttaattacttgttcttgccaggcttgtgactctccgttttcttgggcaacaggacagcctggatattgggcaagacgccgccctgggcaatggtgacacccccgagtaacttgttgagctcttcgtcattcctcacggctagttgcagatggcgagggatgatgcgcgtcttcttgttgtcccgagccgcgttgcccgccagctccagaatttccgcggtcaggtactcgaggaccgccgccaggtacaccggggcgcctgccccgacccgctccgcgtagttgcctttgcgcagcaagcggtgcactcgccccaccgggaactggagaccagcgcgggacgagcgcgacttggccttagcgcgggccttgcctccctgctttccgcgtcctgacattacggctaaaattgcagttacagcttcttttacaaggagaagaatgtggaaagaataaccaatttgatgtaatttataagagctaccgggaggggtgaagggaagtcgtttgattggctaaaagcggagccgtatctaacagccaatagaaaagcagaaagccgcctcttggtttgcgtcctgcactgaaaggaaatgacggattttgtaagtatctaccaatcgctgagagccacattaaagccccttatttgcatgccaggatctttaaagagagcaggctttcaaacaaaatactggttttgttttactgagaggcactgtgggtttttgttttgttttgctttgctttgtttagtttacagccgggaaatcccaatatggaccctaaggaactgcagaagacatccttagacggagagttactctcacgaaagagtaggggattctgaagccgatgatccccttgagctctaaactgccaagtcccgccctttctgtctcgtcacagccaaattccctttaaaaatacatgtactactaaggctgcctcctttctcgcccctaaacttaagtcgcccgcagcggcgtgtctccgccccacccccacccgcctgcactcctcggaatccggtttgaccgaggctagaatagatttgtcatcctcctcttgacctccaggaggcggccttcaaacttgctcccttggctttcaaaatgtcgccctgtttttcttcttacctcgccgacttttcttatcctgctcccccatgccactgcccatctctaaatctgcgagtccagctggactgtttccctgtctccaattcttcacttatcccgaagagtcttacccatttatatgctttcaactaacgtccaaatttgtttcagaagctcagacccttatgcctaactgcttacagaatacttcaacctacttatcccaacgagcacctcaaactcaaactctacctcagcctatccgaacgcgaactcatacaaacaacctcccctctttgccctcttttcctgaaatgcaccagcatacttacagatacctaagccgaaatctactctactcttcccttcgtcttagcatatccagtcagttgcttccttaacatcccttcagactttttctccatgctcccttgtccacctcatcatcatcccttagatttcagcaacagccgggaaagggtaattttgccgtcaggcactaatcgctggcatgactccagcggtcttagaaatctttcctgaaagctctcctttttttcttttatcccatataacagatgaacctgaaagctcttgtgtttcttcctcctcaacgtcccatctctgggagttctacatctcctacaccattctcaccctttccttagtatcccttaaggtcaggtagaatgctagagagaaaaaatagacttgtgggttttttgttcgttttttgaggcggaatttcctctgtcacccaggctggagcactatctcagctcactgcaacctccaccaccgcctcctccaccccgcccccacccacccgggttcaagcgatcctcccacctcagcctcccgagtagctgggatgacaggcgcccaccaccccgcctggctaatttttgtatttttagtagagatggggtttcatctctactaatgttgaccagggtgatctcgaactcctgacctcaaatctcgaatgttggccaaggtggtctcgaattcctgacctcaaatgatctgcccacctcgacctcccaaagtgctgggattacaggcgtgagccactgcacccggccagaaaatacttaaatcattctttgacacttttcctgatgttttctcctttattctcaccagtttattcaactggcatttattggatgtgtgctattgggccatgggtgtatagataattgaaagtagtacaaacaagtctgtgatgaaatgcctccagaaaatggaggaaatctggtgaactctgagagttaaattagttaaaatcagctacgtatagagattactcctgataagaatgctggtatagatttgggaaacaccaaagttcagacagaggtgatgagggtgtaacctaagatccttctaatccaattgattatatcatttgagaagatgaatgttaacagaaaggtgcggtccacatagagtccaaacaggtggcaattatagtaggaatatgttatgttttcaccaacactaaaatatatctggcagatgtaaagtttggcctagaaaagggtccttggttatgaaagcatcaaccctttctcacagcctgggtgaaatatttctgaagactatccaagttctttcattcagattctgtgctcaattaacaactttctgattattctattccaagataaaaacataagactgaagtggggggagccagttatagaaagatgttcatcatataattcaatgaatttgcattttggactattcataaattttgtgtgtactttgttagcgtgggcccctccccaagaagccagtcagtcctggaagttctcatagtgtcaacttttcagacctaaagggctgagaacaaaacccagatgataggggaccccaccacaatcctggcaccccataaggccctgcttgaggggcaagatgaccttcctttctttcgctgaccttatttttttttttttttttttcccagacagagtactcactctgtcagccaggctggagtgnnnnnnnnnnnnnnnnnnnnnnnnnnnnnnnnnnnnnnnnnnnnnnnnnnnnnnnnnnnnnnnnnnnnnnnnnnnnnnnnnnnnnnnnnnnnnnnnnnnnnnnnnnnnnnnnnnnnnnnnnnnnnnnnnnnnnnnnnnnnnnnnnnnnnnnnnnnnnnnnnnnnnnnnnnnnnnnnnnnnnnnnnnnnnnnnnnnnnnnnnnnnnnnnnnnnnnnnnnnnnnnnnnnnnnnnnnnnnnnnnnnnnnnnnnnnnnnnnnnnnnnnnnnnnnnnnnnnnnnnnnnnnnnnnnnnnnnnnnnnnnnnnnnnnnnnnnnnnnnnnnnnnnnnnnnnnnnnnnnnnnnnnnnnnnnnnnnnnnnnnnnnnnnnnnnnnnnnnnnnnnnnnnnnnnnnnnnnnnnnnnnnnnnnnnnnnnnnnnnnnnnnnnnnnnnnnnnnnnnnnnnnnnnnnnnnnnnnnnnnnnnnnnnnnnnnnnnnnnnnnnnnnnnnnnnnnnnnnnnnnnnnnnnnnnnnnnnnnnnnnnnnnnnnnnnnnnnnnnnnnnnnnnnnnnnnnnnnnnnnnnnnnnnnnnnnnnnnnnnnnnnnnnnnnnnnnnnnnnnnnnnnnnnnnnnnnnnnnnnnnnnnnnnnnnnnnnnnnnnnnnnnnnnnnnnnnnnnnnnnnnnnnnnnnnnnnnnnnnnnnnnnnnnnnnnnnnnnnnnnnnnnnnnnnnnnnnnnnnnnnnnnnnnnnnnnnnnnnnnnnnnnnnnnnnnnnnnnnnnnnnnnnnnnnnnnnnnnnnnnnnnnnnnnnnnnnnnnnnnnnnnnnnnnnnnnnnnnnnnnnnnnnnnnnnnnnnnnnnnnnnnnnnnnnnnnnnnnnnnnnnnnnnnnnnnnnnnnnnnnnnnnnnnnnnnnnnnnnnnnnnnnnnnnnnnnnnnnnnnnnnnnnnnnnnnnnnnnnnnnnnnnnnnnnnnnnnnnnnnnnnnnnnnnnnnnnnnnnnnnnnnnnnnnnnnnnnnnnnnnnnnnnnnnnnnnnnnnnnnnnnnnnnnnnnnnnnnnnnnnnnnnnnnnnnnnnnnnnnnnnnnnnnnnnnnnnnnnnnnnnnnnnnnnnnnnnnnnnnnnnnnnnnnnnnnnnnnnnnnnnnnnnnnnnnnnnnnnnnnnnnnnnnnnnnnnnnnnnnnnnnnnnnnnnnnnnnnnnnnnnnnnnnnnnnnnnnnnnnnnnnnnnnnnnnnnnnnnnnnnnnnnnnnnnnnnnnnnnnnnnnnnnnnnnnnnnnnnnnnnnnnnnnnnnnnnnnnnnnnnnnnnnnnnnnnnnnnnnnnnnnnnnnnnnnnnnnnnnnnnnnnnnnnnnnnnnnnnnnnnnnnnnnnnnnnnnnnnnnnnnnnnnnnnnnnnnnnnnnnnnnnnnnnnnnnnnnnnnnnnnnnnnnnnnnnnnnnnnnnnnnnnnnnnnnnnnnnnnnnnnnnnnnnnnnnnnnnnnnnnnnnnnnnnnnnnnnnnnnnnnnnnnnnnnnnnnnnnnnnnnnnnnnnnnnnnnnnnnnnnnnnnnnnnnnnnnnnnnnnnnnnnnnnnnnnnnnnnnnnnnnnnnnnnnnnnnnnnnnnnnnnnnnnnnnnnnnnnnnnnnnnnnnnnnnnnnnnnnnnnnnnnnnnnnnnnnnnnnnnnnnnnnnnnnnnnnnnnnnnnnnnnnnnnnnnnnnnnnnnnnnnnnnnnnnnnnnnnnnnnnnnnnnnnnnnnnnnnnnnnnnnnnnnnnnnnnnnnnnnnnnnnnnnnnnnnnnnnnnnnnnnnnnnnnnnnnnnnnnnnnnnnnnnnnnnnnnnnnnnnnnnnnnnnnnnnnnnnnnnnnnnnnnnnnnnnnnnnnnnnnnnnnnnnnnnnnnnnnnnnnnnnnnnnnnnnnnnnnnnnnnnnnnnnnnnnnnnnnnnnnnnnnnnnnnnnnnnnnnnnnnnnnnnnnnnnnnnnnnnnnnnnnnnnnnnnnnnnnnnnnnnnnnnnnnnnnnnnnnnnnnnnnnnnnnnnnnnnnnnnnnnnnncacgggtggctcacacctgtaatcccagcactttgggaggccaaggcaggcggatcacctgaggtcgggagttcgagcccagcctggccaacatggtgaaaccccatctctactaaaaatacaaaaaattagcccagcgtggtggcatgcacctgtgtagtcccagctactcaggaggctgaggcaggagaatcgcttgaacccaggaggtggaggttgcagtgagccatgatcggaccactgcactccagcctgggcaacagagcgagactctgtctcaaaaacaaacaaacaaaaagtaatctatggtgataaaggttagaataatgagactaatgattaactgtggcagggtaatactgacttccctggaagtcttctgaggtgctgggaattttctttatcttgatataggcatattcatatgtaaaattcagctctacatttaagatttataggggtttttttgtttgtttgtttttgagacagtctccctctgtcacccaggctggagtgcagtggcgtgatcccagctcactgcaactctgcctctcgggttcaagccaattctcatgcctcagcctcccaaatagttgggattacaggtgcctgccaccacgcccagctaatttttgtatttttagtagagagggggtttcaccatgttggccaggctggtctcgaactcctgatctcaagtgatccaccttccttggcctcccaaagtgctgggattacaagcgtgagtcaccacgcccggcctagatttataaatctcttacatgtacatcatacctcagtaagcacaatttttaaatataaacaaaattgaaggagtcatcatggggaaaacaatgagtactttgttgggcatcccaatcctcatgttacaaatgagtgtttattattgtttggttgttttgtttaattgtgtatgaggtggctaacataatctctcggtgcttaaagcctctaaaagccttaatctgaccacgacagaccttcattaaatagtagatattattatgactatatttttattagaaacaaagacaataagcttgccctgtggagctcgcaacttgcaaagctttcgtttatttttacgacagcaataatagtgaagttgccgtctccattcatacatcaattcactcatccatccaatatatcttattgaacacctaagtatgtcaacactgagcttggcatcacacatctagaatatagtgaatataccattcattgtgcctggatctctctttccacgtggttagttccctctagtcattcaaatttctgtttcaatgttaccttcacacctaggctttccctgacctcagcctcctacctctgcctaacactgtcactggatttgcaaactgcaaggtcctaaccaaagcaggtcctatagatgccatctttgtagcagctttctaatcaatgtacttctctctagcccatctcgtgccttcactcaggttatctttcacccagactaccaacaaagacttttctactcctctccctgcttctactcttcccactcctcaccagagtggcctttctaatagacattctgattcttttctcactgtacactctctccccaggtgatcacataccacaccccagccccacccccatgatctcatttcatcttcaacaacccctaactaagagatgtctcaaatatacttctcacatgctaaaattagtgggaaaaaacttaatgagaattaggaaagtagatacacttagagtatcttccacaattacagacagaaaaggaattttatagtggaaaagcctgacagataccatcttaatcaagtgatcagaactatcactagtaataacaaaaagatcacgtgccctggtaaggttcacagagaagaattcaacattacttctgcagtattccagccaaaaatgcatgtgctaaattttaatcataaagaaacatcagacaaacccagattgagggacattctacaaaataaatgtctgtaacttcaaaattaccaaagtcatgaaagacaaagaaaatctaggaaactatttcaagttaatggagaacaaagaaatataacaactgaatgcaacacgtcatcctagattggatcctggaccagaagatatttcttttcattttatatatatgatagtagtggaacaattggcaaattttgaataaggtctgtagattagataatagtaccgtatctgtgttcatttctagagtctgacagttatattccggctatgtgagaaaatttttttttttaagtaaatatacatcagtcaggattctccagggaaacagaacgaatggtagatattttgatagatagttttattataaaaaattggctttttgattatggaagctaataaatcccaagatccccaagatcttcagggtaagttggcaagctggagacccaggagaactgatgatatagttccagtccaagttcaaaggcctgagaaccaatggtgtagttccagtccaaaggccgagtctaagacccagatggagccagtgtttacttctgagtctgaaggctgagaaaagccaatgtccgggtctcaaagcagtcaggcagaaggaagtctctcttactccggagtgggtcagtcttttgttctagtcaagctttcaactggttggatgggacccacctatattagggagggcaatttactcagtctccaattcaaatgttaatctcattcaaaatactctcacagaagcacccatatttggccaaatatctgagcaccaatcctctagaagttgggacattaaccatcacaggccgtgcgtggtggctcacgcctctaatcccagcactttgggaggctgaggtgggtggatcacctgaggtcaggagtttgagaccagcctggccaacatggtgaaacccccctctccactaaaaatacaaaaattagccaggcgccattgtccacgcctgtaatcccagctactcaggaggcggaggcacaagaatcacttgaacccaggagacagaggttgcagtaagccaagattgcatcactgcactccagcctgggcgacagagtgagactccatctcaaaaaaaaaaaaaaagttaaccatcacaggtagagtttaataggctttatctctgaaacttagtctcaaacagtccagaaaataattatatatttgtagataggtacatacaaataaaacaaacagtgaattgttaatatttgggtaatctaggtatcaggataaaggatatacaggaattatttgaactgttttttttaactttagatgcacaaaccttgtaattatccttgacactttccctcccacaaccaagccattaccacaccctgtaggttttactttcctaatatacatcctgtagccacaatttctctccatttccaccaccaccaccaccaccttggtccaaatcatcatcatctctcacctagactgctacagtaacctcccaacttgtctccctgtttccactcttgcctcctctacaatccattctccaccctgaagccagtgatctttgcagaatacaaacttaaagtcagctaaatgcaatgcatgatccttgattggtttctgaaaattaaacatttataatgtttacttagactgtgctgctattacaaaataccactgactgggtaatttataaacagaaatgtattttctcacagttctggaggctgggaagtccaagattacggcactggcaggtttggtatctagtgaaggccagttcctcatagatacgccatcgaggtgaccttacatggcagaagggacagaaggggccaacttaccccctcaagctctttcaaaaggcgttagtccattcttgagggtggagccctcatagccttattacctcctaaaggccccaccacttaataccaacaccatggattaattttcaacatgaattctggaggagacatattcaaactatagtagacaccaatgagacagttggggaaatctgaatatcaactgtatgtgattatagtattgtatgaatgttaaatgtcttggatgtggtaatggtattgtggatatgtatgaaaatgtccttgttcttaggagatacacattgaaagtacatagcaattaagtgtaaagaattttgtggggccaggcgcagtggctcacgcctataatcccagcattttgggaggccgaggcggactgatgacctgagtcaagaccagcctgaccaacatggagaaaccccgtctccactaaaaacacaaaattagccagagtggtggcgcacgcctgtaatcccagctacatgggaggctgaggcaagcaaatcgcttgaacccaggaggcggaggttgctgtgagccaagatcgcaccattgcactccagcctaggcaacaagagcgaaactccatctcaaaaaaaaaaaaaagaattttgtggctgggtgcagtggctcacgcctgtaatcccatcactttgggaggctgaggcaggcagatcacttgaggtcaggagttccagagcaggaggatcacttgaggtcaggagttccagaccagcctggccaacatggtgaaaccccatctctactagaaatgcaaaaaaatttagccaggtatggtggcaccagcctgtagtcccagctactcaggaggctgaggcaggagaatcacttgaacccagaaggtggaggttgcagtgggccaagatggcgccactgcactccagtctgggcaacagagtgagactctgtttaaaaaaaaaaaaaaaaagaattttgggccaggcgcagtggctcacgcctgtaatccctgtaatcctgggtggccgaggagggtggatcacctgaggttgggagttccagaccagcctgatcaacatggagaaaccccgtctctactaaaaatacaaaattagccgggcatgttggcacatgcctgtaatcccagctaatcaggaggctgaggcaggagacttgcttgaacccaggaggcagaggttgcagtgagccaagatcacgccattgcactccagcctgggcaagaagagcaaaactccatctcaaaaaaaaataaataaataagatttctgcacctaactcaagtgattcagcagaaataattattattatttcattattattatacacacatacattaaaagagatacaaagccaagtctggcaaaatcttatcagtgaacctaggtgaagagtggataaatgggttgctcattgtattaatcttgcaaattttctggaagttttaattttttttaaaggctagggaaaacagtgtatgtcatagtttaaatttcttgagtgtgataaggttattgtggttatgtatgagaatatctttgttcttaggagatacatattggagtagttaggggtgaaatgtcatgctatctgcaacttactttcaaatggttcatccaaaaaagcatataaatatattttaaagtatatgtaaagtacttaaatatatgagtatatatgtacaagtataaaataaatataaatgcaaaaaatggtgggtcaagtgaaaggtagagggtgttgctttgaactattcaacttttctgtggctttgacatttttcaaaatgagaagttggggaaaaacatttagaaatatgtaaatatattaaggatacaaaataaaatttaaataattttacaagttaagaatcatcctggaaaaattacatcctgttacatccctgcttaaaacctcagtagcttcccactacttctaggataaagacaaaattgcctaacaagggctacaaggcctggggtggtctggcccgttcctctcctcctggtaccctactcatcaccatcagctgccccctaggctccaaccacacataaccacaccctaactacaccagaaggaaagactccctcaaaattctctctcctcctgtcctttacacatgcagctaccaaagccaaaacctcactatgagggactgagaaatggattctcatgttgtttctgctgaactgtttccctaaatctcggaaatattctctgcccgcctcccattccacctctccaaccccggccaagtctgggtaacttgcctccttagcatcctgtgtttatctcatcgtagcacctagtacccagtattgcaattgtccgctcacttgttagtcttcagtgctctgttgtctccttgaaaacagggcctgacttgactccccagtccccagcactagtctggggcacagtaattatgtattcaatcagacttccattttcttgcatataaaataaaggagttgggctggatgatctacaagatctattggcagtaaaatagatctaataatcccaatcccaactgcgcgtgaattccctttttctttgcattgctgggttcagactttctgaccaccttaccagtggggagaatccgagactacagttcccatgagccctcagggcaccacgtggtgcctgcccgtgctaccaacgcgcagcgaggactccatttcccagcgtgcctcaggaagggcgccaggactgcattttgctccggagcgtccagagtcctggccctgagcgggaatcgcagtggccgaggctgagcggcaggtagaaggggcgtctccggggcttcacagggaacacaggggcttcggcccaaccacaagtacgcagttgcacatgccctacttttgcccattctttgcaaatcccctaaggaacgaacgcgcctcgcgtgcgggcctttctaatcttcgcttgtcccttcacttccacagctggaggtcgaattcaccacgtcacgtaaagaaaaggggcggtgtctcgggtctccccgtgtggcatcaaggcgggctccctataggagctggtgtggacgtccgggcgtggggttagggcggatgcggggatcgcggggcgggtgttgacattgtgctctcaccaggcggatcgccccgaccctcactcctggcgtctgagtctctggcgtagcccatgctgagtgggcggctggtcctgggtctggtctccatggctggccgcgtttgtttgtgccagggcagcgcgggatccggggccatcggtccggtggaggccgccattcgcacgaagttggaggaggccctgagccccgaggtgctagagcttcgcaacgagagcggtggccacgcggtcccgcctggcagtgagactcacttccgcgtggctgtggtgagctctcgtttcgagggactgagccccctacaacgacaccggctggtccacgcagcgctggccgaggagctgggaggtccggtccatgcgctggccatccaggcacggacccccgcccagtggagagagaactctcagctggacactagccccccatgcctgggtgggaacaagaaaactctaggaaccccctgaaccccaagagagggaggaccaggatccgaatgggctgggtgagcacgaattaccgaggccttccctttgatacagtccaggatttgtaagggatgaagacccctgggccccattctgttggggtccatacatactctccgaagatagcaacttgcttcaggtcaaagtgaacccgagaaaagagaagaatcactcactactgctcttgccctggactattcaggaagggcagcccggatgttccatgttaaatcgtgacagaattgcaccagacctgatgagttggaaacaatcctatacattaaaagaaattacactatgaggctgtgttcttaatggactgctgaatcagtgccacaggtgttcttgggagaagaaagatacttgtagactagtcgggaagggctttatgagggaagtgatctagttggatctttaaaggaaagcacaaaattaaccagaaaggagaggataggtgctgcaggcagggagaagaacctgagcaaagacatagacgctggactgagaagtgagttaatggacaagacaggggatataggcagggacacatttgaatttcatcttgagggggggaatgtttggcttttttacagcctgttcatttccaaaaagtagtatttgtatttgtttaaaagaaaaatgtttttaaaaaccactaaagcagtgaaaagaggataagaactaagaaaatgattacagatgatgaagaaacctttatatagccttttttttcttttcttttcttttcttttttttttttgagatggagtttcgctcttgttgcccaggctgcagtgcaatggcacgatctcggctcactgccatctccgcctcctgggttcaagcgattcttctgcctcagcctccccagtagctgggattacaggcatgcaccaccacacccagctatttttttgtatttttagtagagatggggtttcaccatgttgaccaggatggtctcaaactcctgacctcaggtgatcctcctgcctcagcctcccaaaatgctgggattacaggcgtgagccactacccgtagcgtttttgtttttgtttttgtttttgagatggagtctcactttgttgcccaagctggagtgcagtgtcgcgatctcagctcactgcagcctccctccgcctcccaggttcaagcaattctcctgcctcagcctcccaagtagctgggactagaggcttgtgccaccacacccagctaattttttgtattttatagagacagggtttcaccatgttgcccaggctggtcttagactcctgagctcaggcactccgcccacctcagcctcccaaggtgctaggattataggcgtaagccaccatgccccgcaatgtagccctttttgagcattacagatattgtcatatttctgaggggagctcgagtaatgtctatagaagcaactttccaataatctcaatgtggaaattattagagaaaaaaacttggttaacatatatcttttttttttttttttttttttttttgtgagacggagttttgctcttgttgaccagactggagtgcaatggcccaatctcagctcactacaaccttcgcctcccaggttcaagcgattctcctgtctcagcctcccgagtagctgggattacaggtgcctgccaccatgcccggctaatttttgtatttttagtggagacgaggtttcatcatattggtcaggctggtctcaaactcctgacctcaagcaatctgcctgcatcgacctcccaaattgctgggattacatgcgtgagccaccacgcccggcccggttaacatatatcttgaccatttctagctaaagaatttaaggtgcatgtggttgggcagtagggagtcattgacaaattttgagtacagacatgccagagagcatctgggggcagatggatctggcagtgatgtgtaagtgagttggcatgggagactggaggaacagagatcaatccagagtgagggtagaaccctgacttacaagtcatctgtgggaatggaaaggaaggagtttatttgagagctaccataaaatcagaaaatggtttgattggaacagaaatggactagagtgagaggggagtcaatggtaaccccaaggcagtggttttcagattttctcaggtaagaactcccatgagattgtttaaaatgaagcttctggctgggtgtggtggctcacacctgtaatcccagcagtttgggaggccgtggcgggcggatcgcctgaggtcaggagttcgagaccagcttgggcagcatggtgaaaccccatctctactaaaaatacaaaaattagttgggtgtggtggcaggcacctgtaatcccagcctcttaggaagctgaggcaggagaatcgcttgaacccgggaggcggaggttgcagtgagccaagatcacgccactgcactccagcctgggcaacaaagcgagactctgtctcaaaaaaaaaaaaaaacgtagattcaaggtccctatccttccaaaccaagaaaaaaaaaaagggttctgattcaacaagtcaagagtggagtctggggtctatatttttaaaaagcataccagaagatttagaggaaagttggttctattcttatgaaacattactcccaaagttttcaaatctgggagacttagagggccctccatctgtaggggaaagatcaaggtagagaggccaatttaggaagtaaatctggtacaccatgttattctgaccttcagtccatctcaccattttaccctccaaggctgttaggagaattggatgtaggtggagagtcacagaagcaggtatagccattttgtattttgaggatttgtttccgttttatttttcgtcaatatttttcactgcatttttcacatcaacagagttgggtttagggttccccaggagagcaagggagatggatgggtccctcccaggggtgcgaggaagagggctacgtccagcatgtggggagtgagggacaagggcacagggcacacactcatacactgggcactggagaaggcagtcttttgagcacagacaccaaagagttaaacagtcaccacctggtacagtgttacaaaatggggagagtgaccacagggttggggcactggacgcagcatgacgaaggtgaattttgattttcttttttgttattttcacttttttccttttaacatttttttaaacattttacaaacatctaaaaactacaacacgtcacagctacagtggggtgaggggagggcaccaaagaaagcagccacacagagtagggtgggatggggcagcctaacctacagaggctattgtgtggaagggtaaaatggggaaactgaggcttctagtccctgcattaggggtccctcactcactgcccaacctctccccactcagaggagctgccaggagggcccctgcttcctgcctctgccccagctctttgtgctttttgatctgctggtttgaccagatgcctggtttctttccctcccctgctcccctccctgtgaggggacaggtagggagcatgggagggcagctgtgctattcccgcctgtgctgtagtgggtggagcctctcactccagaggaggcctctgcttcttgaggagggaaggagatgggccttgtcggatgccctcagatctccctagactgtgggactcttatcccaggctggcctagggctcctccatcccaggctcaacacagaaaccagattaggggaggaactgtgggaggcagggttgtgtgtgcatccgctgaaattacccttggcttatatttgaggacagtatagtgataccccccgccccatggcacatgcacacacatatgtaagtatacatacacattcacacacagtcctgcggagctgcctcagaacttaatctattaataaataagaatcagaaagctaatttcataaaattcaggcttcatatttgcagcccaaattgagaggaaagtggaggccagagggctgaggtttattgcttctcccccagcatccaacaggagatgtgagagggcacccgaggcccactcttcagactctaagaagttcttttggtccatggtctacaccagagccccagcccctagcataattgcatacctgtggtttcaccagggcctaggcagagggaatgatggggaaggcaggaagcctattctggaacccctggaacagggaagcaagggcccctctctaacagggggagaaggatggggctcagccttctcttgtgcaaagtcaagggcagtgggaaatggggagtacagcttcatctcaaaactgggatgaaggagccttccctgtagtccctgcccacggggtttacacacatgcacacgcacacgcacacacagctaagacaccaaacacggggagtggggagtgagggctctggaggtcaggatggcagggcagggaggggaaggaaggagttgttggtctcacagtgtgcctgccaatcccaaagccctagagaccccttcactgcagcacctgcccccgggtctcaggcagcttcagggccagagagctgccaagggcaagggcagctgaggcaaagaggatgggtgcagccttggtgattcccacgaaggatgtgaagatgctgatccccagcacagctgccagcttacacagggcattcaggaagccaaaagctgtggtcctgctcaggagtcccccagtgcagcacggcgcaaggtacaggagggaggcaaaggaagagtggagggcagggaagtgaagtccaggaagatgcaggcagtgtccaagagggagagagaaggttggagagatcagagaggtaaaggatgtacaccaggaatgtaaataaattgagagacaaagggaaaggagaccaaaaattgaggttaacagttaagactttgaggagtagatacaaaagctaccagatttttttttcctttttttttttttttgagacggagtcttgctctgttgcccaggctggagtgcagtggtgcgatctcggctcactgaaagctccacctcccgggttcaagcaattctcctgccttagcctcctgagtagctgcgattacaggcacccagctaactttttgtatttttagtacagacagggtttcaccatgttggccaggctggtctcaaactcctgacctcaggtgatctgcctgcctcggcctcccaaagcactgggattacaggcatgagtcaccgtgcccggccaaagctaccagattttagaggagaaaatggaaatgtatatcctctcacccctaaggatgctcttcccattcagccctccttcctcaccccacccctcccctgaatccactgccctgcctccaacacattccaactacctcttgtctgaggggtagagttcaacagtcaacacgtccagcgcattccaggatgcaatgctgaccccgccaaaaaggcagagcagagcgatcatggccgactcactgttcccaaaagacaggaagaagcaggagacacaggacatcacgctggagccagctggagccaggagaggagagagcaacatgagcctggccacagtgaaacccacccacagcccaccctgtcccatcagctggctttcagatagcccaggatgagacttgttccgaaggtatccaaccaaggtatccaaaaggaaggcttttcactcctcctcaacctcccttataattgtttattaataatatcagtaaccatcatttattcaatgccagccatgggccaaggcaattgatgctttacatgcattgatctagcacatcaaccctatgacacaggtactattatcacctccattttgcagaggaaacaaccaggctcatagaggtaatttgccagaggccagaggcaggtggtggagctgagattcaaaacccataacctcaaagcctgtgccctaaccacttgcaattctgcttacctcctttacccccagagaagcttctgtgccagtccccaccccatcctgcagcaccccctaaacagaaaacatgagagaggaactctctgaccaatctcttccacagcccaaggtgagaagcctgttgactgcctcccgcagcccctggcccctactatcagatctgactcagcctctcccccttaccaagcattctgagcctgccgatcttgtccatgagcagggcagacacgatattcccaggaagcactgccagtgtccccaggaagctcacaaagtataccatgtaggcaccttcgcccgtccctgtcacgtctagcgggcagccctccttgttgtgcaggaatgtactgtttatcagacggctgttcacaaacttgtactcgaacaggtctgtgggcaaaggccaagataagcaggcagtcatagcagatgggagagggaggctgttacggcttatggctcagggctctgcatgtatgaaagttagtaggaggggctctcaaaattattcacagtgctaatcacaaaacatcaaataacatcaccatgggaactagggatctttagagcagaaaatgaccatcatctgtccaacagtgtgactttgtccaagttctcccattaatagtcttagctgcttattcattctttctgtccgtgctagctgactataagcagtagcgatgccgtggacttaggaaatttttctgagaaaaacatttaaaataataaaaagtcctatccattgttgttttcctgcaacatggaaaaagctcgcccagtatgaggtgggaaatttcagtctagctcacaaaaccagcatttcgtgtgcatatactgaagtttgagaatcactattaaaaaggagtggattcatgcaatgatccgcaccaaataccccttttattgattgtttttctttttcccaagaatgctattttggatgatttttaccttcttcaaaagtgcattaattttacctcactgagttataatttcagccaaaggcaaataaacttgatgtttttgtcagatattctattacaggaaaatgtccaacatccattagattttcagaattattggtggtagctatcaggcccctctgccaccttcccacaggggtccagggatctcagcttgagaaccctaagatagtgaatgaaaaaggttccttctcatcaaggtccacccaaccctttggtctgacacccaccagccaccccgccttaccagtgttatagaacacagtgttgatgaatgtgcagttgcggaaaaacgtgttgctggatgtgacatcctcaaaataacactcttcaaacagggaatcctcaaaggacactgacttgagccgcagcccaatgaacctgtaaggccaggatggtgaaagacactcccccgtcatcctcatgccccctccaagactcactctttagcgaagtaatgggaagctgggcattgagaagaaaccacaagtgtttgccccccaaatgtcttgtcttgaacccctagactcataaaagagacgaggtagaaggaacagggaagaagtgaagtttaaaagtccccacatacttgtcattgaagtactgcccgcctcggtggatctgattctccaacgtgaagttaaaagttacatgctctacgcgctccccggggaacactttggtgcgggatgcgtagtccactgcctggagatggcggatcatgtcaggaaaccagacggtcaggccatagtagctgaagagtcaaggacaatggaaacagacaacagggcttcagacaaggctcagagattagaatcaggcagaggagaaaacggaaatgtgtatcatctcagaacaagggagaaatggagtcaacctctgttaggaccttgctcctctccagcctcaccagcttctccctgctcctcccttcaacagttgctgcgctcctgggggacttcagggtctcgcacagcagccactatactttttcttacctcccaagcatttgcttttccctctgccaaaaacactcttctccaccccagccacccccactccacctgtctgactcccattcacctttgaggacttaggtccccaccccagcccaagccccaagtgctcccactgcccttcccccacccttctctcatcaccctgcttcatagcaagtttcgtctcacttcttttttttcttttgagacggagtctcgctctgtcacccaggctggagtgcagtggcgcgatctcgactcactgcaacctctgcctcccggattcacaccattctcctgcctcagcctccagagtagctgggactacaggcgcccaccaccatgcccggctaattttttgtatgttagtagagacggggtttcaccgtagccaggatggtctcgatctcctaacctcatgatccgcccgcctcgtcctcccaaagtgctgggattacgagcctcatcgtcctgcttcttaaccaaaacataaactccaggaggaccttggaccacatctgtttcatcccagcacagaatagaaactgaatcctggtcagcctacagtacaagtttgttgagtgaactagcgaagtagaggagctggctgcaggatcagagggggtctgcatggcaccttccctcatcgcttgtcccctgcatctccattctccccacctctctcccagcccacacaccaccacaaccaccacacatcacccagcccacccatctcctcacctgaatgacatggtgaaccacacacccatcatcatcagagtgatgcgccgatattcgggaccaaaacaggagagaaaattcccccaaacctacaggggaccagacaaagtcagaccttgactatactaagttctagcacccatagatccccacttttctgccctcccacctcccttcagctcacccatcacccacacacatagacttcagtcctgccttcttctccacttcccccactcccttctatctaccaccccgtccaccattacctgcccccctaggctcaaggcccggaccccccagcgctggtaccaggtccctgtgtccgactggatctcaatcaattcatcctcctgatgaatcgtcttaatgtgggttacctggggtcaagagaaggggtgggcagtcacacactctgtgtttcccaacatcggccaggcgcctcagtttcccctgcattagcaaaatgggaggcaggaggtggatatgataccctgaaaatctccttacggtagagtgtggtctgaggtggggggtactcagagaggggccaggtaggggctggggctgcagggcgtggaggtctgagtcgggagggctgtggcttactgagaacactcgctcaggatgtcctttggctcgcatgttggtatcatggacctgcttcagcaccatccaggcctcatcatgctttccattctagagccaaagacacaatccccacatccaagtcagcccctacctgacccagagttatagaccccctccctcccacctggcttctgtagtcacaggacactaaatggttcccagccctcaaccccaccaccaagccctgacctatgggcatgcactcaccactctgaaagagccccaagctgaggtatagcaagacaatcagacttgggcaagagctgcgggttgggggtggggagtgttgtccaggggaaaaaggcaagcacaggtcttgggaattccatagtacagaggaatgtaaaaaccaaaggtaagggaaatgatgggcaagcatgtagtcaaagacctaatcctgctggggttaggaggggaaggtatagggggtgggaatgtctcttgagctgtaaatgcaggacagggccaaggcccttccctgcaaaatcttaagtcatccatgggtaaagaggtcccctggtttctccacccaagaacccctcagggacacattccaaggcaaagaatgcaagataaagtcccctggagagtggactctgtgaggaaggcaggcagtcaaacaggatcaaatcaaactccagttggtgtttgaacacagaagcccctgctgccgtccacactccacagcccgcaccccaccccaccccatgcagctcagccccatcacctctaggaagaaacgggggctctcaggctgcgtggtcagagccccaatggcaaacacagaaggaaaggcgcagacgaggacgaagaccctccagctgtggaactggtaggcagaacccatctgaaaactccaccctggtagggagaaagtgacagcatcagcagagaggacagaggctgggggaacccaccacagggagcacagaagaagagggaggagggaga

SEQ ID NO: 189 - DNA, 1063 bp, Homo sapiens
ggttctgagcgttgtctgtgtttaaccttgatttcacgcgggccttgcctccctgctttccgcgtcctgacattacggctaaaattgcagttacagcttcttttacaaggagaagaatgtggaaagaataaccaatttgatgtaatttataagagctaccgggaggggtgaagggaagtcgtttgattggctaaaagcggagccgtatctaacagccaatagaaaagcagaaagccgcctcttggtttgcgtcctgcactgaaaggaaatgacggattttactttctgaccaccttaccagtggggagaatccgagactacagttcccatgagccctcagggcaccacgtggtgcctgcccgtgctaccaacgcgcagcgaggactccatttcccagcgtgcctcaggaagggcgccaggactgcattttgctccggagcgtccagagtcctggccctgagcgggaatcgcagtggccgaggctgagcggcagctggaggtcgaattcaccacgtcacgtaaagaaaaggggcggtgtctcgggtctccccgtgtggcatcaaggcgggctccctataggagctggtgtggacgtccgggcgtggggttagggcggatgcggggatcgcggggcgggtgttgacattgtgctctcaccaggcggatcgccccgaccctcactcctggcgtctgagtctctggcgtagcccatgctgagtgggcggctggtcctgggtctggtctccatggctggccgcgtttgtttgtgccagggcagcgcgggatccggggccatcggtccggtggaggccgccattcgcacgaagttggaggaggccctgagccccgaggtgctagagctctcgtttcgagggactgagccccctacaacgacaccggctggtccacgcagcgctggccgaggagctgggaggtccggtccatgcgctggccatccaggcacggacccccgcccagtggagagagaactctcagctggacactagccccccatgcctgggtgggaacaagaaaactctaggaaccccctgaaccccaagag

SEQ ID NO: 190 - protein, 98 aa, Homo sapiens
MLSGRLVLGLVSMAGRVCLCQGSAGSGAIGPVEAAIRTKLEEALSPEVLELSFRGTEPPTTTPAGPRSAGRGAGRSGPCAGHPGTDPRPVERELSAGH

SEQ ID NO: 191 - DNA, 810 bp, Homo sapiens
atcgcagtggccgaggctgagcggcaggcggatcgccccgaccctcactcctggcgtctgagtctctggcgtagcccatgctgagtgggcggctggtcctgggtctggtctccatggctggccgcgtttgtttgtgccagggcagcgcgggatccggggccatcggtccggtggaggccgccattcgcacgaagttggaggaggccctgagccccgaggtgctagagcttcgcaacgagagcggtggccacgcggtcccgcctggcagtgagactcacttccgcgtggctgtggtgagctctcgtttcgagggactgagccccctacaacgacaccggctggtccacgcagcgctggccgaggagctgggaggtccggtccatgcgctggccatccaggcacggacccccgcccagtggagagagaactctcagctggacactagccccccatgcctgggtgggaacaagaaaactctaggaaccccctgaaccccaagagagggaggaccaggatccgaatgggctgggtgagcacgaattaccgaggccttccctttgatacagtccaggatttgtaagggatgaagacccctgggccccattctgttggggtccatacatactctccgaagatagcaacttgcttcaggtcaaagtgaacccgagaaaagagaagaatcactcactactgctcttgccctggactattcaggaagggcagcccggatgttccatgttaaatcgtgacagaattgcaccagacctgatgagttggaaacaatcctatacattaaaagaaattacacta

SEQ ID NO: 192 - protein, 133 aa, Homo sapiens
MLSGRLVLGLVSMAGRVCLCQGSAGSGAIGPVEAAIRTKLEEALSPEVLELRNESGGHAVPPGSETHFRVAVVSSRFEGLSPLQRHRLVHAAEELGGPVHAIQARTPAQWRENSQLDTSPPCLGGNKKTLGTP

SEQ ID NO: 193 - DNA, 28829 bp, Mus musculus
aaagagatccttggagctgggcatggtgattgacacctgctcattattctggagagtctgaagcagggacatctcgagttccaggccagcctgcggtcacatagtatgacctcgtttcagagaggctaggaaaaaaaactggtaaagttcggttccacattgcatagtcagcaaccattcaacttactgtctcagaacagaggtcaggagaacagctcagtagccttggggttgatttacagcccagagatgttggaacgaatagtcagggagaccaccactacctgggccagagccaggaggtccttctccattcgtgtgacactccaaagtcactctcaacaccttcccaagtaaagaaagatctcttctgcctagttgcttgctctttaactggtctcaactctgcccagcctgggagatccctcactgcccacatgatagacactccaaggtcacccctggtcccatccccttccctaaccagtctccatccccatgctgaatactacatgataattctcactgggtcagggtttgatggtagcccaagactggacacaattcatctcctccatgaattcagcatcctgcagaggtggcatggtctgctccatcctaaaccgggtccatcactggtactggattcaaggggaatccgagaccacaacatgtaaagggaccatcctccttctccacccctcacatagggaccgtccatgaagtactgatggtgagcatgctcagggacagccaggtcacctacagtgctataggtgttaattttgttaactcgataaaatttagaatcaccatgaacacaaacctcttgggatgcctgtgagggagtttctatagtaacttaactgagggggaagagccaccctgattgtgctcagcaccatcacatgggaccggttcccagactcaatacaaaggagagtgtgagctgagccccagcatctgtctctctgcttcctgacagtggatgccctgtgagcagctgcctcacgctcccgtgccgtgccttccccacaatcacagactgtgccctggaactgtgagctaaataaaccctttcttccttgagttgctttgtcaaatattctgagacaacagagagaaaactaccaaagacacctaggttcgtgggagtcacccagatgtccagggacagtccgtcccaccctcccacaatcacttctcccctctccatacaagtcaccgctcacaactttcccagacaaggactagtagagctttcccgttcagccaaacttatcagccagcaagcaattttgcaaatgacatttatttagaggggaagctgatgcattgaaattcatcaagactttggaattcccaggatcatagagcatccaaactgcaccaaagcaatccagagtcccattgtgggttgaggttcctggtcccacatgatcagtaactggatagatttctaggacaacagctgtctgtcactttcatcaacaattgaaagccttggcaaggtgtcaaaataagtcaaaaaaataaaaaattttaaaaagccctagaattcccaacctccagccaggctcagtcaatgatcctgggaagaccatcctgaagggtcacaggatatgctgaggtcaacctaggaacaaacagaccccaaaaagaaagaaggtgcctggcttacagattgttatagaccagtggttctcttgggtcatgacccctcaggcaaacttctatctccaaaaatatttacattatggctcatgaaattagcaaaattatgattatgagatagcaataaaaataactgtatggttgggactcaccacaacatgaggagctatcctagagggtcgaaactttaggaaggttgaggccactgctacagacgctgttggagctggcggcatgatacctggctgagtgatgatagtcagtgaggggtgggcagttgcagaagagcaggggtcctcctagaagcagcaatccacgaagagtgcagtaccaatctttcccttctgcacagagggtatcagctggctggagagttcttgcatgatgtcatgcattacccaggacacactcaccatcactagcaggccagccagcaggcacgctgctcctgcccacatcctgatcttgactttggtgctctccttctccacatacttcaaacacttgcttctgaccatgcacagaagcaaacccagtctagcggcgatgacacacgtgaccatgaggacctgagacttctaccaagattcaggaaggtcctgcaaggagtcgtatgccttgcactgagtctggggaatgttgtgtgccacacaggtcttccacaggcccttccagatagttgatgctctgatgatataactaccggaaaactctatcacctaccagttgggtaaaagacagctcagtatggtgcacacccagcccttcgtgaccagaaagacatccaccgccgcctgccgccattgggaaaccatggcacagtttgcgctgagcaacagaagtccttctgagctgctgctgccaccaggaagagtctccagagactggaacagacagggtaacaaacttgcccacagaactgccttcctgccaggcagatggatctcagtgagtttgaagccagcctaatctacaaagtttcttgaaaaccagggattttaaggaacttccttcctgacagcagggtttatatcagcagggggcaggatggaggcaggagttcatttctcttgtaggccaccagcatgctaacctttctatgattatctgaatccaagccaacaaaggtatcccaaggaccttaggcaagagtcaccatgcagtatcaagaaacccctctgcggccagcgacctggtacagtgggtagagtacattcctaacatggatcaaaagctctagccttatccctggcattgcttagccagctgtggtggctaaaccctgtcgtgccagaattcagaggtgaagtccagggatcaggagttcaaaatcatgctcagatacatagagtaaggccacgctgggctaagtaacactgtctcaggagagagaagacagaaagatggcgctgtaggagaggttggcagataggctggtagatttctttctcacagtgaacccagaccaggaatggacactccagacatctccagatgctcacacatggggtgaaaagttaggattagaacaactcagccaggtttaggacttaagacaagggtcagtgagctctcattccccatcattttaggcttcagtagaaagaaacatggaattaaaggtaatggtggcgcacgcctttaatccagtgctctggaggcagaggcaggcagatttctgagttccaagtcagcctggtctacagagtgggttccaggacagccagggctacacaaagagaccctgtttaaaaaaagaaagagagagagagagagggaaacaaagaaaatttaattggtggctgagatgcctcattggttaacagcactggctgctctttcagaggacctgggttcaagtcccagcacccacacagcagttcacaaccatccagaactccaaattccacatagacattcatgcagacaaaatgtcaatgctgttaaataaaatttacaatttgtattgtatgtactgtgtgtgtgtgtgtgtgtgtgtgtgtgtgtgtgtgtgtgtgtacatgtatgtgtatgctccaaggcaaatgcgtggaggtcgaggacaactttcaggagttagttcttccttgtgccacataggttttgggacttcaactcaggtcatccaacatcgggcaaccatccttacccactgagtcatcttgtttcctgccccctcacaccgacacacaccttttcaagactgggtttcacgtggcctaggctaacttgaaagtcctgtgtagccagagataaccttgaccttctgatcctcctgaccccaccacagagttctgggtgggcaccatcacacaggtgagattctcgggatgaacctcaggctttgataggcaagtgctctcccaactgagccatcccagcgccagccatggacactcagattacacatgagcctccctccttgtttagggatcgtgggtctcccccatcttcatagaccattggctgatacagtccacaagggtagtgggagcagagagcgagctgagggttcggaagccatgggagtgtgtaaggtaaaggaccacaccagaactgcttgtcaggaggcagagcaacttcacttaggataattgaaggtttataaagttttgggggactgagggcagggtcatccacgatgagcaaagtcaatggctccgggcttagggttcctgacatacctcattagcatgcgggggggggggcggcatttcagaaatttcaggtgctggctaaacaggtttagtgaggagaaaggaaattgatcctataaactaattgagtctacttgacattcctcaggtagaggcaagtgtgagagcttagattcccgaacaaggtcagagaaggagaaactgttaaccaagggagtgccccattgcttgccacaccccagaaggccatcagaacaatggtagactccatccttagcagatttctcccacaagggatccagctgcagacattctgccttccatacctggaccgatggaatttccctctggtcaccttttgcaagggtctgaggcaggtggccttggattctgaagtcaaccaaaaaacagattgcctcaaaggggatcaggataatttttccccctggaaccaaatataagtgaccatggcacaggaacacagattcttatgaagtgtttgtcataacagaacaaaaaaaaatcgaaaatcaaaacagcttccaaatacattggggagagctgtcaagatggctcagaggtaagggctcttcctgccaggactgacaacctgacttcaatcaaacacacatgatggaaagaaagaccagagtggtctctacacacatgcatgacatgtgcatacacacacactcagagagagagagagaggcataaatgaaaagatatgtaattttgtttgtttgtttttgagacagggtttctctgtatagccctggctgtcctggaactcactctgtagaccaggctggcctccaactcagagatccacctgcctctgcctcctgagtgatgggaataaaggcatgcgccaccaccacctgactttgtaaatttttaaggatttttaaattttattttatgtatgagaatacactgtagctatcttcagacacaccagaagagggtgtcagatcctattacagatggctgtgagccaccatgtgggtgttgggaattgaactcaggacctctggaagaacagtcggtgctcttatccaatgagccatctctccagcccctgtaaatatttataatattgtgggtacaccacgtggacaagttaaatcaagtctcagctccaggcctctgggaacattcttgctttgggttggtagaaggtaggggtgtggttatacattcctagaggtttcatatgacaatcacaaggatgttagatggctcacagagatgggcaatagatgcctatttagggagctaagagtctggatctgcggccttccaactttcccaaaacactgaatttctaacttgtcaatcagtcgtgtcgagtgttcaaggtgggtttggcttatttcagggaattttcattaaaccatgaaatcagggtttccccactctctgtagttccacatccattaccaaaagcacccaaaacgtaggctggggtgtctattagaaaaaagtactttcctagcatggatgaatccacaggtcccatccccaacacaacctaaaataaccacgactatcctagtggtctttgttggatgtgactcttcatgttagaccagaccccacaatccaagccttgaccttattctagaatattgctggtagatgtggagggccctgcctcacactcacatttgggaacccaagccccttcatccagtgaccccaccatctctggagttttggaggccttttcaggaaaggacacagatctacatccgtatcatgctctaggtctgctcggtacacatcagatttctgctctcgtggtcgggcttacaggaagggagtcttccatagctcacaatccttgctcagtgctcagttctgtagcattgtttacttttttaaaagagttatttatttattttatgtatatgagtacactgtagctgccttcagacacaccagaagagggcatcagatcccactacagatggttgtgagtcaccacgtggtttctgggatttgaactcaggaacttcggaagagcagtcagtgctcttaactgctgagccatctcttcaccactgcattatgttttttacatatatttaaagtgtctgtctgtgtgtgtgtgtgtgtgtgtgtgtgtgtgtgtgtgtgtgtgtctccgttagaggggtggggggagagcttcaggaattagttctcccctctcacccacccttggatgccagggatggagctcaggctgtgcggctcagcagcaagcacctttgtccgctaagcagtctccacggctctcagcagctctcagtgttccctcttctgcaacataaggccagatctgccccccgggtttctctaaaatgtgctttgtgagtgtgtgtttgtgtgtgtgcacacacgtgtgcatgcatgtcctccctgcctttcctttcctctaacattccagtttcccccatcccttcattttccagacatggccttaggtagcacaggttatcctcaaatttgttatgcagcacaagataccattaggcttcttgtttctttgtttatttttaattaaaaataagccaggctggccttgaactcatggagatgcctttgcttcccaagtgctttggtcaaaggtgtgcaccaccacagccaggctaaggttaaaattaccatcctcttgatgtggtgctggggacagtcttcagggcttcctgcatgatagacaagaactccacaacccagtcccacaaagctccccttttctaatgtcccatgaagtactgaggggtccttgcctgaatcctgaacccctctggagcctcaaatgtgtccccagcttggtttctcttccgagctcaggtctgggttccaagagcctcagagaaccagtcatggtatctgacacctgcaatcgaagcactctggaggccagaggaggaggatttgcagccaggaagacagtggagatgcaagcctttaatcccaatacttgggaggcagaaacaggcagatctctcggagttcaagaacagcttgatctataaagttgcaggacagccagggctacatacacagagaagacctatctaaaaaaaggattcggaggcctgagccagcctgggctccagaataagatgtcccaacaatagagcaaaacaaaacggcctctcggtcactttattagatgatttgatgcaaacatcacagaaacctcaaatttagcatgtcctcctccaaccaaccctgcctcactccttggtttcctgtgtagaatgacctcatctgcagcatcctgagtttgagcagaaggccagggacagggaatggccctgagctcctgactctgcatcccaggtctgtcaagtgcaccacagcacccagagctgtgtctccatgggatacatacacagccaacagagctgtagccccaggcttggtttctggttgaaactgtcccatccaggaagggagccaccacccaggatagctatgtaaattatgaatacagctgggcagaatggctcacgcctttagtcccagcatttgggagacggaggcatgaggatctatgtgagtttgaggccagcctggtctatatagtgagtcctaggacagccagagctacatagtgaaatcctatctcaaaaacataattcacatattaattactaattaatcaattaaaaattatgaatacagggctgaagagatagaccagtggttaagagcactgactgctcttcctgaggtcctgagttcagttcccagcaaccacatggtggctcacaaccatctgtaatgaaatccaatgccctcttctgatgtgtctgaagacagctacagtgtactcacataaaagaaatgaataaatctttaaataaataaataaatgattattatgaatgcaagtaaaagttaaatttttttctcatgcattaaccaatttggcattctcattatccattcgtggctatatctaacctctgatgaacagtgaagattataaaatccttcctaaaaaaatgcttttaacttaattaaaataaaatacttccaaggactggggatatagctcagttgagagagtgtttttgtctagcatacactcgatcctgagttcaatgcccagaaccacataaatcaggcatggtggtacacacctggaatctcaacccttgggatgtagaggcaggaggatgagaggttgagggacatcctcggctacatagaaagttgaaaaccgacttgagctatgtggaaatgccgttttgtttcattccacttagatcctaaggagaaatgaagattaaattcccaggttctaggggagccaaggacttcccagatggctagccaacttcctcctccttcttcttcctcttcttcttcctcttcttcttcttcttattattattgggtttttttttttgagacagggtttctctgagttccaggctgtcctggaactcactttgtagaccaggctggcctcgaactcagaaatctgcctgcctctgtctcccaagtgctgggattaaaggcgtgcgccaccaccgcccggctttttttttttttgttccccaaaacataatgattgtttctaattatgaacgaataaatgattctgagttgtgactgcatataggggcagatatttgtggctttcgagcttaaaacctctgtaccattccggctctgaggggaagtccaacttccaggtctgttcttcggtcctgatcgatcagcagcggtctgagcacaataaagttttaccagctgtttaactactaagatgaacattggaagacgcagtctgctcccaagtcggtgctgttgtccctgtctggtcagtttctgcgcctgactcaaacaaagttcttgctttgcgtggactcttgtgtctgcatgggttgttttggattttcagaccctaagaaaccatacaaatactaaaaaacggggatcagtgagatggctgagcagatcaaagcacttgctgccaagcttgagaatctgagtcccatgcctggaagtcccatggtaggaggaggaatcaaaaaatggctctctggctgctacacaccatctgcccccccccccaaataaattggtttttttgttgttttcgggtttgtttgttttttaaatactgtacccaggagcaatggcacaacgcttaaatcccagttcctgggaggcagaggtccacctggtctatataaggagttccaagtcaccctgggctccatagcaagaccttagaaagaaagaaagaaagaaagaaagaaagaaagaaacaactcctcctgctctactcagcctgcctcccccctctcccctcctcccccctccgtctctcctcctcctctccttcttcacctcatccacttacttagtcaggcagggagggagggagggaggaaggaaggaaggaaggaaaaaagagagggaggaagggagcgagggaggaagcgaggcagggagagaaacttttttatttgtgaaaaaacaaaaacaaatcctcacgtgagtttgagatcttctcacgcaatacgctcattggctcagggagggtagtctgtcatttctttctcggattggctgttttatctcacggaaacccaatcgtcgcggtgctggaggcggggccaggctctcagacacgcccctccacttccctcgggtctgcctggagaagggggttccgcgcggtgagttctgagcctgtaccttcttggagacccttgtggtgaggaagaaccccacccgcgcccccgatccacctccgggaatgatgggctgaggcgtagtcctccctccctgcgcgggagtgcccccgctctatgagcccctccccatacaaacagcgcctcggcgtacaggtcagctcctgccatctcccactcaaggtcttgtttgtagcttgggaccgcgttggagcactgataacctcctccgccgggtgagggaggacggaagactgtggaggacctcatcactgggtggactctgcccccgcaggagaatgactcaggaggaggctgggcggctgccccaagtactggcccgggtcggaacctcccacggtatcaccgacctggcctgcaagctccgcttctatgacgactgggctccggagtatgaccaggtgaaagcacgtgggtcctcgacttttgtggctcagattctgtttttataagcaaagctaaaatagtacccatgcatctcagggaaacttggagctgaaaagagacctgggagatgtgctccttagagacctgcacccaccccacccccacccaccccggctgacctgtaagcaacccctaattaatcctgcaacaaacacgaggagagagcctgcaggaggcgctattgagacatcattcggtatagacagaccagctaagagctgccacagccagtagccagccagcttgatccccactagtgtggggtcccttgacagtaagacacctcaaagccgggagtggtggcgcatgcctttaatcctagcactcggaaggcagaggcaggcggatttctgagttcgaggccagcctggtatacaaagtgagttccaggacagccagggctatacagagaaaccctgtctcgaaaaaaaagtaagacacctcaagctcgggtcttctgttactggggtcctaggaggatctgaactctaaaacacacaagctcaaactggcagaacttgggcaccccacaaggtgagtcgtctaaacactatgttgggctaagtgctatctcctcaggatgtggctgctttgaagtaccgagccccacgccttgctgtggattgtctcagtcgagcctttcggggctcaccccatgatgccctgatcctcgatgtggcctgtggcactggcctggtagctgtggaggtaagatctgatacaccaccctgccttcccttcagcacccaggacctcctacatgctactgctcaattagtcctgagaccctgcctagtaaattctaggcaggagctctaccacagagccatgttcccagcccctccctgggggattctaggcaggggctctaccacagagccacgcccccagcccctccctgggggattctagacaggtgctctacatctgagccacgcccccagcccctccctgggggattctaggcaggagctctaccacagagccacacccccaggccctcactgagggattctaggcaggagctctaccactgagccacgcccccagcctcttgctggggggattattggtaaatcctctaccactgagccacaccctgagccctttagtttgctttttatttagagatgacacggtctcaaggctggccttgaactcactctataacgcaggcaagctttgacctggggattcttccacctcagcctccagaggagctaagaagacaggcctaagcctccacacctagctcccatctgctccaattccctcccagttcttgaccaagagctcatcctctacctcaagctcattgatcccaagatccaaggaagggtccagttgagctgaggcagggggattacccatgactgatgccaccttctctcccagctgcaggctcggggcttcctccaggtgcagggcgtggatggaagcccagaaatgctgaagcaggcgcgggcacgtggcctgtaccaccaccttagcctctgtaccctgggccaggagccactgcccgaccctgaaggtactttctgtcccactccaccctcacccaccttcccaagaatagcatcctctgttgtccagccaccatcttcactctggagtcctgtgtgagctctcgtctccatctagagtctgatgtcacctcatctcatgcacagtgttgggcttctactacatcccagtgtataggacatctttgtttgttttttgagacagggtttctctgtgtagccctggctgtcctggaactcactctgtagaccaggctggcctcaaactcagagatccacctgcctctgcctcccaagtgctgggattaaacgcatgtgccacacacacacccaccctcccacacacacacacctatgacatgttctattagttcctcttcttattgctgtggcaaagcaccacacagaacataatcatgaggctcctcccatccccagggagctactggcagttgcagggagagtcattttcttcagtgatgtagccacgggtaatttgcctgtgccccagtgccaccccgctcctcctagttcatgcaggaatccccagtaatactcagtgggtcacaaacaaaacaagacctgaaagtagcaagaggtgccaggagatggtggtgcctaccttagtcccagcccttgagatgcagaggcaggtggatctctgaattcaaggccatcctggactacagacactacagagctagttctgggatagccagagctacacacacacacacacacacacacacacacacacacacaacttgatcttgaaaaaaaaaaaacaaaaataaatagggaatttagccaaagctagaggagcatcctgggtggaatgggaagttcgagggaccacaccacattatagtcacacagcatcttaagggggtggaaaaatggctccctggggaaaagcgcctgctattcttacagaggacctaggtttggatccagcacccagatcaggtgattcacaaccccttgtaaccccaatcccagggtaggatgcctctggcttctgtgagcgcctgcgtccaccaagagacacacgtgcatacactgggctggggaggtgacccaggagttaaaatctcctcctgctcttacagagaactcaagctctgatctcagcacccatatcaggcaacctcaggggatccagtgcccccttctggattctgaccttagtctaggatcccagccctgggatggtgccatccaccattagggcaggtcttccctcctaaatgacctcagtctagacactcccttacagacaagcccagagatttgtctcccagatcctgtcaggttaacaaacaacagtaaccattacacatctccaccctgccccacacgcagggacctttgacgcggtgatcattgtgggtgccctcagtgagggacaggtgccctgcagtgccatacctgagctcttaagagtcaccaagccaggtgagtcaccacccagccaaccctttcccctctccacatcactcggactgaagaagggtggggtgttgcataggggtgcccaccccagaccggtgccccagttctccatctgtcacttaagtgctctgccctggctggccagctcacctgcttctcatctccacccttctaccctttgtcaccgctcttataatcaaatggcttcgtctctaggatcctgtccccatcagactacggtgactgttgggtacagtcatgaccgtgaggcctttgcttcagccctggtacccgatagaggtcagctgagctccatctttcagtctcctaactgatttggggactgcccttccttgaatatttttgatagttctcttttcctggcataggtccaggtctgttcattcaagatgacaatgggatcggcttggatcaactccacacactgaggggtggagcaggctagggctttctttttctatggtgctgaagatggaactcagcacctcaggcaggttctataccctcaaatcattcactgggctattctaggaaaaagctctactactgaaccatgctcacagcccccactgagattctgcaggtgttctaccactgagccacgcccccagcccctcactgggggattctaggcaggggctctaccactgagacacgcccccagcccctccctgggggattctaggcaggtgctctaccactgagccacgcccccagcccctcactgggggattctaggcaggggctctaccactgagccacgcctctagccccctccctgggggattctaggcaggaaagaccaatactctcagaatgaagttgcattttcaaatgtgggcagggcagtcacagaagatggggtagggagttgcctgagggtctactaggcctaaggacagaatgaggaagctgggagataaaaatatttcctctccctaccatactcctggagctaagccttggcatgtctgggcaggattctgtttgagagaggccaacagaagctagggcatcgatagtgtcatcagcagtgccacgggttgggctcaaaagcaccggaaatgcccgttgcatgaacctaaacagaacagactctcctgttccagcctgagcccctcaccttcctcccccatctgccagaaaccagccatactggataccctgcagctacttggacaaagtctgtcatctgcccacagccagggcttcttgacttagccaggctttattttatgttttagacaaggactctggatgaactcagcgatctacctgcctctctgcatctctgcctctctgcatctctgcatctctgcatctctgcctctgcctccagagtgcttagaattaaaattctgctttgggttggagagatggcttagacatgataagttatttctctgctggtgaaacgagacaattcaagccagattaaattatattaaattcaagtttactgggaagccgctcttgtgcaagctccctggccccagggaaggaggctaaggaagtcgtcatgagcagggagagagagaaggtgtgtgcatgcagagaaagaagaaggagagagggggagacccaaatgtctagattatatagggaagagcctttgggggaaggtaacccagactccagggcagagtaaggttggggtcacggtatgccaggtagggactaaaggatgctgggaaaatctggaggctaggtctttggaatgtgaaatatgcacctcagccccttggggtctgaacctaaacaagggttaagatcacttaatgctcttggaggactcaggttccattgccagcacccacgtggcagcttacaactatgtgtaacttgaattacaggggatccaatacccttgtcgggtgcccacctgcaccaggcatgtacaaggtatgcttccctaccgtccggcaaacacgcactgcacataaactaaagacgctttctgtcatcacatccagcttccccgcctcccccaaagaaagtaaaggtcaaagcttgggtcctgggctgggcgtggaggcgcacggctttaatctcagcactcgggaggcagaggcaggcgcatttctgagttagaggccagcctggtctacagagtgagtcccaggacagccagggctacacagagaaaccctgtcccgaaaaacaaaaaacaaaaaaaaagcttgggtcctgacagccctaacaaattaggcctcccatctccaattgatcaattcaaatcaaattgcctgggattagtggcacaattaggcctcccatctccaattgatcaattcaaatcaaattgcctgggattagtggcacaattaggcctcccatctccaattgatcaattcaaatcaaattgcctgggattagtggcactctcctttagtcctgtgctgggaggcagagacagtcagatctctttgagtttgaggccagccggggctatgtaaaaaaaaccctatcagagagcaagatggactggcaagtgtcagaactgtgtgaagacctttcagagaaacaagttcctcctctgggtagctccaggctcctgtcttttccttcttccaccatgagactcctggggaaattctaatttggggaaaaccattgtttctgacagcccaagggaggggcacaagtgtctttttacctctctttatagctgtatagcccattgtagtctgaaaaccactgtgtagcccagattcaaagtctgagcacagagatgggtcgctggttaagaggacctgggtttgattgccagcacccacagagtggctcacaacctctgtaaccctagttccaggagacccaacacctttacctggcctctgtgttcatggcacacgcatggtgcacagacgtacaggcaggcaaaactaaacacaagatttttaaaatacgctctccacattttttttttaattttattttgctcttcctgcctactcgtgctaaatgctgggatgttaggcttgaaccaccatgcttggctctgccaggggctttgcagctgtgtatgcacaatgcacacacatgtcctccccttgaagtggaattatcatttctccccatgcctgcaagaaacttagcaaaaagtaatggagggtcttacaaggaccaaggctcactgctttcctgctgtgccctgagacccgggcttgccttttcatgggactaggttacagaaggcgtggagctccctgcccccatcagggtgaagaattcccagagtaaaggacactgggctgttcagggattgcctagtaatcctgacttctaagaaactgaagtagcagaatctcaaaaccaagccctgccctgtgctacacagtggtttcaaagacagcctaggcaatttaataacatcctgtctcaaaagcaaaagttaaaaaaaaagggggggccatatagcttaggggtagagtgctcacctaggaaccgccatgatagctagggggcatggctcaatggaagaacacctgcctgcctagaattcccccaggaaggggctgggggcatggctcagtggtagagccccgcctagaatcccccagggaggggctgggggcatggctcagtggtagagcccctgcctagaatcccccagtgaggggctgggggcgtggttcagtggtagagcccctgcctagaatcccccagggaggggctgggggcgtggctcagtggtagagcacctgcctagaatcccccagggaggggctgggggcgtggctcagtggtagagcccctgcctagaatcccccagggaggggctgggggcgtggctcagtggtagagcccctgcctagagtcccccagggagaggctgggggcgtggctcagtagtagagcacctgcctagaattcccccagtgaggggctgggggcgtggctcagtggtagagcccctccctagaatcccccagggaggggctgggggtgtagctcagtggtagagctcctgcctagaatcccccagggaggggctgggggcgtggctcagtggtagagcccctgcctagaatcccccagggaggggctgggggcgtggctcagtggtagagcccctgcctagaatcccccagggaggggctgggggcgtggctcagtggtagagcccctgcctagaatcccccagggaggggctgggggtgtggctcagtgttagagcccctgcctagaatcccccagggaggggctgggggcgtggctcagcggtagagcccctgcctagaatcccccagggaggggctgggggcgtggctcagcagtagagcccctgcctagaatcccccagggaggggctgggagtatggtttaactgtagtgtcttttttagcatgtttgaggaccatgttttcatctgcagagctgttaaaaagagaaaaaaaatttttttttaaatggagtccatggaaaactatcaggttaaggaaactgaaggggattcctgggggagacaattttagataccaagccctggaagtggaaagctggcccagaactgaagtctagggatatccgtgcagctcacctgtccctctcctgtcctccccaggtggacttgtttgtctgactaccaggaccaacccatccaaccttccatacaaggagacgctggaagcgaccttagactccctggagcgggctggagtgtgggaatgcctggtgacccagcctgtggaccactgggagctagcaacatcagaacaagagacagggctaggcacctgtgccaatgatggcttcatctctggcatcatctacctttaccggaagcaggagacagtatagggtgagagagggaggttcagtatcacacccctagttgaccactgatcctctgtgtatggtctcagcccagtgtgttttcttggccttccctgctctgtctgtaaaatgggtccaccttcctagccacgcccgttaggagtactctgctaggtatagcccaaagggactgaaaagactcctctactttctttggacccagggctcgagtgatcaccaacagtgcttgctctgcaaattgtgagaaaccaagcggctgtcttcagcatccacatacaaatcacaggtttccaacatgcctgtgtgtaataccaccattgaggtgggagatgggtgggtcactcagcaggtagccgaccaaaacaggcatctttgcactcagtgaggcatcctgtcttaaagagataaggcagaccgatggagagtgacagagaggacgacccccagccccttgcctgcacatgtgcgagcgcatccttacactcaggtgcacgagccacacagataccagatacagaaaaaaaataaaaatacaacaacacagagaccagtgtgtactgtaacacagccaagcaccatcccatccccattttgcaaaagatgttgaattaggaccagcaagatggctcagcagataaagccacacttaaccacctacctgataacctgagttggatcctcaggagccacgtggtaaatggagagaaatgacccctacaagttgtcctttgctgtctacatagcataaagcacacaaacacacacacacagaggcataggaggtaagtaaatgaactaaataagggtgtcaaacacacactaaacaagagcaatggtgatgaatgcttttactcctccgagctctcaggaggcagaggctggtggatctctgagctcacaggtttggccagcctggcaagatggctctctgggaagacttgagttcggtctccagaatgcacatgacaggcgagaaccagctccagcaagttgtactcagacggccacgaaacacaggcacgcatgcacacagcaacaatagaaagtaaagagacataaaaataaattctaacgacaaagaaatggggtgatctgatttatgggagaatgggagaagcatattcataaaattgtggtttagcctgatctgagatcttagcctggggcccccgcgataccaaactaacatttccggcactctggtgtgtccaagaacctggctccaaccagtctgaactaggcaaggcaatatccaaacccacacagaaggaagcaaagtaaacaactgtgaaccatccaacatctggtcccatccagtcccctccccctcccccatcagagatgttatctgttgttaagctaacaggtgggtagactgggtttttctgagtcacgagggaagctagggcaaagagataggtcatttagacctgcccagaacaaagagctagacctaggttggcctggtggtacaagcccagcgccccagcctcccgagaagccgaggcaggaagataggaagtccaaggcctgcctgggatgcagggtaaaacccaggccagcctgaaccatttgccacactccatttcaaaaagtgagacaagatctagagaggccggagaaacggctttgaggttcagagcactgactgctcttctggacgacccaggttcacttcccagcaaccatatggcggctcacagctttctgtaattccatttccaggggacctgacaaaacaccaatgtgtgtaaaataaaactaattaaataaataaataatttgaaagatctagagatgtagagcactttgggatcccccagtgaggggctgagggtatgtgttagcggtagtacggaagccctgccaagaagccctggagtccatccctagcacaggggctaaaaatagattaacaataataaaaaaaaaagtttgattttcttcatcttttttttacatttatatatttctcccctgtccccagggtttttcagtgtagccagccctggctgtctaagactagttttgtagaccaggctggcctcgaactcacagagacccacctgcctctgcctccccagggctgtgactaaaggcatgcttcaccagacctggggtatgtgtgtgtgtgtgtgtgtgtgtgttcatgtgtcgtggaatacctgcttacagaggtcagaggacaacttgcagaaccatttgagtccaggaatgcaatttaggtcatcagacttggcagcagttacccactgagccatcgcacagacccaaaaaaggaaaatgatgtaatgtctcttttgttattctgattcatcttttttgttactctgatacagggtcagagggaggcctgatgggcctctaactgggtaaggcctagcaggagcctcaagccctgatccttctgcagcctcctctgaagcatctaggactacttactggcctgtgtgcctgtgttgcttactattaggcagtgcagggacttgaacagagggcccttggtacgctaggctagccccccactcaggaaggtacatccccgcaccttggcgaaaggacagtgttgtttgttttgttttgttaggcttggttggttttaaaaagggttaaactatgtagctctggtagacctagaactcactatgtagaccaggctggccttgaactcacagaagtctcttcctgcctcacagccacctggtttttcaatgtttaactcagaggagattggggctgctcaacaatagagcccttgtctaacatgggaacccctggatttgatccccaaggaccacagggagtaaaaaaatgaactataaagagaaaatagaacagcttgggtctgttatgacagtctcaggtagcccagcctggcctcaaactgactatgtaatgaaagatggtcttgaactcgtgatcctcccatctctacctcctgagtgctgggatcctatcacaagcccactctccggacttgaaaacaatctgataccttcatgagaacttggctatccccacaaaatcaagaagtggtaagtggggtgacgagagggctgagccggtaaaaagtgagctgcgtaaaagtgcagtggtgtgagtccccccccccaaccccacataaaggtgggaggggagagtcacctccacaaagttgtcttctggtctcagttctggagctgagccacagttgcgcatgaacagggaagggttctgtgtggatggagctcagagctagaaagctggtgtacttgagtcccatcccagctctgaataaatctgtggtgtccctgcccataatcagagcacctgagagggggagaaaggagaaggagaaaactcaaaaccatcctttgtgatggatcaggtttgagttcagccaggatacaagaccctgtttcaacagagtagggatcctgtcctagtagcaacaaacccttcctcctcagcaacacataaaacaggcatggtggttcacatctctaatcccaacactggggaaatggaagcaggatgatcaggagttcaaggtcgtcgtctttagctacctgggggctagcctgggctatattaagatcttatatcaaaacaatgatcctatcccccgaaggagtggataggaaagtcagggtgtggcccaggctgccctgtgagggtgcaggtgtgggtttaaggactctcaggaccttgagcattccagggctgtgggaggactccctagggaagaggccacagcccggacctgtaagaccagcaaggcttcaagagtgggaaaaggacattccttagagaaggtgactgctataacgtggcctgtggaagataagcaggccagcctgtttgctcagagaaaggaaggccagaaaggaagaggcaggggaattagcccttgttgttcctgtcatctgttgtccctcccagagtcccccagccccaccccaccccacccccacccccagtcctgggcatacactgggccctagatacagggtttcccctctaacaaatgaagagattgtcatcatggtaatctcatcaaaactgaggcaggagaattgcattgagtttgatgttagtctgggctttatactgtatctaaaaaaaaaaaagcaaataaaggtctcaaagcccatggtcctccaggatagaggaagttctcatttttacagtgagaactcctgaatcactttctgagacagggcttcctgtagaccaggctagccttgaacctacagcttagtgtgtgtgggggtggggggtggggggtgaccttcatttggggatgagtgtgggacacggggcctctggcgtgccaggcacactctccaccaacagctccaccacttcatcttattagaacatcaaggtctcctgtgaacccttagccgcccctccagcccagtcccatccacagatagagaacagcccaaacctttcctgtatgcaggtgccatttattgtagaaaataataataattacagctgtgaacagaccttaaattacaaaacaagaaaccacagagaaggcaggggagtccaggagactccctggtacaatgccatcaccccccccccccccccccgtaccttccttccgcagactggccggtgtccttgaaatgggcaaagggagggaactcagaggggccaactcaagaggcccagggtccttctgaagagggagggggcgcacagtgatcagaacattagcaagacagtgcggaaaaggggtggggacacactgggctgcttctaggtccccagccctccccaaaccagtttaatccacctccacccttcttccctcaaacccgtccatccactctacagaaattcattagtagggtaggtgggtgggtcaagcacagtcattgctaatcaacggaagggttccatggcagagcccaccggctctcaatggcccctcagtcagtcactcagcacaccatgacttggggtaggaccagctgtgctcggaaacacggggcgtaatggcaagagtagcgctggagtaacgtgtaggctgagtgagggggatagagaaaggacagtggacgtttgctaacatgaggacatccactccagagtccaaagtcacagctgagctaccccggccagcaggacccagcttgcgcctctactgcccttcccagctgcttctgccttcagccccatatccaccagcaatttggatgtaagcagcaagatatttttacatccattcttgccggccgtaaggagccatgtggagcagcccaagagctacgggctagtaactttgcacagtccgggtttgcctgtccccagcaagcagttagtggcccatagcagggcaggtcctggagaatgtgaggggccacaggctgttatgagctcaatccgaaaaaaagataacaaaggcaatgtggacagagtggcccaccttacacatagttgctggcggggacagagcgggcggcggagtacttggccgagtagggcttgtcgttgctacgaggtgggcaactgcagcagaggaggcctcctcccaggagcagcagcccggaggccgcccagccgacgtaaagcgaggcccccatttccctcttctgcccggaagccaccatagggttgtagaagtcgcggatgacgttgtgagcggtccaggacacgggcaccataatcagcatgcttgccacgatgaacacggctccggcggtgatcatgatcttggccttgacggtctcgtcctccatgcagttggtgcacttgccccctaccactgagagaagcatccccagagcacccacgatgatgctgatgaccataagggctcgggcggcctgcaggtcctgcggcagggcgagcatcgagtcgtacatcttgcactgcatctgacctgtgctctgcaccacgcagttcatccagaggccctcccagctggtctgtgccgtgacgatgttgctgccgatgaaggcggtcacccgccacatggggagcgcacaactcaggatgatccccagccagcccaggactgccaaggagattcccaggacctgtagtcccatagacgccatcgctcagcctctgcaggggtcaaagtcggtgaccacaaaaagtacctctctctctctctctctggagtcagagggctgagaaagtttttttcggtgagcctcagggacacaaagccagctgagtccgatgcaccagctaccaagcgcgaacactgcagctctttcctgcctgcacctgcaacaagaaagggcggccacaggtgctgcagttaaagctcctagaggaggggcggaggcagagggaggggtttcagtcccggaggcctccctcgggaccagtttctctggattcctgagcttgggccaacaaaggcgttcagaggcccctgtcctgggcccctgagtcacccgccagtatcacaagaaactatcatctcccccagcccccaggctcacgctgaggtcagctgggacacagacactgagtcaccagcctagagcacctggatgctcaccgggtggggacaacttagactgagaagcaagcctccccagggttcagagcctatagggaaggtccccaagactcattccgggctcccgtgggaaggtccccaagactcattccaggctcccgtgagacaagagaatgaagaccctttactggagaatctgaacctagtgtctaggggtgtccaagagaacccctgtcttaattagtgttgcttttaccaaatcaactttatcaccaccatcatggctattattgtcattaatgggacaacatctgtactttgcctcaacagcaactttcctactgttggccagaggaagttggtgtggggaaatgaggacctggggtggggacagcgggagccagatcacctgctgtcctaatgtgatttccccacccagccatagtgcctcagggtgtagaggcgaggcactttggtccagaacaagaaacagggaaaggcagaaaggctggtgggatggttcagtgggtagagctgcttgcttccaagccccaaggacctgggacctctgtgacaggagacacacatgtcctctgatgcacaaatgtcatcaataaataaacacaatttaaaattgggggtggtggggtcgtgacagaatcctgtcctctcttccttcctagggctgagccttgcttggtgagaactggatggagacaaattcaaaacccagccaggccccagagacaggatgtttattcttctgagacacaggagccgttcccataaagccagcctgggcacaaagtccttggtgacatcgaagagaaagggggccctccaccagaggtctgtctgcagggagatgaagagagatggtgtgcttccagccacaattccagaggacttctaggagtcaatgtattttgagattatgctagggacaccagtacgaagagacacaaaccctctcagggtgattgggcaatgcagtgggcactgggtcaaagaggacatctcctgcagggaggggacagcaaggagacccgggtcagagagatgtttcacaagacaaggaatctagtttgaccagacactggccttgggggggtgggggaggggtagccgagggaaagacagtctcctgtgctccctcaccccctgccccgctcccaccccacctggtacaaaggacagagatgaacatgtccatccaagagagagcaggctgagaagggaccacatgtatcccaaaggcacctgggaaaatacagataaggagaaccacaggtgcacaggaggggcagaggggaactaggagaagggggtcattgatgtagttcctgtaatcatagccccatctgggatcacccctgactgtccttggctagtctgcctttctttctctctctctttctctctctctctctctttcttccttccttcctttttctttctttctttctttctttctttctttctttctttctttgcttctttctctctctctctctctctctctctctctctctctctctctctctctctctttctttctttctttcgagacagggtttcctatactgactcagactcccgaggtagctaaggatgaccttgaacatccaaacctccacttcccaaatgctaggattacaagccacatatggtgctaggcatggaacccagagctttgtggatgcagggccagcacgctacccaaccgaacctcatttccaactccaaccttaagtttctgttcccggccctgcttccacttcccaggtgctcgattcctggtgtgcacagcgccaagtccagcttagtctctggcttagtggttgttgctcttggtttgggtttgtttgtttgttttgtggtttttgagacagggtttctctgtgtagccctggctatcctgaaactcactctgtagaccaggctgaccttaaactcaaagatctgcctgcctctgcctcccggattaaaggcaagcaccaccactatccccggctttgttttgtttcttaaaacagcatcttcgtgtatctaagctagcctggaactctatgtaacaccgactggcctcaaacccatggcaatgctcctgcttcagtctccaatctgctagggttacaagtgtgtactccactctctcgtgtttctctttgtaccacttttgggtgaacaccacaaagaccacagctgccatagatctctgaactccggtcactgcccagaaccctatgtgctgccctgggcttcctgcctgccagtctgtccaattccaaccccaacagatgcacagtctctttaaaatagtcctccccaccaccactaatgtagcccaagctgtcctcagactctcacatgtttcttcttcatcctcctgggtgctgggattgcaggtgtgtacattactgtatacaactggtgcataatccctgactctatggagcacaatctgatcttccaccatcccacgtggtctgtgagcactcagtacttggagtttgttggagactgaatctgggccaatactgcgctccgggttagaagaaccaatggagcagggatcccctctcatgttaaggccgtggagacacacttccatgcctccttctgagctggaggctcaggaagcctaaggcaatgtcttatcaagttaaatgctcaagctaggcgtggaggcaaactcctataaactcagcattcccaaggagaggcgggagggctatcataaattcaaggccagcctgggctacttgtctaaacaatattccaaaaaaataaagttctcttgatatgaggggtaattctagtcctgggtaagctgaagcaagttgagacaggctgttgggcataacgccatcaccatcaccaaggcgacacatctccagagtctctgtatattgccgacacatgcttcatacctcctataaggcctgcactcagccgggcggtggtggtgcatacctttaatcccagcacttgggaggcagaggcaggcagatttctgagttcgaggccagcctggtctacaaagtgagttccaggacagccagggctacactgagaaaccctgtctcaaaaaaccaaccaaccaacaaacaaacaaacaaaaacaaaaaaacaaacaaaaaaaaggcctgccctcaaggtttggccaccacaaagccctttcaccagactacaagtctgagacagcttgggctcatagcaggactccatattaatcaatgaatcaataaataataaaaataaaaattttaaaacttgccgggtgtggtggcacacgccttaatcccagcactagggaggcagaggcaggcggatttctgagttcgaggccagcctggtctacaaagtgagttccaggacagccaggactatacagagaaaccctgtctcggaaaaacaaaaacaaaaaaacaaaaaaaacttaagggctagggatatacttcagttggtatcatgcttacacatcatacatgatccctaggttccatccatggccccacatagactaaacatgtggggcacaattgtaaccccagaacccaaaggtggaagcaacaagatcagacattccaggacagtgtggggaccacataagatagatgtcttcaaaatcaacaagactgggcatgatggcgcatgcctttaatcctagaactcaggaggaagaggtagaaacaagaaaagaaaagggggaaaggaaaaagagaggaagagagacagaaacgagaggagaagagaaagagaagaaaagatgggtgtgtaatccatctgtaatcccagcactcaggagacagaggcgggagagtcatggaaggcagagagcaggtgggaaggtctccattagggagtcctgcacaagccagaggcaagaccctacctcaaaaacaaacatacaaaagcaagttcagtgttcaggacttgcacttagtaggtgtgtggaggacgtgtgattcagggtgcactgggcatctcctgttctctagccaccttcctgctcctcccccaggcgggaacagctcagcaacataaacag

SEQ ID NO: 194 - DNA, 1367 bp, Mus musculus
gcctggagaagggggttccgcgcgcttgggaccgcgttggagcactgataacctcctccgccgggtgagggaggacggaagactgtggaggacctcatcactgggtggactctgcccccgcaggagaatgactcaggaggaggctgggcggctgccccaagtactggcccgggtcggaacctcccacggtatcaccgacctggcctgcaagctccgcttctatgacgactgggctccggagtatgaccaggatgtggctgctttgaagtaccgagccccacgccttgctgtggattgtctcagtcgagcctttcggggctcaccccatgatgccctgatcctcgatgtggcctgtggcactggcctggtagctgtggagctgcaggctcggggcttcctccaggtgcagggcgtggatggaagcccagaaatgctgaagcaggcgcgggcacgtggcctgtaccaccaccttagcctctgtaccctgggccaggagccactgcccgaccctgaagggacctttgacgcggtgatcattgtgggtgccctcagtgagggacaggtgccctgcagtgccatacctgagctcttaagagtcaccaagccaggtggacttgtttgtctgactaccaggaccaacccatccaaccttccatacaaggagacgctggaagcgaccttagactccctggagcgggctggagtgtgggaatgcctggtgacccagcctgtggaccactgggagctagcaacatcagaacaagagacagggctaggcacctgtgccaatgatggcttcatctctggcatcatctacctttaccggaagcaggagacagtatagggtgagagagggaggttcagtatcacacccctagttgaccactgatcctctgtgtatggtctcagcccagtgtgttttcttggccttccctgctctgtctgtaaaatgggtccaccttcctagccacgcccgttaggagtactctgctaggtatagcccaaagggactgaaaagactcctctactttctttggacccagggctcgagtgatcaccaacagtgcttgctctgcaaattgtgagaaaccaagcggctgtcttcagcatccacatacaaatcacaggtttccaacatgcctgtgtgtaataccaccattgaggtgggagatgggtgggtcactcagcaggtagccgaccaaaacaggcatctttgcactcagtgaggcatcctgtcttaaagagataaggcagaccgatggagagtgacagagaggacgacccccagccccttgcctgcacatgtgcgagcgcatccttacactcaggtgcacgagccacacagataccagatacagaaaaaaaat

SEQ ID NO: 195 - protein, 276 aa, Mus musculus
PGEGGSARLGPRWSTDNLLRRVREDGRLWRTSSLGGLCPRRRMTQEEAGRLPQVLARVGTSHGITDLACKLRFYDDWAPEYDQDVAALKYRAPRLAVDCLSRAFRGSPHDALILDVACGTGLVAVELQRFLQVQGVDGSPEMLKQARRLYHHLSLCTLGQEPLPDPEGTFDAVIIVGALSEGQVPCSAIPELLRVTKPGGLVCLTTRTNPSNLPYKETLEATLDSLERAGVWECLVTQPVDHWELATSEQETGLGTCANDGFISGIIYLYRKQETV

SEQ ID NO: 196 - DNA, 27485 bp, Homo sapiens
  misc_feature (1)...(27485): n = A,T,C or G
cagtagtgcccttctggtttttagtctctgggtgccacccatggtaagaattgtattaaacagcctggacgcagtggctcacatctgtaatcccagcactttgggaggccaaagtgggaagatcgcttgaggccaggagttggagaccagcctggaccacatagggagacccagtctctatgaaatatttttaaaaattagctgagcataatagtgcatgcctgtcaactcagccactcaggaggctgaggcaggtggatcacttgagcccagaaggttgagactgtagtgagctaggattgtgccactgcactccagcctgggcgacagagtgagatcttgtctctaaaaagaaaaaaaaagaaaaaaaagtattgcacaaagctgttcattaaacacacatgtgaaactgaagcaagagcctaacaaaacaataattactcctactacatgcagtatgctcttctaatatctgctcattctatttcacaaccagctgaattgttttcactaccctccagtgggttaaagcattccttccagaaacatccacttgtgaacaaagagacatgtgcatggcaatgttatttcctatccccaggaaaggggagctgtatcagctgggtgtgtcagcttgaggcttgagggatgactaagcggtggtgaaaacgaacccagtccgcaagcatcaacacagaaagagctcataaatggccgggcatgggggctcatgctggtcatcccagcactttgggaggccaaggcgggcagaccacttgaagtcaggagtttgagaccagctgggtaacttggtgaaatcccatctccactaaaaagacaaaaaattagccgggcctggtggtgcatgcctgtagtcccagctgctcgggaggctgaggcaggagaatcgcttgaacccaggaggcggaggttgtagtgagccgagatcgcgcctcttcactccagcctgggcgacagagcaagactccatctcaaaaaaaaaaaaaagccactgaagcagagttgaaggaagagtggggcaacatggcaaaaccccacctctacgaaaaatacaaaaaaaaattagctgggtgtggtggtgcacgtctgtagtcccagctgctcgggaggctgaggtgaggggattttcccggctggaaaatagtgcaaaggccctgtgatagccttggcacagtccaggaacagcagaggccagagtggcggatcaaggaaaagagacgctacagataaggagaggaaagaagctggattttaggttttaagcaggggcgtaaactcatcagatggatactgtaaaaacgccactctggctgggctcagtttgttaactattgaaacgctcatgaagaaatacatggggagttattacactagtctcttcttttgtgtgtgtttgagattttcttcttcttttttttcttttagttttttcagacagagtcttgctgtgttgcccaggctgaagtgcaatggcgtgatcttggctcactgcaacctctgcctccccggttcaagtgattctcctgcctcagcctcccaagtaggtgggattacaggcatgcaccaccatccctggataatttttgtacttttagtagagacagggttttgccatgttggccaggctggtcttgaactcctgatgtcaagtgatccacccaccttggcctcccaaagtactgggattacaggtgtgagccaccgcacctggctggtgtagtttgagtccacaggatttgctgatgaacagggtgcgagatgggagaaaaacagcttgagctgagcccctgagtgcaaggtggttcaggggcatttgcagagacgggccctgaagaggagcagatttgggagtggaaagaatcactctcgggtctgggctcgttgccagacctgtggcctccaaggagatgtcagtttcatggctgggtgaacaagtccagagttcaggggagagccaagactagaagtcatcaatttgggagtcacccacaaataaacagtatttaaaaccacgggactagatgagatcacctaggaagtgggtgtacacagagaaggaagaagacccaggacagagccgggggcctctcctaagcttagaggtaggagaagagcaaggaggaggcggtgaagaagatgaggtaggaagaaaactccaaggaagggaagttgccatctggtcctcaacagcccccacaccccatcagcaccaaggtcaccccctcctcagcagcccctgactcttgacactccagctcttgccaagtaactgcaacagcctcggaacttgcggttcacccagctggctctccctgccgccttctggagccatcttggtaaaatgcaaatctgaagccacaactccccattacacattcagggttagaaagcacgtccatagaccaggcgtggtggctcatgcctgtaatcccagcactttgggaggccgaggcaggcagatcacctgaggtcaagagtttgagaccagcctggccaacgtggcaaaaccccatccctactaaaaatacaaaaaaaattagctgggcgtggtggcacatgcctgtagtcccagctacttgggaggctgaggcaggagaattgcttgaacccagaaggcagaggttgcagtgagccaagattgcaccactacactccaagcctgggcaacagagtgagactccatcaagaaaggaaggaaggaagaaaggaaggaagaaagggagggaggaaaggagggagggagggaaaggaaaggaaaggaaaggaaaggaaaggaaagaaagaaagaaagaaagaaagaaagaaagaaagaaagaaagaaagaaagaaagaaagaaggaaggaaggaaggaaagaaaagaaagaaagaaaaagaaaagaaggaaggaaggaagggaaggaaggaaggaaggagaaagggagggaggaagggaggaaggaaggaagggagggagtccatagcctggggaccaagctctccatggcctgggtcctgcacacatcaaaatggacacctgtaacattccccgctcatcacacaggtgcacatgaaggaacacacgccctcacaccccaggagcagcacaggagcccgcactgtggcaggccaggtctccccaacaactgtttcagtactgactgagtggttaatttaaatattaaaagccagtgcccttatacaaaggctgggatgtaacaaaagcccaccaagagttttgcccaggcctttcctgggccttaaatcacgacaaaataatgaaggaattcttaacaggaccatttagaattaagcaagttttattttgggtctgaagaaactccccaggcctccacaaacaaatttattggcggtctgaaggaactcctcaaacctccatgatttagcaggagataacaggaatcaccccagcacctggacccatttagataagtaaatttactgaggttccagaggaagagcttcgggactcagaccttagtcatggattaaaagaaattaatcacttatgtcttcagatgaatgcacacttacacatagacgtatagcttagaaggtgtataagctctggaaaactttgtaactttgagttagtcgggtgataatttccacgccttctccctgtaaacggttacagaaataaaaactctcttcctccccagtttgtgtgcatctcgttattgggccacaagaagtagcagcccgaccctcagtttggtctgggaacagtaccacaagccattctcccctccctccttcctggatggaaagctcacaccccacacctgagcctcaaagtgccagatcacagtttcccagcttctgtggcttctggaaataccctcctcccatagaaagaaagagaaaggccaggtaggttcctcacacatgtaatcccagcattttgaatgccaaggagggaggatggcttgagcccaggaattggagaccagcctaggcaacatagcaagaccccatctctacaattttttttttttaattaaccaggcttggtggcaagcacctggagtcccagctacccaggaggctgaggcagaaggattgcttgagcccaggacgtagaggctgcagtgagctaggattgtatcactgcactccagcctggaaacagagcaagacccctctcaaaaaaataaaattaaaattacaaatataaaggacaaaagggnnnnnnnnnnnnnnnnnnnnnnnnnnnnnnnnnnnnnnnnnnnnnnnnnnnnnnnnnnnnnnnnnnnnnnnnnnnnnnnnnnnnnnnnnnnnnnnnnnnnnnnnnnnnnnnnnnnnnnnnnnnnnnnnnnnnnnnnnnnnnnnnnnnnnnnnnnnnnnnnnnnnnnnnnnnnnnnnnnnnnnnnnnnnnnnnnnnnnnnnnnnnnnnnnnnnnnnnnnnnnnnnnnnnnnnnnnnnnnnnnnnnnnnnnnnnnnnnnnnnnnnnnnnnnnnnnnnnnnnnnnnnnnnnnnnnnnnnnnnnnnnnnnnnnnnnnnnnnnnnnnnnnnnnnnnnnnnnnnnnnnnnnnnnnnnnnnnnnnnnnnnnnnnnnnnnnnnnnnnnnnnnnnnnnnnnnnnnnnnnnnnnnnnnnnnnnnnnnnnnnnnnnnnnnnnnnnnnnnnnnnnnnnnnnnnnnnnnnnnnnnnnnnnnnnnnnnnnnnnnnnnnnnnnnnnnnnnnnnnnnnnnnnnnnnnnnnnnnnnnnnnnnnnnnnnnnnnnnnnnnnnnnnnnnnnnnnnnnnnnnnnnnnnnnnnnnnnnnnnnnnnnnnnnnnnnnnnnnnnnnnnnnnnnnnnnnnnnnnnnnnnnnnnnnnnnnnnnnnnnnnnnnnnnnnnnnnnnnnnnnnnnnnnnnnnnnnnnnnnnnnnnnnnnnnnnnnnnnnnnnnnnnnnnnnnnnnnnnnnnnnnnnnnnnnnnnnnnnnnnnnnnnnnnnnnnnnnnnnnnnnnnnnnnnnnnnnnnnnnnnnnnnnnnnnnnnnnnnnnnnnnnnnnnnnnnnnnnnnnnnnnnnnnnnnnnnnnnnnnnnnnnnnnnnnnnnnnnnnnnnnnnnnnnnnnnnnnnnnnnnnnnnnnnnnnnnnnnnnnnnnnnnnnnnnnnnnnnnnnnnnnnnnnnnnnnnnnnnnnnnnnnnnnnnnnnnnnnnnnnnnnnnnnnnnnnnnnnnnnnnnnnnnnnnnnnnnnnnnnnnnnnnnnnnnnnnnnnnnnnnnnnnnnnnnnnnnnnnnnnnnnnnnnnnnnnnnnnnnnnnnnnnnnnnnnnnnnnnnnnnnnnnnnnnnnnnnnnnnnnnnnnnnnnnnnnnnnnnnnnnnnnnnnnnnnnnnnnnnnnnnnnnnnnnnnnnnnnnnnnnnnnnnnnnnnnnnnnnnnnnnnnnnnnnnnnnnnnnnnnnnnnnnnnnnnnnnnnnnnnnnnnnnnnnnnnnnnnnnnnnnnnnnnnnnnnnnnnnnnnnnnnnnnnnnnnnnnnnnnnnnnnnnnnnnnnnnnnnnnnnnnnnnnnnnnnnnnnnnnnnnnnnnnnnnnnnnnnnnnnnnnnnnnnnnnnnnnnnnnnnnnnnnnnnnnnnnnnnnnnnnnnnnnnnnnnnnnnnnnnnnnnnnnnnnnnnnnnnnnnnnnnnnnnnnnnnnnnnnnnnnnnnnnnnnnnnnnnnnnnnnnnnnnnnnnnnnnnnnnnnnnnnnnnnnnnnnnnnnnnnnnnnnnnnnnnnnnnnnnnnnnnnnnnnnnnnnnnnnnnnnnnnnnnnnnnnnnnnnnnnnnnnnnnnnnnnnnnnnnnnnnnnnnnnnnnnnnnnnnnnnnnnnnnnnnnnnnnnnnnnnnnnnnnnnnnnnnnnnnnnnnnnnnnnnnnnnnnnnnnnnnnnnnnnnnnnnnnnnnnnnnnnnnnnnnnnnnnnnnnnnnnnnnnnnnnnnnnnnnnnnnnnnnnnnnnnnnnnnnnnnnnnnnnnnnnnnnnnnnnnnnnnnnnnnnnnnnnnnnnnnnnnnnnnnnnnnnnnnnnnnnnnnnnnnnnnnnnnnnnnnnnnnnnnnnnnnnnnnnnnnnnnnnnnnnnnnnnnnnnnnnnnnnnnnnnnnnnnnnnnnnnnnnnnnnnnnnnnnnnnnnnnnnnnnnnnnnnnnnnnnnnnnnnnnnnnnnnnnnnnnnnnnnnnnnnnnnnnnnnnnnnnnnnnnnnnnnnnnnnnnnnnnnnnnnnnnnnnnnnnnnnnnnnnnnnnnnnnnnnnnnnnnnnnnnnnnnnnnnnnnnnnnnnnnnnnnnnnnnnnnnnnnnnnnnnnnnnnnnnnnnnnnnnnnnnnnnnnnnnnnnnnnnnnnnnnnnnnnnnnnnnnnnnnnnnnnnnnnnnnnnnnnnnnnnnnnnnnnnnnnnnnnnnnnnnnnnnnnnnnnnnnnnnnnnnnnnnnnnnnnnnnnnnnnnnnnnnnnnnnnnnnnnnnnnnnnnnnnnnnnnnnnnnnnnnnnnnnnnnnnnnnnnnnnnnnnnnnnnnnnnnnnnnnnnnnnnnnnnnnnnnnnnnnnnnnnnnnnnnnnnnnnnnnnnnnnnnnnnnnnnnnnnnnnnnnnnnnnnnnnnnnnnnnnnnnnnnnnnnnnnnnnnnnnnnnnnnnnnnnnnnnnnnnnnnnnnnnnnnnnnnnnnnnnnnnnnnnnnnnnnnnnnnnnnnnnnnnnnnnnnnnnnnnnnnnnnnnnnnnnnnnnnnnnnnnnnnnnnnnnnnnnnnnnnnnnnnnnnnnnnnnnnnnnnnnnnnnnnnnnnnnnnnnnnnnnnnnnnnnnnnnnnnnnnnnnnnnnnnnnnnnnnnnnnnnnnnnnnnnnnnnnnnnnnnnnnnnnnnnnnnnnnnnnnnnnnnnnnnnnnnnnnnnnnnnnnnnnnnnnnnnnnnnnnnnnnnnnnnnnnnnnnnnnnnnnnnnnnnnnnnnnnnnnnnnnnnnnnnnnnnnnnnnnnnnnnnnnnnnnnnnnnnnnnnnnnnnnnnnnnnnnnnnnnnnnnnnnnnnnnnnnnnnnnnnnnnnnnnnnnnnnnnnnnnnnnnnnnnnnnnnnnnnnnnnnnnnnnnnnnnnnnnnnnnnnnnnnnnnnnnnnnnnnnnnnnnnnnnnnnnnnnnnnnnnnnnnnnnnnnnnnnnnnnnnnnnnnnnnnnnnnnnnnnnnnnnnnnnnnnnnnnnnnnnnnnnnnnnnnnnnnnnnnnnnnnnnnnnnnnnnnnnnnnnnnnnnnnnnnnnnnnnnnnnnnnnnnnnnnnnnnnnnnnnnnnnnnnnnnnnnnnnnnnnnnnnnnnnnnnnnnnnnnnnnnnnnnnnnnnnnnnnnnnnnnnnnnnnnnnnnnnnnnnnnnnnnnnnnnnnnnnnnnnnnnnnnnnnnnnnnnnnnnnnnnnnnnnnnnnnnnnnnnnnnnnnnnnnnnnnnnnnnnnnnnnnnnnnnnnnnnnnnnnnnnnnnnnnnnnnnnnnnnnnnnnnnnnnnnnnnnnnnnnnnnnnnnnnnnnnnnnnnnnnnnnnnnnnnnnnnnnnnnnnnnnnnnnnnnnnnnnnnnnnnnnnnnnnnnnnnnnnnnnnnnnnnnnnnnnnnnnnnnnnnnnnnnnnnnnnnnnnnnnnnnnnnnnnnnnnnnnnnnnnnnnnnnnnnnnnnnnnnnnnnnnnnnnnnnnnnnnnnnnnnnnnnnnnnnnnnnnnnnnnnnnnnnnnnnnnnnnnnnnnnnnnnnnnnnnnnnnnnnnnnnnnnnnnnnnnnnnnnnnnnnnnnnnnnnnnnnnnnnnnnnnnnnnnnnnnnnnnnnnnnnnnnnnnnnnnnnnnnnnnnnnnnnnnnnnnnnnnnnnnnnnnnnnnnnnnnnnnnnnnnnnnnnnnnnnnnnnnnnnnnnnnnnnnnnnnnnnnnnnnnnnnnnnnnnnnnnnnnnnnnnnnnnnnnnnnnnnnnnnnnnnnnnnnnnnnnnnnnnnnnnnnnnnnnnnnnnnnnnnnnnnnnnnnnnnnnnnnnnnnnnnnnnnnnnnnnnnnnnnnnnnnnnnnnnnnnnnnnnnnnnnnnnnnnnnnnnnnnnnnnnnnnnnnnnnnnnnnnnnnnnnnnnnnnnnnnnnnnnnnnnnnnnnnnnnnnnnnnnnnnnnnnnnnnnnnnnnnnnnnnnnnnnnnnnnnnnnnnnnnnnnnnnnnnnnnnnnnnnnnnnnnnnnnnnnnnnnnnnnnnnnnnnnnnnnnnnnnnnnnnnnnnnnnnnnnnnnnnnnnnnnnnnnnnnnnnnnnnnnnnnnnnnnnnnnnnnnnnnnnnnnnnnnnnnnnnnnnnnnnnnnnnnnnnnnnnnnnnnnnnnnnnnnnnnnnnnnnnnnnnnnnnnnnnnnnnnnnnnnnnnnnnnnnnnnnnnnnnnnnnnnnnnnnnnnnnnnnnnnnnnnnnnnnnnnnnnnnnnnnnnnnnnnnnnnnnnnnnnnnnnnnnnnnnnnnnnnnnnnnnnnnnnnnnnnnnnnnnnnnnnnnnnnnnnnnnnnnnnnnnnnnnnnnnnnnnnnnnnnnnnnnnnnnnnnnnnnnnnnnnnnnnnnnnnnnnnnnnnnnnnnnnnnnnnnnnnnnnnnnnnnnnnnnnnnnnnnnnnnnnnnnnnnnnnnnnnnnnnnnnnnnnnnnnnnnnnnnnnnnnnnnnnnnnnnnnnnnnnnnnnnnnnnnnnnnnnnnnnnnnnnnnnnnnnnnnnnnnnnnnnnnnnnnnnnnnnnnnnnnnnnnnnnnnnnnnnnnnnnnnnnnnnnnnnnnnnnnnnnnnnnnnnnnnnnnnnnnnnnnnnnnnnnnnnnnnnnnnnnnnnnnnnnnnnnnnnnnnnnnnnnnnnnnnnnnnnnnnnnnnnnnnnnnnnnnnnnnnnnnnnnnnnnnnnnnnnnnnnnnnnnnnnnnnnnnnnnnnnnnnnnnnnnnnnnnnnnnnnnnnnnnnnnnnnnnnnnnnnnnnnnnnnnnnnnnnnnnnnnnnnnnnnnnnnnnnnnnnnnnnnnnnnnnnnnnnnnnnnnnnnnnnnnnnnnnnnnnnnnnnnnnnnnnnnnnnnnnnnnnnnnnnnnnnnnnnnnnnnnnnnnnnnnnnnnnnnnnnnnnnnnnnnnnnnnnnnnnnnnnnnnnnnnnnnnnnnnnnnnnnnnnnnnnnnnnnnnnnnnnnnnnnnnnnnnnnnnnnnnnnnnnnnnnnnnnnnnnnnnnnnnnnnnnnnnnnnnnnnnnnnnnnnnnnnnnnnnnnnnnnnnnnnnnnnnnnnnnnnnnnnnnnnnnnnnnnnnnnnnnnnnnnnnnnnnnnnnnnnnnnnnnnnnnnnnnnnnnnnnnnnnnnnntgaccttgggtagaggtcatgactgcgcagaggagtgggtgatcttcagagatgtttagggggtagaagtgtcgaagtgtcagagatgtttgaaccagagcaactccatcttgaatagcggctgagtaaaataagactgagacctactggactgcattcccagatggtgaaggcattctttttttatgagatggggtctcgctctgtcacccagactggagtgcagtgggacggtcggactgccagcgccttcctttgactggctattttctctcagcggaaagccaatcattgcgggcaggcagtgagggtgtggccagggtcgcaacacaggccccgccccgagtcctgttgcccacacgccccaggcgcgctggattggcggtgagttctgactccggcctccttcgagaccgtttcgctccggatgtcgcccacctccgaccctctctcagtcggagggcggaaaagaggaagataggtccttcctccagccgcggggcacccccttctcccaccttgcccttcccccagccctgcagccccagagtgtaaatatccaagcccgccctctctgcgctcagtgtccccatctgggataggggccgggataggggtcgcgctggcaggaggcctggcagcctcctctgaagggggaggagggaagggggaaaggaggggatgggcgattgaggtggacctcgagacagggcaacggtgtccccacaggagcatggcccaggaggagggtgggagcctgcccgaggtgcgggcgcgggtcagggccgcgcatggcatccccgacctggcccaaaagctccatttctatgaccgctgggctccggactacgaccaggtaaactcatttggggccttgcctccactagaccagcctccatttttctacctgtaaagtggggaatcagccttgcacccgggggcggctgtgaggacgaagtgaggcctggctaagaaccctacagtcctgccccttccagaacccgccccacagctctggattggcagccccatcaggggccatgacctcctgaggggggctgcctggaggaggtgctattgagaagtcactgtggggccgggcgcggtggctcacaagccgtaatcctaagccctttgggaggccgaggcgggcggatcacctgaggtcaggagttcgagaccagcctggccagcatggtgcaaccctgactctactaaaaatacaaaaattagccaggcccacgtggtggcaggcgcctggtaatcccagctaccctggaggctgatgcaggagaattgcctgaatccgggacacagaggttgcagtgagccaagatctcttcactgcactccagcccgagtgacagagggagactctgtctcaaaaaaaaaaaaaaaaaaaagtcatgtggactcagcagagagagccgcttggccaggagagaaggtccctggagggctgagtctactgtacagtgggctgggggctaactctccagtcctggccctttagcaatgggaagcacctcatgcctgggcgtcccctcacgctagcccgagccaggcttgatccccaacacacacagcttagcctggcagactctgagaccaccccataagggagatcccccaaacactggggcaccggtgttgtaggcccggcactctttccccaggatgtggccaccctgctgtaccgtgcgccccgcctcgcagtggactgcctcacacaagcccttccaggcccgccccacagtgccctgatcctggacgtggcctgtggcacaggcctagtggctgccgaggtgaggctcttccagatcccctgcctactccttagccccgcacttcctcaaatctcctactgcccctggccccagaaccctgccccacacctcagactcactgtttcaaatgcatgagacaggaccaggcatactgtggctcacactttgggaggccgaggcaggaggacagcttggggccaggagtttgaggtcagcctgggcaacatagcaagacccctgtctctacaaacaaatttaaaaattagccaggcagggtggtgcacgcctgtagtcccagctacatgggaggctgaggtgggaggatcacttgagcccggaagttcaaggctgcagtgagctatgatcacgccactgcactccagtttgggcgacagagagagaccttgtctcaaaaatttaaaaaaagcaaatgcatgggccacattcagtgcagagtccactgccctgccaaggtgcagggacccagccgggaagtggcaggtgtgatccatgactgagtctcccacccctaccccagctgcgggctccaggcttcctccagctgcatggggtggatgggagcccagggatgctggaacaggcccgggcccccggcctctatcagcgcctcagcctctgcaccctgggccaggagcctctgcccagcccggaaggtactttctctcccacctccacaccccgaggcccaccctcatgaagccctttcccttgctgatcctccatccctctcccacactaagctcccagtccctcactcaaccctgcaccccacgatctgactgcagcccagaactgggccatacttaccttatcctctaggggacctgggtcctgcagatgcgggtagtagcctcgtcccacccctagggtggtctgaggccacaccatagacaaagtaccttccaagcatcacaccatgtccccacccccccccacacacacacagggaccttcgacgcggtgctgatagtcggtgccctcagtgacggccaggtgccctgcaatgcgatacctgagctacatgtcaccaagccaggtgaggagcagcccagccaaccacccccaacccccgtcaccatataccttcccctgtgcatagtgcagacacaggccccagagcccctcaggctaagcgaggggcagcgtcctgcccagcgtcacacacagcctagcctaacatcccagccaccaacagcagacccaggcaaacaggccgggcagacaggtggccagctcggctcttatccatggacaaccaggagcaactccaccctcctctgcagcctccttttcccagtctgggagtcaggtggtataaatgctacaatccagtccccgtaggactgcagtgagaatcaggtgaaatcctgtctctaaggtttttgctttggtcctgacccacagtgagggctcagttctgttccttcctctcactgcttcctcactcattcatagactgcctttggagcatctctttctctttcctggtctcagtcttctcatctgggaaatggggctgctcaggggagatgagagctgtgagcaccgtttgtaaactttgcacattgcgctgcccgggcaggtgtgtttcccgtctcctgctgtgttcttgctcagcgctttgctctgctctgggcagagggctcagaccctgccctctgggccttgatctccaacccactggggcccaggaaggggccagagagcacagggcctggtcagaggtggccccacgagagccgtgagtgctcactgctcccagaatttatttatttatttaatttgagacagagtcttggctctgtcaccaaggctggagtacagtggcacaatctcagttcactgcaaccttcacctcccaggttcaagagattctcctgcctcaggctcccaagtagctgggattacaggagcccaccaccacacccagctaatttttgtatttttaatagagatggggtttcatcatgttggccaggctggtcttgaactcctgacctcaagtgatcgcccgccttggcctctcacagtgctgggattataggcatgagccactgtgcctggtcctgctccatgaatgtagagaagagaggcatttccaagaccaggtgaggaatccacatggggcgcaccctaaggcagaaaggagaggggttgagcatgagaacgaggaggcgctggctggctgcaggacaggaaatcatagaggtaaaaatgcttcctctccctcccgtctctgcaccccttgccaggcccagcagagcctgtggctaagcctgggcaggtctgggcaggcatccggggagtcctgaaggctgacaaatgcagggacacggatggggtcagctggaaaggtcgaagttgggcccaagaagacaggaactttctactgggtgaagcagccaggatcggacttcctagcccaatctgtgcttgctaagcccttcagccccatcaggctgcccatgggtgacagtctcccctgctccggagcctctcctctcaccgcgctcccttctatcagcaacaccctgcttctccttaccccctcctccaggaaaccttcccagaccagtcacttgggcttccccatctctccttctcagtgcacttggggccaccctgggcacgcacactataggtgcctggacctgaggtgacaaggccattcagccggcacttactgtagggcacttcaaacacacataccagccttcctgtgatgttagataatcatcctctctgtgccagctgggaaactgaggcccagagaggtgaagggatagcccaagatccaaagcccacatgggaactttcttcctgtccattcagacacagtcacatcctccagcagaggcgtgggtgagtggtgagtggtgaggagggtgtctcctcaatccaggagaattacgtcaagaattccccaccaggcacagtagctcacccccataatcccagcactttgggaaaccgaggcaggaggatcccttgagcccaggagttcaagagcagcctggacaacatagcaagaccccatctctacaaaaaaaaaatgtttaattagccaggcgtggtggtgagcacctgtggtcccagctactcaggaggctgaggtgggaggattgcttgagctcgtgagttggaggctacagtcagctatgattgctctgctgcactccagcctaggaaatagggtgagatcctatctcaagaaagaaaaaaaagggggggtgggcaggcacagtggctcacgcttataatccccagcgggcagatcacctgaggtcaaaagttcgagaccagcctggccaacatggcaaaaccccatctctacaaaaaatacaaaatagccgggcgtggtggcacgtgcctgtaatcccagctgcaagggaggctgagacaggagaatcacttgaacccaggaggcggaggctgaagtgagccaagagcatgccattgcactccagcctgggtgacagagcaagactgggtctcaaaaaaaaagaaagaaagaaaaaggaattcccaatgtaaaagacacagaaagactgccctgggaaggaagctggaagaatttctttttcttttttttttttttttttattggaacattaattaggttttattttcactttttgtttccacagtaacatgtatgggattaggttacagtgtttatttgtccccaatcttttatttatttatttatttatttatttatttatttatttttaattgattgactttttattttttttttatttttttttaatttatttatttatttatttattttttattgataattcttgggtgtttctcacagagggggatttggcagggtcataggacaatagtggagggaaggtcagcagctaaacaagtgaacaaaggtctctggttttcctaggcagaggaccctgcggccttccgcagtgtttgtgtccctgggtacttgagattagggagtggtgatgactcttaacgagcatgctgccttcaagcatctgtttaacaaagcacatcttgcactgcccttaatccattcaaccctgagtggacacagcacatgtttcagagagcacagggttgggggtaaggtcatagatcaacaggatcccaaggcagaagaatttttcttagtacagaacaaaatgaaaagtctcccatgtctacttctttctacacagacacggcaaccatccgatttctcaatcttttccccacctttgcctgcctttctattaccacaaagccgccattgtcattcctggcccgttctcaatgagctgttgggcacacctcccagacggggtggtggccgggcagnnnnnnnnnnnnnnnnnnnnnnnnnnnnnnnnnnnnnnnnnnnnnnnnnnnnnnnnnnnnnnnnnnnnnnnnnnnnnnnnnnnnnnnnnnnnnnnnnnnnnnnnnnnnnnnnnnnnnnnnnnnnnnnnnnnnnnnnnnnnnnnnnnnnnnnnnnnnnnnnnnnnnnnnnnnnnnnnnnnnnnnnnnnnnnnnnnnnnnnnnnnnnnnnnnnnnnnnnnnnnnnnnnnnnnnnnnnnnnnnnnnnnnnnnnnnnnnnnnnnnnnnnnnnnnnnnnnnnnnnnnnnnnnnnnnnnnnnnnnnnnnnnnnnnnnnnnnnnnnnnnnnnnnnnnnnnnnnnnnnnnnnnnnnnnnnnnnnnnnnnnnnnnnnnnnnnnnnnnnnnnnnnnnnnnnnnnnnnnnnnnnnnnnnnnnnnnnnnnnnnnnnnnnnnnnnnnnnnnnnnnnnnnnnnnnnnnnnnnnnnnnnnnnnnnnnnnnnnnnnnnnnnnnnnnnnnnnnnnnnnnnnnnnnnnnnnnnnnnnnnnnnnnnnnnnnnnnnnnnnnnnnnnnnnnnnnnnnnnnnnnnnnnnnnnnnnnnnnnnnnnnnnnnnnnnnnnnnnnnnnnnnnnnnnnnnnnnnnnnnnnnnnnnnnnnnnnnnnnnnnnnnnnnnnnnnnnnnnnnnnnnnnnnnnnnnnnnnnnnnnnnnnnnnnnnnnnnnnnnnnnnnnnnnnnnnnnnnnnnnnnnnnnnnnnnnnnnnnnnnnnnnnnnnnnnnnnnnnnnnnnnnnnnnnnnnnnnnnnnnnnnnnnnnnnnnnnnnnnnnnnnnnnnnnnnnnnnnnnnnnnnnnnnnnnnnnnnnnnnnnnnnnnnnnnnnnnnnnnnnnnnnnnnnnnnnnnnnnnnnnnnnnnnnnnnnnnnnnnnnnnnnnnnnnnnnnnnnnnnnnnnnnnnnnnnnnnnnnnnnnnnnnnnnnnnnnnnnnnnnnnnnnnnnnnnnnnnnnnnnnnnnnnnnnnnnnnnnnnnnnnnnnnnnnnnnnnnnnnnnnnnnnnnnnnnnnnnnnnnnnnnnnnnnnnnnnnnnnnnnnnnnnnnnnnnnnnnnnnnnnnnnnnnnnnnnnnnnnnnnnnnnnnnnnnnnnnnnnnnnnnnnnnnnnnnnnnnnnnnnnnnnnnnnnnnnnnnnnnnnnnnnnnnnnnnnnnnnnnnnnnnnnnnnnnnnnnnnnnnnnnnnnnnnnnnnnnnnnnnnnnnnnnnnnnnnnnnnnnnnnnnnnnnnnnnnnnnnnnnnnnnnnnnnnnnnnnnnnnnnnnnnnnnnnnnnnnnnnnnnnnnnnnnnnnnnnnnnnnnnnnnnnnnnnnnnnnnnnnnnnnnnnnnnnnnnnnnnnnnnnnnnnnnnnnnnnnnnnnnnnnnnnnnnnnnnnnnnnnnnnnnnnnnnnnnnnnnnnnnnnnnnnnnnnnnnnnnnnnnnnnnnnnnnnnnnnnnnnnnnnnnnnnnnnnnnnnnnnnnnnnnnnnnnnnnnnnnnnnnnnnnnnnnnnnnnnnnnnnnnnnnnnnnnnnnnnnnnnnnnnnnnnnnnnnnnnnnnnnnnnnnnnnnnnnnnnnnnnnnnnnnnnnnnnnnnnnnnnnnnnnnnnnnnnnnnnnnnnnnnnnnnnnnnnnctgcccctcccccacctcacctacccctctcccccaggtgggctggtgtgtctgaccaccaggaccaactggtccaaccttcaatacaaggaggctctggaggccaccctggacaggctggagcaggctgggatgtgggaaggcctggtggcctggcctgtggaccgcctgtggaccgctgggagctggctacctccgagctggtggtggtatccggcatctctgccaaggatggcttcatctccggcattgtctacctgtaccgaaagtggaaggcgacccaggttgaggaagtgagatccagcccccagcccccagctggcccctgactccatgtggccttagctgggcccatctgctgggcctcctctgcctcccctgtaaaatgggacctccgaaccaaccctgcccctcagaaatgccctgcctattaaatgagctcccagaaaacagtggcatctgttcctgtgggttccagaatcgagacgtagcagggtgtggtggctcacacctgtaatcccaacaatttggaaggccaaggcaggaggatctcttgagaccacgagttcaaaaccagcctgggcaacatagtgagacccctatcttaaagaaaaattgtaaaaattaacactttgggaggccgaggcgggaggatcacttgaggtctggagttcgagaccagcctggccaacatggcgaaaccctgtttctactaaaaatacaaaaattagctgggcatggtagcacacccctgtaatcccagctagttgcgaggctgaggcaagagaattgcatgaacccaggaggcggaggttgcagtgagctgagatggtgccactgggtgacagagcgagactctgtctcaaaaaaaaaaaaattggaaaaatcagccaggtgccgtgggtgcatgccagctatttgggaggctgagacaggagaatcacttgagcctgggaggcagaggttgcagtgagcccagagcacaccactgcactccagcctgggcaacagagcaagactctgtctcaaaaaaaaaaagaaaagaaaagaaaaaaagcaagaaatgatggagaagaccccttcctggggcctccctggatccctccttccagagtgctgggtccgctcacctctaacttactgacaagaaaatgaagcctgagcaagcttggaacatgctttgcacaacagtagcagggcagagactcaaggccaaggccaagcccaagtggttgctgaggcccaagtcctgtcctggacagctcccccacccaaatttggagtccaaaatcccaagctgtaggtctgggcctgggccacacttggtttcctcatcgatcaagggatcagaatgccgagctctgggcgtggcttgaaggctgccctccaggtgaaaggcatttggtgaccctcagcacctcagggatgtgaacagggctgataataatttctccatccaagagaatgggaagacttcatgggggaggaggctgggagctgggctttcaggacgagcaggatccagaagggtggagaagggaaaagggacattccaggctggaagcagggaccggctgtgcaaaggctgggaagggggacctgtagggtgactcagcaaagaggaacagaccagcctggctgcccagacaaagctgcaacaacagcggggtgggggtggcaggtggcccatacctcggagctgggagcccacgtggggacgtccctcctggggtccccaacccttcaccggggtcccgggcatacgctgttttctgtatatgggtttaccctccaacccatatacagtggacaaggtgataccttgggggcccatttaatttcttttttaaggtgataccttggaggcccgtttcgatttttttttttttcgttaagagataaggtctcgccctgtcacccaggctggagtgcagtggtgcgatcaaagctcactgcagcctcaaactcctgggctcaagcaattcgcctacctcgacctccccaagtacagggattacaggcatgagccaccacacccagctaatttttttaactttttgtagagatggtgccactatgttccccaggctggtctcaaactcctgcctcgagcgatcctcccacctcgaccttttaaagtgctgggattgcaggtgctcactatcgcacccggcccagctccaatttttcacaattccctggatctcgtttttttttttttttttaagtgtttatgtcccggccaaaacacagtggtcctgcccctgactgaccccccccacccccgcacccaggcctccagcccttccccacccacctccacagttgaaatcagagacaataaaatttcctcctgtgcacaggtcccatttattgtagaaaataataataattacagtgatgaatagctcttcttaaattacaaaacagaaaccacaaagaaggaagaggaaaaaccccaggacttccaagggtgaagctgtcccctcctccctgccaccctcccaggctcattagtgtccttggaaggggcagaggactcagaggggatcagtctccaggggccctgggctgaagcgggtgaggcagagagtcctgaggccacagagctgggcaacctgagccgcctctctggccccctcccccaccactgcccaaacctgtttacagcaccttcgcccctcccctctaaacccgtccatccactctgcacttcccaggcaggtgggtgggcaaggcctcagccatactcctgggcgcgggtttcggtgagcaaggcacagtcccagaggtgatatcaaggcctacccgcaacagaggagatgcaggcagacagagtggggaaaatgtaaatggggacagtggccaacaccgatgcaggcagatcccaaagtcagggttaagccatcctggccagcagaagccagctccccactccaccaccacaccctgtcacttccgtccctccccaatatccagaggagggtggactctgttcttgctagcaggaggcggccttgggaagttgtccgagtgggccagagaggctgaaggctgctgccttcctgcctggctcagtctctgcccagtccccagtccccagcagccagtggcccgtggcagggccctcctggggtcacagcctgcgctgagctcagtccagggaagaacaaagcagagaggaacagagtggagccgtggcaccttacacgtagttgctggcagcagcagagcgggcagcagaatacttggcggagtaaggcttgtctgtgcggggtggacagttgcagcaaagcagccccccgccaaggagcagcaggccggaggcggcccagccgacgtagagcgaggcacccatctcccgcttctgcccggaggccaccagcggattgtagaagtcttggatgatgttgtgggccgtccaggacaccggcactatcaccataaggccggccaacaggaacaccacgcccgccacgatcatggtcttggccttggcgctttcatcctccaggcagttggtacacttgccccccaccacggacagcagcacgcccagagcagccacgatgatgctgatgatgacgagggcgcgggccgcctgcaggtcctgcggcagtgccagcagcgagtcgtacaccttgcactgcatctggccggtgctctgcaccacgcagttcatccataggccctcccagatggtctgcgaggtgacaatgttgctgccgatgaaggccgtcacgcgccacatgggcagcgcgcagcacagcatgacggccagccagcccaggacggccagcgcgatgcccattacctgtagccccatggaggccattgttcagcgtccgcgggagttgaggacctggaaggctgaggggatccggctgtgggggccgtaggattccaagcgctggggacggacttaacgttcgcagagtgcacctttgcaccgtgagtcaggagataaagccagtcctgatgcgcaagccagcaagtgtgagcagaccagttccttccagccgacagctgccagggcactctctctcggggacaggttgagcagttatatggctctggcagaggggcgggggcagagggaggggtttttgtcactggggcctcctcctgaccagtttctctggattcctgagcccaggccaacaaaggcacttttgaggccccagccctgggtccctgagtcactatccagtctcagaagaaactactctctccccttcctcaaagcccatgctgaggtcacccaggagacagacactgaatcacagcccagggacagctggatgttcacaggttaaggccagggggcaaccagacccagccaggtttgggagcctgaagaccagggtccccacaggccagtgccccctcattccaggcttaggtgggaggacagggtggggaccctgagggagagaatttgagaatgaagtcttggaaacgtccacgagaaaccccaccttgattattgtcatttcttgtccttaccagtttcatcactggcagtttcacgactgttgtgagtatgatcactcatgcatctggcctcaccagcagtctttgcggcattggccggataaagttacgcgtaggggagtgaggagccgggaggccaggactccggggtacatcacccactctcacccatccttatcacccagcttctctgcttggctagaagaggggccttggacatgatgcaccttcagccaaaaagagacagaagcctgtcccctctccacctccatggaagtttaggctggtgggctctgttcctgccgggatccagcctgcttgcccagaactgggtggggccagtcaccaacgacaaacatgaactagatcctggagacatcatcaccccagtaaatgggtgtttaccctgtggagacatacaaagccttccaataaagccagagtgggtgcaaagtcccatgagatttcaaagggaaggggaactcttccagggtggaggtggtggtgctgagggagcttgactgcaaaggggtgctgtgtggcacaactccagggggcgccggattcttggagtatgctacagaaggcattgtgaacaggtcccccagaaaagttttgcaaggcagtgggacaggctgaaggaggacgttctggtagatggtgggccaggctggacaaatgcagctcattctgggatgacagccctcaggagagatgtgcaaggcagcgaggctagtgaaggaggacattcaggcagagagaacaagggcagaggtggcaaggtggggaaaggcagctcgttctgggaacagccaggaatccagtttgaccagagactgggctggggagggagggaccaaagtaaaagggtcagaaatttctgcctggaatgtcaccaagccctggaagatagagggagggtggagggtctaggatcaggaagagcttggttcagggcagatgactgaggggacctctgggaaggggtcatcgtgggggtgattgagagtgtctagggctcatcccagccgcaccgagggagctcctcctcacccgccgtgtggtcattttgcatctctcttcccacccatgctgggagctctgcaggggccagggctccagtgtgtccctgagccgccgccattgtccagcactggtggctgtgtgtccagttctgacccagaaggatgcatagtccttgagcttcctgagggaaagtcttcaagagtgccatggtttgggttaaagcaatcagtgagtacccatgggaggtatttgagatggatctgttgaccggctaatgaagcacagggcaggctgggacaatctagcatggtccacctgtgttacagacgggaagttgaggcctggtattgtggttaactctatacacatccgtcttccctgctagcctggggctcctagaagacaggaacaatgccttctgcaacctcagtgcccagcatctggcttgatacatcacagatgctcaagaaatgtgaggagtggttgctgcggctcatgcctataatcccagcactttgggaggccaggatgggaggatcgcttaaggccaggagtttgaggctgcagtgaactataatcgcaccatttcactccagccacgggcaacagagcaagactctgtctcaaaagaaaagaaaaagaaatgtttgggccgggtgcagtggctcacacctgtaatcccagtactttcggaggccaagatgggcggatcacgaggtcaggagttaggccaacatggtgaaaccccatctctactaaaaaatacaaaaattagctgggtgtgatggcgcacgcctgtaatcacagctactcaggagactgaggcaggagaatcgctttaacctgggagatggaggttgcggtgagccgagatcgcgccattgcactccagcctgggtgatagagcgagactccatctaaaaaaaaagaaaaaaaaaagacatgtttgatgatggaaagaacgaagcattctccagtttcaaatcacactcctataccttgacccccatcataggcacacacaccaaagcaaacagagatggtttctgcccagaccacgcctccctggggctttctttacaaggctccctctacacacagagcctatgggctgaataacaccagagataagtaacatcatgattggcgataagtgctttcctggagatgacctcatcacagcctcctgccagtcagcagggcagggacttttattgccttggctcaaaggagtacactgaagcccagagaaggccagggccttgcccaggacgggtgggcactccagcatgggtgcctccttccccaggtgcctcttacctgtggtcccagccaggtagcctttaacaagctttctgagtagacacgtgacttggccagatggccagaacctgccccccccaaccccccgcccgcctcctgcccccccggcccccgccctgccacttcctgcccttgctttcttgggacacagccaagtgccacttggagaagcaggcatgggggaggggagcatgcaagccctacaacagtccacctgtggccttacagaagtgattaagaagctgtccttccctgccaggcatagccacgcgtatcgggagctgagagcagggaggggttgggggttgaggagagggcaggtacagaggctccaggcatagagcagacacagggcaggggaagaagcacagagctcacgcagggctaggggacccaggtgtgaaggagaggccagaaggatgtccttggggatcagccagtagctcagcacaagtggagctggagagagatttgttgatgctttgttgatgccaagagaccgttggctcagtcccacccacctgctgcgggaaaaacaccagcaaaggcaaggtgcttctctcctctccgctccagctcccatagccctaaggcagaggaaaacaaggaaatttacctctaggcctgcatctggccctcttcccaaagcccgaagatcttttacaggaacaccttataagacatctgccattcatcaccttggttttggggtcagagagtacagggttggcactcatttattttctttttcttctttataacatgcactgtgtgattttgtgctgacagaattggatcacgtgcttttttttgttttttgttgttgttttttgttgtttttgttgtttgttttttgttttgagacaacacgatctctgctcactgcagtctccacttcccgggttcaagcaattctcatggcttaacctcccgagtagctgggagtacaggcgcacaccactacgcccagctaatttttgtagttttagtagagacagggtttcagcatgttggccaggctggtctcaaacttccagcctcagatgatctgcccgcctcggcctcccaaagtgctgggattgcaggcgtgagccactgcgcctggccacacctgctggtttctatcaaggataaaaaccaccaaatcagctcacccatctctgcccaccccataaaccatctttccagcccaggaaccatctctgagccacagcttcctcctttgtaaaaatgaggatgttgcaccccctccaggatcaaaaacaaaaacagacgtgaaatgagatggggatgtgaaaatgcttcatgagccaaaaagctcaggacaaaagctgggaagctgtgtatccataagccatcctaccagccctgtgaccttggagaagccaattccatctctgagccccaacttcctcctttgtacaatgagaacactggggcccactccccagtctgagatacacatgaaatgagagaaggaagtaaaaatgctttgtgagccaaaaagtttaataacaagaggagggagcaaagttctggacgcaaagcagctgctgcgcagttcggatcctgatcataacaggtgggagctaggacttttcagacccctgtccccagagttccaggggcttggccaagtccccagttgttttgttttgttttgttttgttctctttttttgagacggaatgtcgctgtcacccaggctatagtgcagtggtgcaatctcggttcactgcaacctctgcctcccaggttcaagcgattctcctgcctcagcctcccgagtagctggaactacaggtgctcgccactacgcccagctaatttttgtagttttagtagagacagggtttcagcatgttggccaggctggtcccgaacttctagcctcaagtgatctgccctcctcagcctcccaaaatgctgggattgcaggcgtgagctaccccgcctggccccaagtccccagttgtaacacacacacatgcagcttgccctgagttcagctccctgggagtccctagcaaaggggcaaaaacaaagtctcccttctaaccccaagctcccgctggcatctgagccccagggccagtgatggaccactgtcctgcagccaaaaagatctctgtgagctgagcagtctagctcccagagcccgtactccacgtcttctgggaacaggaagactaaagccagggaagccagtgtatattaaattgattcctagggcggacacagtggctcacacctgtaatcccagcactttaggaagctgaggtggaaggatcacttgggccaagagttctagaccagcctggccaacatggtgaaaccccgtctatactaaaaattagctgggcatggtggcgtgtgcctgtggtcgggagctgctcgggagactgaggtgggagaatcgcttgaacccaggaggcagaggttgcagtgagctgagatcacaccactgcactccagcctgagcgacagaccaagatcctgtctcttaaaaaataaaaaacagtaggccgggcacggtggctcacgcctgtaatcccagcactttgggaggcggaggtgggcggatcacgaggtcaggagattgagaccatcctggctaacatggtgaaaccccatctctactcaaaatacaaaaaattagtcgggcatggtggtgggcacctgtagtcccagctacttgggaggctgaggcaggagaacagcgtgaacctgggaggcggagcttgcagtgagccgagatcacgccactgcactccagcctgggaggcagagtgagactccatctcaaaaaataaaaaatagtaaaggatggaatttttttctttctttaggcaacaagatcctatttctttctgaagtccttgagctcagattggagtcctggcaccaggctaaacaggagagtccctggccctcagcctgaccgcccacaccagcggaccatccaccccctcggcctggtgctgggtgatggcaggcctggctgaccagtctggcgagactggctgagcgggtgctgcccccaggttgggcaccacgtgggccgtgggtgggggcggtggccacctctggggtttcttctaaggaagagaagaaagaccatactgatgcctcctggctggagtcccagggtctggcacttctggtggcaaggatggggagaggggctgagcaaagggaggggactcggtgagagagcttagttagagagactcagaagagatgactgtgtgaaggggaggaggcttacacaggggacaggacttagaggaccgttgttaaattactttaccccaaatcggtgcatcgatttcagtttatgtctgtcagtttcaaaacgcctggccaggcatggtggctcatgcctgtaatcccagcactttgggaggctgaggcaggaggattacttgaggccaggaattcaagacctacctgggcaacatagtgagaccctttttcaaaaacaaattttttttttaattagccaggcatggtcgcatacacctgtaaatcccagctattcgggaggctgaggcaggaagatcacttaaacccaggagttggaggctacagcgagccatgatcatgcc

SEQ ID NO: 197 - DNA, 839 bp, Homo sapiens
atggcccaggaggagggtgggagcctgcccgaggtgcgggcgcgggtcagggccgcgcatggcatccccgacctggcccaaaagctccatttctatgaccgctgggctccggactacgaccaggatgtggccaccctgctgtaccgtgcgccccgcctcgcagtggactgcctcacacaagcccttccaggcccgccccacagtgccctgatcctggacgtggcctgtggcacaggcctagtggctgccgagctgcgggctccaggcttcctccagctgcatggggtggatgggagcccagggatgctggaacaggcccgggcccccggcctctatcagcgcctcagcctctgcaccctgggccaggagcctctgcccagcccggaagggaccttcgacgcggtgctgatagtcggtgccctcagtgacggccaggtgccctgcaatgcgatacctgagctacatgtcaccaagccaggaggctctggaggccaccctggacaggctggagcaggctgggatgtgggaaggcctggtggcctggcctgtggaccgcctgtggaccgctgggagctggctacctccgagctggtggtggtatccggcatctctgccaaggatggcttcatctccggcattgtctacctgtaccgaaagtggaaggcgacccaggttgaggaagtgagatccagcccccagcccccagctggcccctgactccatgtggccttagctgggcccatctgctgggcctcctctgcctcccctgtaaaatgggacctccgaaccaaccctgcccctcagaaatgccctgcctattaaatgagctcccagaaaac

SEQ ID NO: 198 - protein, 236 aa, Homo sapiens
MAQEEGGSLPEVRARVRAAHGIPDLAQKLHFYDRWAPDYDQDVATLLYRAPRLAVDCLTQALPGPPHSALILDVACGTGLVAAELRAPGFLQLHGVDGSPGMLEQARAPGQRLSLCTLGQEPLPSPEGTFDAVLIVGALSDGQVPCNAIPELHVTKPGGSGGHPGQAGAGWDVGRPGGLACGPPVDRWELATSELVVVSGISAKDGFISGIVYLYRKWKATQVEEVRSSPQPPAGP

SEQ ID NO: 199 - DNA, 43221 bp, Mus musculus
  misc_feature (1)...(43221): n = A,T,C or G
tcctggcctggcctccatctctttccactgcactttagatttgctattaatgcaaaattaaaaatgtcaacgattagcatgagttttgccattcacctttgtagtgtgaactgtcagttttagatgcaaacatcagagaccatccctcatgggtggagccacaaatcctgcacaatttgtattttgtgattcctcctggggaccaaggatgggttcagactggccagaatgacagacacagtggacagaagatgacaggagggtaatgggagggagagtccggcgcctggcagttagttcattatcagcctacttaaacacagtacaaatttgggacaatgtttctaggcaacaatccttccattccaggtgcatgataaagcttaaggtgtgaccacagaaaaactcctttgcaaagtacgtgtgaccacgagggtaggccttagagcttatgggcctaaggatctgatgtggcctcgctgacaaagatagcagaggggtcagcaggccctaaagtgtatacgatatctcccctaaggatgggttctgttgactgagaggtaaagataaaggcccagggagggagaatgtgagatagaccttctgggggatttgggtgaggtctgcccaggtgaccaggtcattgacaacttcttgaagctttctgggcagaaaactggtcttcacttcctcctctgaggagacaccctttcatgactaacattcctggtttccctagtgagctgtgggcataaggacctttgtgtccccgacaatccaggagtataaaggggccgggtcttggcaggtaggtgatcacttctgtgtggccctggctgtgctgagtggtccagtatagaaggcggcctgccctcaacgggagcctactcctgtcacacacacaggggtgcaggagctgggtgcagatactggagcttggtcttgggtactagaactaagtatagcagctgactgctagagccaagagcctcaaaagagcagaatagggggagggggaccggaaggggagcagcagcaatctggatgtgaaatgaataaataaattaattaatggagaaaaaaatccataatattggaaacagagagagagagagagagagagagagagagagagagagagaatagagaatacttaggaaatttacaagctaccttttaaacttttagcaacttgaaactaggaaactagtcacagtggctggctgggtgcccggggaatcatcaggcgctgctgcgtaaactgaagcccccatggagggaggagctacagaattccctaaggctaaatgattggcttaaacttcatgatcacagggttagaatagcacaaattcaaagccagatttcctttaaaaagtcgttcatgggccaggcgtggtggtgcacttttatccagcactcgggaggcagaggcaggcggatcttggagagaccagcctggtctacaaagtgagttccaggacagccagggctatacagagaaacgctgtctcgaaacaaagaaagaaacaaacaaaaaacccaaaataacaacaaacctactaccttccactaaccaaaaccaagcacacattaggcagcatctgagacctgtaacagcatgtgtgtgtgtgtatatgtgtgtgtgtgtgtgcgcgcgtgtgtgctttattataaacctgcctacctgtgtttccacttgtgtacttggtgaatgtcttgattaatgacttcctttgttttgcagctaataaactctcatgtaacagctcccacagtgcttactatcctgggccatacccactcacatttggctcaaaataaaccgttctagtccctttgaggggagaggtgtgctttggccagcactcgacacctgcacggtatgtgtttttcttccagagtgggcttgtcagcgatatccatgagagtgctccagctactagcatcaccaccaggaagcagccggagaccgcagactgcgtgcaaaccatgtgcttcctaggacacctccaggtcagtcagaccctccagggagcccctgccttctgtctggcagagagccagaagaaagagactggcccagcctcacgacatgatatggacacctgtggggacttctcagctctctcctcgggccgtttgctccatctcttgatacattcattgtacaggtgaggccagtgactcttagcaggacagccacctgccaggcacagctgactccatagctcaagctccctccatgggtcacatgcctgagggtacatagaggaggaagcaggtaacacttcatagaggagggcccggcccgggcagcactgggaaaggcttcccaggggtggcgacttttgatcaagtcttgaaggaagaatagttttgtttgccatttgaagggcaaagtcgggagaaggctctgcagttaggagaaatagaccaggaggactgagaaaacacagaagggaggagagagggggagagggaggggaggggnnnnnnnnnnnnnnnnnnnnnnnnnnnnnnnnnnnnnnnnnnnnnnnnnnnnnnnnnnnnnnnnnnnnnnnnnnnnnnnnnnnnnnnnnnnnnnnnnnnnnnnnnnnnnnnnnnnnnnnnnnnnnnnnnnnnnnnnnnnnnnnnnnnnnnnnnnnnnnnnnnnnnnnnnnnnnnnnnnnnnnnnnnnnnnnnnnnnnnnnnnnnnnnnnnnnnnnnnnnnnnnnnnnnnnnnnnnnnnnnnnnnnnnnnnnnnnnnnnnnnnnnnnnnnnnnnnnnnnnnnnnnnnnnnnnnnnnnnnnnnnnnnnnnnnnnnnnnnnnnnnnnnnnggggttggggcaggcagtgcagaaccactcaactgcagcttgtgggtgtcaggaatcaaaagagaaaaaagagtatgggatttcaatacgaagtttctagaaaaccaggctaaaagacttggtatttatcctaccaggtccaatctgtggcccctgctaagaaaaccaccctgatatagaatcataaatttacttagaacactgtcagggtgtgaggagagtttctgttagtaaggtggttatcatgcaagtgtgaggtcccgagttcaatccccaacaccttataaagagctacgtatgtcagttcttacctgtcattcagggctggtgagacaggaaccagaagctgtctggagctgcctggctggccagtctaggcagatcagtgaactccaggctcagggagagagttcgtctcaaaaaatgaggtggaggtctgaagagacggcttatggaataaggacacttgcagccaagcccaaagatctgagttcaaaccccaggaccccatggtgggaggagagagccaactcctctatacactcacctatctccacacataaaataataaaataataaataaataaataaagtttttgagaaattgatgaagacccctgaagtcaaccatgtgaacacacaaacacaaaaaagttttttgttttttgttttttttttagccatttttgctctgtaacttgaatgtgtagttcttgagcacaaactctgaaactacagccctgacgcagtggcctggggactttgcaaatgtggagagttcctagaaatcaggctgtagatctagggagagagcatgcaaggtctcagaggccttccgtcctgtgctgccgccagccatctgtggagaaggcgtgggctgtgagatcattctagctgggcttggtcgtgcacacttagtagtgctagaaagacagaggcaggaggatctgtgtgagttcaaggctagcctggtctacatagagagttccaggacaaccagtgttacgtaaagagacccactttcaaaacaaaaccagaaacaacaaccaaaaaatgaaacaaaaacaaaaacaaaaaaaggaaagaaagaaagaatgcttccaatttatcgtagatggatttttttttaaaactttattttctgtgcatttggtgttttgcctgtatctgtgtctatatgagaatgtcagatcttggagttacagatgattgtgagctgccatgtggatgctggaatttgaacctgggtcctctggattcaaattccagccccatagatggatatttttttaaaatacaaggaaaattaattgggggggagaaccccccccagcttaatgtctttattatgagatttggtatgcatcaaatcctccccacctgttcannnnnnnnnnnnnnnnnnnnccccccccccgcacccttcccccctccggctcgattctcaggtgtacagggctctcctgatcagagccatgtgcttagaacagcttccttagcctaggcaaagaccatgctcagaggaggcaggtggcctgcccaaggtcacacagctggtgacagctggtgagggagggggctgaaccccaaagccttgctgagcctctggaggcctgaaccttgctttttctcttcctcttttgcagaaggtcaagggccctgcagatggcaagggctggtgtgtgtctgtgtgtgtgtgtgtgtgtgtgtgtgtgtgtgtgtgtgtgtgtgtgtgtgatgtggtctgggtttgtggaatgaggtgtatgtgtgtggtatgtgtggtgtgtatgtatggggtgtgtgtgtgcatgtgtggcaagggcagggtgtgtggtatgtggcatgtgtgtgtggtgtgtgggtaggtgttggagccaatttaagacaagccaggacctgcttgctcagtgttcttctgtaagggggtggcagaggcaggcagcctctggtctcctgacaccagccagtgctcagaggcctccagggaggggcagagaaggagggcaggaagaggcaggggactcatcagtggctggcaattacacagtgctttgtcattcttaattagctcagtggctctgcagactgctatctcccagggctatccacactggtctggaaggagatggctgcagggttcactggggacagcaggcggggtgggcaggactccttggaagcacctctctagatcccccagaccctgacgttcctccagcggcagagagcccccatctatgagatacatcggagactagaaaaacaggaagcatgcccttggctggattctgggcacctcctgctgctccctggcagctccacaggaccctgggaacatgaggacttccagtctcctactggagacctgctcaactgttgttgggaactgcccacaggctcagagtcactacaaacttaagatggccactgggctgttggctgggcactttcttcacgccaggcactggctgaccactcacaatgcatgaaccccaaaagcctctcaaagccctcaaaggtggccctgagcccattgtacagacaggaaaactggggcatcaattagattggaagacacatacataaatggagaatttggttgcagagaccaggcatgtagaactccaaagtctgtgcatatgtgtatgtgtgtgcaagcatgtataaatgtgtatgtctacacatgtgtgcatgtgttagggtaagaaaagaggtataagtagctaaggtttgggtacggaagaggccacttagatcctgtcgcgtgagtgaggaagccaggaaagtctggaactttctagaaaagaaagcattgtaagcagggagagtgggccagatgagcaggttagcaagcaggttaaaggtcaggactgtgtaaggacctgttccttcatgactgctggctctcccatctttcagattccctcagggcggctggtctccactaaagcagcagaactctggtagtcaaggtgaggccaccctccctgctcaagactcaggctaattccagtctccagagcactccttccccaaagccacaagagccctccatttcatctccatcctccatgcggcaaggagggaggatttagtgtgcacacgggtattacacagacagctaacacagacaggcagggcacaattggtataccccacaattccatgaggtgtgattccccacttcctccatctctgtgtgtggcttagaaagagccgacatagccgggcgtggtggcgcacgtctttaatcccagcactcgggaggcagaggcagggggatttctgagttcgaggcgagcctggtctacaaagtgagtgccaggacagccagggctacacagagaaaccctgtcttgaaaaaccaaaaaaaaaaaaaaaaagaaagagctgacatgttcctcacagatctgtgaggtgcatgtcaccttcaggatccaaggccaagtgcgggtgactcccacctcctgcctaccaacctcaggtgctgccctccgtgggctctccaaggcagaggaggcctttgcaactcacaccatgtgccagagctgtcaccaggacactcactttcctgcagggagagtctgtcttctaaaactgcctgttgtaggatcccggggagacctaaatgtctgacccgaggcaccagtttgacacttttgaggaaactgaggcccaaggtatttaaaggttgtttttgctgaaggttaagctcatgccagcctcttccagactaacctgctctgtggcagaggagcagcaggaggaggctgactcagggaagcaagaacattaaagttcttattacattttacttattcattttcctggggggcagcgtgtgggcatagcgatcagaggacagctttgaaaagtgaactcctttcttctactctgtgggttctagggattggcccaggctttggctcctcagccaggctccctgcttctctctcagtctctatacagagaggctaatggtccagccggcttgtctcctgctctctcaccggggtcctggagaaaactcaggaagagaagccgggcagtggtggcgcacgcctttatttccagcacttgggaggcagaggcaggaggatttctgagttcgaggccagcctggtctacagagtgagttccagaacagccggggctacacagaaaaaccttgtctcgaaaaaccaaaaaaaaaaaaaaaaaaaaccaaaaaaactcaggaggagaaaagaagaaaccatttgcctaaaaccagaagctgcccactcctgctgggatcacctttttcccacgtcatagatttttgttttgttattactaaggggctcacagtcattgtagaagtgtttgtaaaattagatcagataagagaaaaattaaaaaacaaacaggagggtcgggtcgggtgtggtggtgcttgcctttaaacccagtacttaggagacagaggcaggtagatctctgatttctgagttcgagaccagcatggtctacagagtgagttcaaggacagccagaagtacatagtgagactgtgccttaaagaatataaattaaagcaaaacaactgccacccaaagaaaaccccagaggtctggggatatagctagtaagatgcttgccctaatgtgttcgagactctgcgttcaatgcccagcaacacacatacctggcacgaggggaaagtctccgtaaattctagcacttggaggcagaaagaccaaggtcatcttcattgggttacgtagtgaatcagaagtcagtagaaagctacacactccaaacagagaaaacaaccttaaagccttgtcttgaatactgagtgtggtttccctgcccccgtcccgtagttttaagcaccccagtattacatgtgggatgctagagccctggctgctggtcctagcctgctgtgtgaccttgggcaagctcttgctcctctctgggcctttgcctcctcacctgtgaaatgaggctttgggcagagcgactcagtgttgggccccttgcagccctgaccgtctgtctctacttctctttctgggcgcagcagaagggcccccagcagtctgcccctccataggtgacacatgcctgacaactcccagcaagtcacctccggaaggacacacaaagctgctaaacagcctttgctgcccacacacagttcccaggcaggtctgattaccgggtccatatgtctcccccggccagccagacaccaccactgagctgctcctgggctcgtggccctggtgattgttttccctccaggctcaaaaaaaaaaaaatacatacatatatatatatgtatatatacatatatatatgtgtctgctggtctaggatctagctgaccccggacaagaaagctgggggtcagctgtcacctctctactcacttctgagccttctgaggggatagatgactcaccaacctggtatggtagaaacctggagaggtcaggagaaggaaagagcagccctccctgcctgctgacagccctccaactcccctcataccgttgtgtccttgaggtcatggtctctgatgcatgggggaatcacgggggacagcattataatgttccaagtttaaagcaatgggagcccatggggagaaatctaacccagagacagtggtccaggagagcttcctggagaaggtgggtggatttttgagggcaggggcaggagttatcgcctctaactccagtcacacaggacagctccatgggaaaggtcttcttgcctcctttacagctgaaacttataatggccagaccatgccccccactaggattcccactgaggcatcactctctgactcttggggaaccacaggtatgtcgtgtctcctgctgtaaaggaggctatggctggctgtactgtccactcaggcggagcacttggaacagacaggaggtttagaaagagtggaatgtgagccaggcctccttgggcagctagagcacacagcatgtgtgtctcccagccagaagagatctgctggcttctgaaactagccagaggtcacagctgcgctgctgaagcccagcttctggaagccaggtagtgaacgccagactcctttgggcacagtctgaaccaagggttagcgggttttttggttttttgttttgttttcttggtttttttttaatagttagaattctttgttatttgggttttctgagacaaagtttcactctataccccaggatgccttggaacttgcaggaatcctcctgcttcagctccatgagcgctatgattaccggtctgagccatcgctcctggctctagagttaaattaccagcttcctggggctggagcaggtgctgccttggaaacaggctagagcaaggctacacaccgagggcctgcccagacaggccggtgggtgcactacagataggatcacgcttcatttgacagatatcatgactcagagcagggaaggacagcctgggtcacacagcatgcctgagtctgcgtctaaggttgcaatgtccctgagactgtgggggcagaggacagctaagaaagctgctaagggcatctaccaatacactcccgatccttcccagcaaaattcgcggccttcattccctcgttcaaagactcccattgctttggtgcgcccctcactcatatttatttaattatttacatttattttgtgtatgtaagcaatgggggaggtgccactgttagcgccaggaggtcagaggacaatttgcaggagttgattctcttcttctaccgtgttgtctccgggatcattgtcaagcttggcggcaagtgcctttatccactcgaccctctccttcccatctatcgtttttttctttctcttatttttgaacaagacccttatcgttctacctttcactcttcccatcggtgaaacggtatccaggtgccttttagctgagctatctagaaggccatgggatcccgtagctagagaacggggaaaggcgctgggctgggagccttggtgggttctgagtttaggaacaccgcgcgtgcagcctcggagccggtccaggtccgggaagggcggggttgcgctctaggggcgtggcggtgggcgtagcccctccggccccgcccctagacgtcgcggggagggcgggggaggagcgcagcgggcgcgcgccgcctggcccggcggaaagttttcctggaggagttttggcggcggtagcggcgtcagtggcggcggcgacaaccggagcgggccatggacgcgctcaagtcggcggggcgcgcgctaatccggagccccagtctggccaagcagagctgggcgggcggccggcaccgcagtgagtgtatgcgccccgggtcgggcctccgccgagctccgggccaaggtggactgggtggcttcgtcccgccccgcgcggcggggccgggggtcatgtccggctgcacgtctggggcaggtcgacagggatcaggcttaactcggggtccccaggtgtggcgcgaaggggacgtctagagcctctctacccactccagcacaacctacagggtcccctctggacgctggagtttcgcaggtccctgcctcgaggggcgatcccagcccgggtgccattcagggtcccgcttcctcccctctggacgcgtccaggtggcgaggctggagcccaggctatttacaaaccctgttttcctccgtacttttccttgggggctggtccgagtccctgggcacctaggcaaaaggcagactcagactcgctgccatttctcccgggagtctggaagggtggagaggagcctcccccagccacctctcgggttactttcggagagccgtcacctggcaccctcccccgaggcctgagaaacctagcttaggtccctcctcccttttcattcgcgtgggatgatcacccaggccttccctttctgatgtgaagccaaagtacccgggctcgcggcacaccctcacctgccacctacctggggccccccacctctcccactaacagtaccccctccccgcccccagcttctcgtcagcaccttcccttgccgggctccaccaggggagcccgagtttcctagtccctggagcgccagcgtgtctgggcctcgggagcccgccctgcccctcctcattcccactgtggtgttccagttgtgggctcctcctagccctgactggcatcgggaacgcgtgctggtgcctactggcgggggtggggtcagaggccccttgggcagggcatgtactgacttccacacttaactaccaaaatagcccttcaaaaattcgtgggatgtgaccagggcttctgagtgtgaccttctcttccagtggacgaaccctgtggtttttctactgggacaagagagagaagggtgggtggggaagaggtctgaaggggagggagccaggaagcaggggatgaatctagggcatcagggtacattttggatggtgagaagtttcccttccagctccagccttaaggccgatcacttgttcttagtgattctgtttcctatcctggaaaatagggataaaattcctgcggggctggggatgtgtgtgttgtgtttggtaggatgcttgccttagcttgcaggaagcccgtggtactttaagttcttggttccagtatcggcactaaacaaatcaggtgtagcggttcgtgtctgtactcccagaactagggagttggaagcctacaaatcagaagttcacagtcatgaggtgtcagatagtgagtttaaatgaggctggtcagggataggtgtcagttaagatgttgctagtctattttacaggttggtgatgaggtctcttgttgtctaggctggcctaggacttgctgtgtagaccaggtgtgctttgagcctctgatcccccagtgctgggattaaaggtgtgcaccgccatatagttatgtccatgtcctctggattcaacctgattcttatcaggttggccagttctgagatgggggcctcagcctgtctgtaccctggagggatgcagcgctctcctctctccctgctcctcccaaagctctgtgctcacaatgagctcctcagaaacctggcctatctttggttaagtgtcaagttcgcaatattcctttgccgggaagagtattgcttggtctggaacttttgtgggagtgtctgtgcttgtcttacttgcctagaggtggtctcagtgaatgcatgcccctgcttctgtctctggtatttgacttctgtgagctcattggctcctgggaggtgacaaagcttgggattcttatcttcagacccattttagagataggaccgggaaatgaagtcctaactctaggcctagagcatggcctgaggcagagcttccccagcccagggatcttagccttattccttgggttttctggctgttggggggcagctccaccccaggtttggctagctggcccccaggaccaggttagacaggaaagccttgggtgtggccagcatgagaggttgggacctatccagcccttgggtctagcgtttaagatcaaaggccagagcctgttagatgggaaaagggacttgttctcaggcgggaggacctgagttctagtcctgggctccatttggaggaaggagaaaaccgattcccaggaattgtgacctccacacatgcacggggactcttctccatagacataatgagtattaaaaacaaaacaaaacaaaacaaaacaaaagctcagaggacaaagcaaagatgagggattctgggtagaatcagcccctgctgagaaagagaaccctggctggagctgccaagcaccgacctgctggcttcccactcacctaggaagaggactcttctttctcatggccacttccccttatgagacagggtttcccaatgtagccctggctgccctggaactcactctgtaggccaggctggcctcaaactctgggatctccctgcctctgcctccagagatctgagaacaaaggagtgtgccaccacccccactggccaaaagatcgcatctcagctccttgccaagaatttttcccagctcagcgatattcttcctaaaggtcctgggggtcactgtgaccctcattcctttgtgggttgtgctaggctgtcagagacaacccccaaaagataaatacaaagtacctggttcagtaaagtgatggtaggtggggagctactcttatttacctgtaggcatgtaaatacccttgggcataatcctttaatcccagcaccggggaggcagaggcagaggcaggtgaatctctgagtttcagtaaagcctggtctctaagccagctgcaggacagccagagccacacaacagagataccttgtctcaaaaacaaacaaagcagaatgttgcctgtaccttacctgcgacaatgatagaggcaccgtgagtcagagtgtgtcccctgagagtgtgtagtgtgactttggttctcagttctggtggaggaagggacagggggagaaggccacagatagttggtgggggtggagccagcataaaatgctagcattaagtaagataaaatggcagtgggacagctttttcagatagcagtgactgtgctagtctaggagtagccgttgagacatgagagggtttcccaggacagctgagaagggaaggaagctgtggacagtggggcagtcctgggacctagttcagaggtgcctcaggatagagtcaacactaagctgtcttgttcctgaatggctggagcatgctgtacacagagaccagagttccctagtttaggggcaccacaggacacgaggtaacctccagcagccaggctgcagaaagaagggtgggtgctagtgtcagtgaggaagcggcctgcacagaagggatcagagaatgaggccctggtagccacctctcttgagaaggtgacctggcagacacaggtgtgtttaggggaaaaggcaagaagaacatttggctagtggaaccgcagttctgggggacattaaactagaggctcctctcggtctggttcctgagggaggaacaggatgtttgaggagttgggtcacccaatgttgacaggggtcagatgctctctttgggtgccgtggagtgcatgtgtcacccctgtcttgcactggaaggggcttggtgtttgttgggtcttggggctgctgtgtagggccctttgtttctatttcttgccagtgctgtgacatagtgacttcccataaaactccataagctgcctgcccgtgtgcgttaaagccctttgtgcttgttgggtggcagtgacagtggctggttctcatggggctcttggtttgtgccaggcagggtcctgtacaagctcgtctgccctgtgacagtgccacagagtgggtaccgttacacatttcaaagccaggaagctgaggctcaggaggccgagggactgactctcctttccttgcccaagaacacttacttttttcttccagtgtatgtagatatgaggaagccctggctggaggaacaatcagttgttcattttttcttttctttctttctttctttctttctttctttctttctttctttctttctttcttttttttttttcaagacagggtttctctgtataaccttggctgttctggaactcactttgtagaccaggctggcctcgaactcataaatccacctgcctctgcctcccaagtgctgggattaaaggtgtgcgccaccactgcccggctcagttgttcatttttaagaacaatcttggtggctttaacttctggaattggcttagtcctttttggagggggttggggtgttaagacagggtttctctgtacatatcccttgactgtcctggaatgcagacatccccttgcctctgcctcctgagtactaggattaaagcttgcatcggccacaatgcctggttcttagtccttcttgcatttggaaactctctgccatggaggtcctgaaagctccgccgaatttgtcaaaggtgaccacgttcctggcagggcagagtttaggccccctcctaggatctccctgcagcttcctagatatcctcagcaggcttgggaaccaggcccatccccaccacacctgtggattggctgcagctctgatgttcagactccagccagccaggtcttctaggcagcgaggggcaggccaggatgcccatgtagctttaactcttcttggggccttaacaaggagggagcacatggtaccagctggagctagactggacatgtggtctgtccccaactaactcccacagcgggtcatctgtaaaactgcaaaatgaaagtagcggagtcattgcccaccacgaggctgagaataactcgggcaggaatgaggcttcgggtgcaggcctgtgtttgcccaggggcccctgggagttctgcttgggaaggggtgcagccctggctccttgctgtttgcggtgtctggtggtaggagaccatactggtctgtctgtttgtctcagcactctttcttggggaagttgtggctgccagaggcctcagtgaacagcaagtcacgtgcccagaggcacaggagaggagactgtgctgcaagggacccgtgggcaagcactcagcccagaggccggtccagttcctggtcctgcagcccaaggagcagactggaaggcagggcctttgaagaaaggcaggcagagaccgctgctgggtggtgggtgatgcagcaacagcaacaaccaggattgggagagcctgcatagacctgccccaggcctggcctcagccacctaccttgtctagttatttcacccgcagtttaaacagccccgtgggtcccggaaggttaagttgctgtctctgttttattttatccttgagacagtcttactatgtagccctagctagcctgcagctatgtcactatgtagatcaggctagcctcaaacccacctattaggatttggggccaccacaccctccctttaatcaattaattttttttttttttagatttttttttaattattttttagtgttgtgtgtatgtgtgcatgcacatgagtgcaggttcccacagaagccagagagaggtattggatctgcctcaggctggagttagaaggaggtgtgagctctaaccagacccagtcatggtcatggtcatcgtgttcgtcatcatcatcatcatcatcgctcttaactgagtcatctctcagcccccatttcttttttccttcctttttcttttttgagacagtctcatgtatgccaggctggcctctgactggctgtagagtcaaggtcgacattaaacgtctgatcctcgcgcctctccttccaagtactgattacagcatgtgcaaccacacctggtttatgcagaggtggggatggagcccaggacttcatgccttctaagcaagcattctaccaataaacaatacccgaaaattcctttcccccattttatagatgaggaaactgaggctcatggagatctcactcagggtcattccgagtatcaaactaagggcctcgaggtagcttgcctgcttcggattaggcgccctgggagaggctgggctctgcacagctctggctgtcctggaactcactatgtagatagatcaggctggcaccaaactcacagagatctgcctgcctctgctacctaagtgcctgggattaaaggtttgtttctgatactagatctcaaggcgtcatttaggctggtctctaatttagaatcctcctgcctcttcacgagattataggagggcactgcagtactgtgctccgaaggagcattctgggtattgagaaagtagatgttgcagtaggtggtgggagcttggggggtgggggaggatgtgctccaatgcgcgtatgcgtgcgtgcttggagaggagggaggcgctttcaaacacccagccatcgctgtgggcatctcttctgacttgctgtgtgatcctgcacagaacttctctgggcttcagttgtatcgtctgccaagtaaaggcttggacggagagtctctgaggcttgacctggaagtcagtgtaggagggggcggagccatagagaaaaggtcagatcagggaaggaggggagtagaaacatgtcaagcatttgaggtcgaggaggagagaatgttttgacagcgaagagatcaccagtgaccttggcaagctttggccctttggaatgaagtgagcggaagtggctttggacaggggccaggaaagggctgagccggaggaaatgggagagcgggacccagagataggggaagggtgtttgccttaaggcagggctggataatgagaaaaggccagtctcgattgattagtattgcctgcctgtggccatagttgagaaaccgggtagcattgctgtctattagcaatgtctgtgaaggacacaggcagtgggcatggatgggtctcaggttggaagtggtgggctgggtaccttatctatgaagaagtggcagtactggttagtaggaaatgcctaaggacctctctctgacctttgactaaaatggaggcattttagttagagtcctttatactccagttccccggctgtagaatgacacaaaaaacctgccaggtcatcgtccctggactgttgtttgaaatagtggctctgtgtgtcctggagatagcgccctgagccttggtttcttccagagcagggagttgttccggagtcctcattgcctgacacagaactgggggcaccacagggactctctgctcccttttggaggagctaatggattggacgttgtgttgggctttagggtcatctgagttggggctcggcctcatgtttggtgatgaggcccagagggcactgtgttgaacagagctgaggttgagggtgttcaggccatccctgtactctcagtaaacattgccagctgtgtgctgggctctgggtgagcagtcagcgaagttcctgctcacttgggtctgagaggagaggtcgtgctcgcaggcctcctcccgctcccacccacgaacatgcagtgttcgttggggggacagtgtcttgctaaacacatatcatgagctgtgagccctgtggatgaagtgacagagcccctggaccctgaggctctgggacatggccaaggaaggctacagggaatccagagggaggtcatggtggtgtccattgcgtccaggattctgcccgctcctgacagtacaggaatatcctaagcctatatcatgacctttccctcatagctggcagggaaggcaaagggcttctgtgtgggatgggcacagtcagatgagtagctcctacgggtgcagtatctgcggggtgacaggaggggccctaacagggctgtgcactcacacccagtgacatcactcccttaagtaagcttggctctacttcccgctgtgcgatgggtgcccttagcctctgttgcaaggaggaattggggcatggccaaaccttccgttggggtctaagcccccttgatctcagcaatctttcctgcatgggggccaggtgggtcccttcccaactctcccctgccctctctgtgaacccaggctcacccctctcttttggtgacatctaagcccaactcctctccttgggtctaaacacgtgtggggctgggatgtaccagcctgtgggtagctctccctgtatttgccgtggtagctgttggtccatgccttcagctcctgggcctcagtttccttatcgccttatcaaagaatcaggctgagggaggaggcaggaccatctgcccaagagcactgatgttgagtttggattcaggagatggcgtagcccgagtctctgtttgacttcctggtcttcagagccaccgtctgcggtgtgtatgacaggttgtaggtgctcctaagactgaatggggtcagtgtatgtgaagctgctaaggtgttgggtaggctgggagataccggtcaaagtgaggatgggggcaccccagggccctttgtaggcatgcggaggaggtgggcggtgagagccaggcctgctcagcagactgagggttgcctgtcctgtcctagagttgccagagaactggacggacacgcgggagacactgctggagggcatggttttcagcctcaagtaccttggtatgacgctggtggagcggcccaagggcgaggagctgtctgcagctgctgtcaagaggatcgtagctacagtgagtgcccagataccccgtgccccaccgggacagctcaccttgccccagttgtccttgtccctaggtaggatctgtgtgacatgagcctggcccaccttgagtctcctgtatccagctcatgggtatttatggggattgcctttgtatttgaggtagtcagcatccgcctttcagaccatcctggccgtggctgcttccagccttgagtccccacatcaggccctggtgactcactagccaaggagggaaggaagttgtttcccatttaccatgtctctactgcttggctgtgaagcccaacagagtgtcttctccctggctctgagggagtgtgggccctttaagtcagctccctagggcgtccttgacctgcagctcaggccctggcatgtgggtggagctgggtccccaggtcatggtgctgggctgtggcagcacctcagtgctctgtctacccttgtccctcccccgctacatgttctctggccagtccaactcttcctctgggagtccccatcttcctggacagggaggtgtaaggcccctcctgtgagggccagtgctccccagacatcagctgggagtgggcagtgattgtccctgtgtgtctcgggagggtggtcctggtttgttttctgctactgtgctgcccagacaagagttgggtagggggctggagaggtggctcagcggatgagagcactgactgctcttccaaaggtcctgagttcaaatcccagcaaccacatggtggctcacaaccatccctaatgagatctgacgccctcttctggggtttctgaagacagctgcagagcacttataataaagaaataaatcttaaaaaaaattaaaaaaaaaagagttgggtaggaaagggttggtgtgtctttttttgtctgttttgtttttcgagacagggtttctctgtatagccctggctgtcctggaactcactttgtagaccaggctggcctcgaacttagaaatcctcctgcctctgcctcctgagtgctgcgattaaaggcacgcaccaccataccaggcagggttggtgtgtcttaaacttgcaccacagatcatggctgagggaattcagggcaggagctgaagtggacacttcggaggaatgaagctcactggcttgtccctcatggcctgctcagcctgctgtcttcaacaagccaggaccacctacctacccaggggcagcaccagcccccactctggagccctcccacatcatcaccagtcaaggaactcctccctcagacttgtctctacaagccagtctgatggaggtgttttcttaactgaggttccctcttcccacttgatcctagcatgtgtcaagtttacaaaagctagccagcaccaaggtgccagttgagtgtcctcctgtggcccctgccctcttctcactgccccctccccacttcccctgtcccccgtgtgcccctaggccaaggccagcgggaagaagctgcagaaggtgacactcaaggtgtcaccccgggggatcatcctgaccgacagcctcactagccagctcatcgagaacgtgtccatttacaggtaagctgtgagggactgcctcgtgtctgctctgccacttgaggggatgatcagagtgtcctatcagaaactagaccataaaactttctttctgagtcacgggaacctgaatttccttcatctgtgaaatggcctgggggcaggtcctgccttcctctgcggttaggtcggttatgttgtgccactgagaaacccacagctcacagggaggctggggtagtgggcaccgctgttccctaaccagctgatgccgtgcttagtcaggctgggagcacacggctgtgaagtctgcctggccttctgccttgaacatagtgcccagccctggttattgggttcagtgcccctgagaggcctcaggcaggatctggagcagtaatggagatgctctctccctggtccctggcggtagagtctagccccaggggcttgagactaccccacttctgtctcagctggtcaggtgtaggggtacaaaactagagggggggaggcagcccaaatccatgctatccatggagcagcctgaggctcacagagggagaggcctgagcctgcaccatgagggggaggctgagctgggatgagcaccttggctagagttctgtcttcccaggtcccagggcaggatggggcagacacgggtgtgttggagtgcttcccgagggccaggctgctgcatttaccccaccatctctctaagccaatgcttgcaagtgcctgcttagccctgtgctctgggcacatccagtccagaaaggaatggggggacggtcataggagacagtttctccccagaaagaaaataaggagggtgtgccagtggggaaccaggaaggcctcccagtggtggtggctccttacaggatctggctgacggctttccagaagcaaggcacggttagcaggaagccaggtgcctaggatggaaaagcatctggggacacggcacccacttcttccttcctggggatggtcggtggttttattggagcagtgtattaaaatctgggactgtgttggtgactggtgaatctgtgagctgccccactcctgagccaccagcccctcccctaactgtggttcttaggataaatagaagaaggaaagggttagccaaccagagaaggcagtgagggctgcggagctgaggttgtggggtagagaggcaggaagctgataacgtctcccctgcaccaactcgggctcctccggggtcatctgtacatatccctggacccagcctcagtcctggctccacccctggcctcctgggagatggtcctggatattatctggtctctgattggtgtagggcagtagttctcaacctgtgggtcaagacctcttggggaggtttaggggagaggtcaaacaaccatttcacaagagttgcctgagagcactggaaaacagatatttacattattcataacagcagcaaaattggttatgaagaagcaacaagaataattttctggttggaggcaccacagcatggggaactgtattaaagagttgcagcatcaggaaggctgagagccactgtcgtagagtacgtgaagggccttgggaggaagggtggggtcttgctgttccttccagccagtggacaaggaccctccaggattgtggctctgagcttacatcccgactctatcaacagcattgtgtctcagacccctggctctgaggaccgctcaggcgttaaacaaggaagaatctgcaggccccttggtgcattggctggtgtgcagttaggttcaggtgatcctgtgagaggtgtgacccagtgtggcctggagagaaagaggagaaagaggcttccttcatttcttatttccatctcccctgtgtggcctgagtccctccctggagatgccaaggtcacctccacagaggcttgccctggtggtgaccaggcaacaggctctctgggacccaggagaggcacatctggatgtggtcagatgcacatccagatgtgatgaggtgccgcgcaggcctggtgatacttctcgcctgctttccaggatctcctactgcactgcagacaagatgcacgacaaggtgttcgcctacatcgcccagagccagcagaacgagagcctcgagtgccacgccttcctctgcaccaagcggaaagtggtcagtgtgagaaccgggcccagaggggacagacagtaacatggactcacacgggaggaaatccctggggaactcaagtgggcgtgagaggactcgggctgtgactagctggcagtctggctgtgggcagtaggctaacccattgttccctagaagcacctgggtgtgttcctctcagcgattggctgggtttggggctgtggggatcatgaagtagtctgggagtacaggccttgtagggattattagctttgggagatgggaaacggagggacctgggagaagggaagactgagaccttcagctgggctctctggggtcacacttgggaggcagatggcctctttgcaacccctctgtcctcttgtgctcattggggagctaggcttccaagtgttttcatttggtctccagggcagtaccataaggtgcaagtggttagggtctctgttgcttttttctttagccttttaattacaatcaaacccagcccagaagccagcaagcttgctcatgctggcgcagccagccaggtgcaaaacgaagctccgagcccacagttcctctcctctgaacacccaagaggctgagagcttcctgtccgcaccccgtggccacatctgatggggcttggtggcctccagcctgtgctgtgactggggaggagacagcgctctgctgaccttgtcgaccctggtttctggggcttttgagggtcgagtgggaggaagcgcctaatgtcagctgcctcagcatctgtgtcttgttccgacctgatccccaggcccatgcttctcagagatgagaccctttccttccccatcaaaggacagacacatcagaaactgcacagtctctggggtcccacgtccctaatatcagatgagtttctaaaggctgcaggaacaaaatgacaacaagcagtgactcaaaacagcacagattcatcctcctcccagacccgggaagaggcaggctggagtaggacaggggcttgcgtttcttcagcagctcgtagagagccatgtctcacaatcccactttctaaagcgccttcacggtctaataagagtccttgggccagcctctgttctcagaggcagctgtgtagtctgtcttagtcactgtgctatgaccaaggcgacccttctaaaaggaagcacttaactgggaacttgtttacagttcagaagtttagtctattatcattgttacaggaagcaggcagcaggcagcaggcagcaggcaggcaggtgctggagcactagctgagagctacctccgaatcccgaggtagagagagagagagagcgacactgggggcttcctggggccttttgacttcctccaacaaagccacatgtcctaatcctcaaacagtgggcctgcgggtgctggccagccatagtcaaaccacagtgcacggtctccacacggctgcttctctgaccatccctctgaggcccctgtggcgtcactggataatccagattaaagcccctcccccatcttaacacccttaacccaatcccacctgcgaggctcagtagctgtgtgcaggacacccaaaagacaatgtgtagtgtgaccatgggtgagtgtcgtccttctctggcctgctcacctatcaacagaatgaggaggtcacctcagcgacccctagggttgttccgaaggcctcatttcttttgctgccttctgtccttgtaggctccctgctaccagccacccacctggggtcctgcagggacctgagcagtggtggcatctcccaagactgcctggttcccacagatggcaggtgactctggtatgaatgaggccacattgacttaaaaatacaaacttattatgtcctcactgtttgcttcttcctccccacggagcgcaccaggcaaggccgccggcccttgaccattgtgcaggcgggcactcgtgggaggggcattagcacgggaagcagctctctccgaggtgtgagtgaggcaggacaggcccaggcccagccattcagagggaggcctgagccagaggacaatacacagcctgccccaagttagcagacattgctgacaaacagaagccagctacctcgctgctgtggctaacggagctgcatgggatgggggcaggactcttgctggacacccaactgttgattgtctgcacggcctggctgtgatgtgtcttccacccatctctaccttttgtcacccagggttcccaagtcactctggtgtgttatagttagctctcaggttgcaaggcatagcactgagggtcaacagagtggatggcctgtaggcctaagatttcctgattatctgaagggtttgcagggatgagttggcacccttggctctgtcctccctgttggcagttgtcgccagtcagtggaccgtgctctgctgagtctgtggaggagggactgggtttgacactgagttcaggacttggctctagggtggaggtttttggatctagaggtcagggagctgcctggagactggagccttaaaggatgaatagagtagtgaccaggaaggagtgtgccaggctgaggggagagatgtgaggaaggagtgcagctagcttacggattgggtgtgcaaagggtgtgcaaaagcctaacttgatgtgggcctgaggaccccatcagggagccaggcagcggcacggtgcggaacccggggtgcaaaagtggtcctccttgagtttttacctctccttgccggccaagcaagaaggttgggcaggggtcccttctgggtccctcacagcccagcccaagacctcccttccctggtctcgtttgggcatgaccagagcatcagtgtgaggaagtggttcggtgtgctcaggtaagaagcctcagctctgcgagcgagcgcggcctctatgctcagaaggggaggagtttaggctcaccacgtaggcataggctgggacaccccagttctgtctggccaagggacagagctgtttcctccacgtagaccttagtattctttgtacagaagttaacgtgggagccaggtaaaccctggcagggctgatagtgagcacagggcgtgtgtatgctgcatgcctgcccctctttgacttattgatgaggcctgcttctggggagcaagataaggatgtggacagttgggccaagtggaatcttctggctaataagacagacagatctacagcagaggtcccaggagggcagcacagtggcctggggaatacaggtcttccctctgggtgttcccgtgacacatcgatggggaggggtccctgggaaagcaggtcacccccaggccttcccagcccagccctgcagctacctgcccttattgcttcacatttcagctccggttacatgtttactacgacttactgtacccggcagaggggcaggaaggcaaatgaaccagatttatgtaaacagcataaacctctgtccccgggttactgcaggtagacataatggcgtttccgtagccgtgccacatgggtgaccagcccttgctccagagtatagtgctctgacttgggctggtaattagcccatatttttagttcatgggcaattctcaatggtaactgggtctattaaactcgattcagacgtgacagcttaaattgtaaacagctgtgaagagtttcatacttaattaccatatttaagttttaccataaagcatccgtacttccttcaaaaatgtaaatgacggagacattcaaatgagattttatactttgtgaggtttaattggcgcagatcagtccgtttggagagttcaaaaaaattttttttaaaagagttttgaaggcggtggccacaaatttatttctcaattaaatcgagttgtctggtggaagctgctcaacactgagcttgttctgcaattgaaggagtgtggtgcccttccctgcactcccagcgccgagccggttaccacaggatggggctaacaggagactgtagccccaatcaggaccttagacaccatcgctgtcacttgagggctctgtctgagctgtggttctctcctcgattgtaggaaacatacacattgggatgtaagcctatgagatagagacacttccaccagcagattccagagggaggtgggcaggtctgtaaagccctgtgttggtgacagaggtggcgccaaggcacccgctcataggctggtcatgtgctagatggcttttgttcctaacccttgccagcatctcgattgtgctacctcctactttgctgggggggggggtgtcagttttcagcggctggcacccccaaatgccctgtaaccctgaatagtgggacttccactattcattagtagttcattcaagtatggttaggctcttcgcctcctgtcttctgctacctggtccaagagttctgtgagtgtagggaatcctcagataacccaggaggacttcccagaagaagtagccctcacagttggtttaggtatgcctgaagaggcaggtggtgagcagccattgttggagggactggacaggaagtgcttcagtaggtttcagctgcctctccaggctgtggcttcattatgccctaggctgtttgtgggaaatgagagagctaggcccctgcccccttccctcagcctttcggagcttggcatggggtgggcaccccctcagccctccagttcatacttgcttttgctggctgacactgcacccatccccacccccatttcctgtttttcaggcccaagccgtcaccctgactgtagcccaagccttcaaagttgcctttgagttttggcaggtgtccaaggaaggtgagtcttcccccccgggcactgtgagtgatgtgggaagggacaggttccaggcaggcgtcagacccaggctgaccccaccctcatctcgtcctgggtttgtggttctgaacaggtcctgttacttctctaagcctcagtttccccatctggacaaaggccgtcttccccctcctttagagtgtttgggtttaagggaaccctggaaggtgttgctcctctttgatggcgacctccgcctgcctctgagcatactcagcctgcctcctccccagtggctaattggagacggtggtgtctgctttaagggctcagcagctcatgccttgatcccacagagaaagagaaaagggagaaagccaaccaggaaggaggagacgtcccagggacccgacgggacagcaccccctcactgaaaacctgtgagtcttgggcaccaggcttgccctctacccaggccttccctcctggactcttgctgtttcctgttctgttaaagtctgcaacacaagtgccttgtcgggagctaagaggttgctgtgcttgctcgtgcgcgtacctgggtgtgccctaggaatacgcacaagtgcatatgcgctcctgtctgcctcagagcccggtagacatcccagcctacttggtgtgcttttgtgcattcagttcctgttaggaatttgcaggttccaggtctgccctctggggccacaggtcctctctagcaagcaactgccctggagctccaggtggaactgggtccgggtggggatccaggtgatcagggtcctacatctggacaaggtcagagtccgagaacaagtcaggaccagtatagtgcaggagtaccagaatgcttgcagaggccagaggggctgtacctcctttcttcctaatgtccccaactgactccccctagtggtcgctaccgggaacctgctggatttggaagaggtggctaaggccccgttatctacagtcagcgctaataccaacaacgtggacgagacaccacggcctcaggtcttgggcaacaacagcgtcgtctgggtgagtagctctgtggcctgggcatggtttggggatccagtgagctttagccaggtctctgaacgagcatggagtggttcccaggtccaggccctgagaccatgacttagaggcctctgggcggactagacccagcacaaagaacccaggctctgggtggagtggctgaacaatgtcccctctgaagccacggttgtgtccttgacaggcctggtccccagcacagccgtctcctcacaatactctgacttggagtctgtggcccttcccaccctgagcagcaaaggctcccttgttctgggcatggcaggtttgtgcctggcatcttcccttctcagctgtctaagggcacagccctgctgctggctctcaggactcatggcctgcgcctgacctctgtgtcagctttttctttccctcagtgaggacactggccttccacagcatctcccagaggaacctgaatggctcttaatttcagttttcatttgggtttcagtcggtttcagtctgtattatcccagtgcatcatagacaatgcagatgttagcatcctagcagcactgacggaccgattggaccctgctccagcatctgcggattccttgctccatttggtcctggctagccttctgggccaagagtcactgtggaatgacacctggtgactgtcatggttccagcctggcctggcctggcctggccttgccttgccttgccttcctttctttctgtcaggttgttttgacttttgagacagaggctctctacatagccctggctgttctgaactttggcctcaaactcagaaatctgtcaagtactaggattaaatgtatggtccacaggccaggccccagttttgagaccatggattgggtatgaaggaagcctgcctgtgctagttcctataggcaccccctccccccaccacacacacacatacaggtcccgggtccctgtagctcccttggggacacgaccccacccagagttcttacttctccatttgtttcccaggagctggatgacggcctggacgaagcattttcaaggtaacaaacactctgagggcttgtgctcggtgcaggtctcgggctggacctgggctctcctttacccttgggctttagctttctgcacaacaattcttggatttctcgagaccgggagcttactacgaaggaacgaaaaccttgcatggtgtctgatgtgtgaaaaagcttttgcagttcagtcaaaatgcaggcgtagcttgagaaggctgcgggtgaggactgggttcctctggttcctctggcccgggtccctgggcctccttcgttccccctttggatgcaaagggtcttcattgcctcctgtctcagggctttgcttagggttggtgcctttgccctccagcctccctcctccctcttgcacctcttgctgcaaccagggtccgatcagcaggtgaggcctggccaaggactcaggcctctttctcccaccttcccgagtcactgcctgacttgtcccacatttgaaaaacagcttcatctacttttcatgaatgtttggttgtcacaggtccttactatcaatttcaaaaatcaaatcactgtattatagtcccttggcccagactggccccacgtctgctgaccctgatcatgagcatgcctggtatctgttagctcacagccttggtcctggggcctgtgcagtcactcagggctgtcagaggcctccatccaggtgtttatatcccctacggttccctcctgaggacagagcgaccttgcactggcctctccaggctcctccggacagtaaggcagacagaacaaaccagtaatgtctcctgtgtgactgtcaagcacatactaaccccactcacgccaagtcttctcattgaacatttcctgcctacgactggctcagtggatgccctggcctctgttagagcagggtatcacggctctgattctcttgggcatcctgttgtctggggctctacttcctctgcggatctttaagtccagcctttttccccctcacaacctctctcctggtccagtgctgaccaggctgtccctgtccgcagcccctgccagcccctcagctgatgcttggcttacacagctttgccttccaggctggcgcagtcccggacaaaccctcaagtcctggacactggactgtcagcacaggacatccattatgcacagtgcttatcgcccaccgactgggacaagcctgacagcagtggcattgatcaagatgatgacgtcttcaccttctgaggacccgaggctggcaatacactactggcctagacatgggacggaccataagccaccagcagcaggcagccaacttcaggagccatcagctgcctttggccaggggcgtcagagcctacagattcaggttgcacagtcactcggggagagggggagaaagatgcctgcggtatccagttggtgactcctggtttatgctcggaaaccagtttgattcaggtgctcatgtgtgtggggcagggcctggcctcctggagccagtgccccctcctgctgtgggcgtcaggacaatgaccaaagccgttgatgttccttttctctgggcatcctcactcctgaagcagtaagagcctgccgttctttgtgtactggatgggacgtggctttcaggaaagttggggctcctcaagctctgcttcctcggggccgagtaactgaggctctcagagaggcagcccctgaccaaagacacatttaactctgcactttaactctcccgtagtggccatggttcgaggtccatgatggtgctttgggagtagagcttgcctcctgccctccctccacaagggggccccagtccctgacgtggcccatacagtgctaggacctagtgtaccagctgcccatgactcccagagtcactgcaaccatggtgatcacctctgtggctcctgggagtgccccccacccccaccgccaacagacaaagctgggcctgcttttctgttttgtctgtttgtccttgtgtgtgctccattttctgcttccccacaattcctgggatgataccaaagcctagcactaggctgtggcaggcgattcttgcatccattttacagataaagaaactgaggcgacacacgtgttgaggggtggagttgagaacagaacccagatctgataccaaagctgccgtctgtgctgccacctcccagcccacgcctctttctctgtggctttgttgtcctcccaggaaccaaaactccccagctattttctgaccaaaatgtgtttcataacaaaccatctggtgccttttcacacagcgctggcgcaggccgccatgccctgctagctgctatgccgctgacttctgggcagatgtgttttgaagtctgttaattccatgggtgaaacggtatctcactctagaaacatcttgctgtccttttctgacctgcagccgtagtggtccctcgaccctagctggtggtcggggcggtccagtggtgagcttctcttaatctcttttctcccttcgctggtcccgtgggctctggcatcctgaatctcagccaaactaacaacatctttccatcgcttgtgaaagctggtctcagtgtccccaggaaaacacacttttcctgagtggctgagtcggacccttgccttgggggttggggggcacttggagaattcttgctagaataaaggttgccagctccctttccctggccagctccaaggcccctgctccttagcccaagtggccagggtacgggcgcgagggggactgtgtggtgttgggtgatgctgtagtcttgcttcctgtgcctgctgccaatgctgctgtgtgaagctggaaaggcagttctgagcaggaaacaataaatgttccctttctgagtgtgagcatcacttggagtattgctggtaacaaagggcagggtgacggcttctggggagcattggtgtgtcaagagactggactaggccactgcaccagaatggagggcgaaggcaggtccccagttgttgggccagcagggtaccttccttcttctgcagactgcgatagtgtgacgaggtcactgttgggtgatgtaagaccacaccagtgggcctgtgcgtaagcactctctgtttctaacagtgtgttctggtcgggctctgggctcctgagacacgagtgtgagagtgtgcccatgtgtaccccttcccagggatggtgctgttcccatgactctccagtgactcagagttgcagggtttacctgctattggacctgggctcagtgctaaggaatgagcatggcccactcgaattcaagatgtgtggctttgtgtaaaaggggacagaagcagagggtggcgggttctgtgagatccaaagtccagctaccatgggtcagttacctgtttccttgagcctcagttttcctgtctgtaaacagggtcttctgtgcagtgtaaagcagtgtaaagactgtgtaaagcagtctcctgtgcctatgttcttgggattttatgagactgttgaccattatcacattattggtaatacatagccagtggctcaaaggttttctcagagcaaaaggtcatttggatcgaatatgtacagtcctagcagactcttggacagtgactaccactctgagtatacttcctgtgtgccagctgactcacagaagtcagctagagcctacatgccatctgatacctactgctgagggcgtcgtgcttagatgggaggcagtcctctcctgagtgcgtggtaaggccacagccccatcttatatccctaacccccccaccctgccatgtagggatttcccaagagattgctatgatccagctgctcctgtcctggccagactcacagtgaccatcccagcaaggccacattcctcaagttccacgggcttctatctggggactccccggccaatcctcctccctgtggcttgtgggggtctcgggcatttatgccttcattccattgaataggcctacttcaagtatgctgaggcagagccttctgatgccagccgccgtgcagactccctgagaggcccggtggatcagagcagactatagaattccttcctttttcccccataatttgaaaagacactcaacaagctcatctttcggtttaaatttggccaacgcctttagtctccggatgtctcaaattatggatcctgagcgcagccgtctgctctttcatgcataacaggcatagtgaaagaacaaagctgcctttcagacttgatgtgaccttcagcttctctgggtgcatgttgggctggctctccaggagacgctgtcacaattacaccttgcagaggggcttcccagcttccgtgcctgggacaggctggagactgggtttaccctgcctggtgcagcagaacaggcaacctgcttggctagtaggaaggactactaaccttgtcaggacccttgtgcccagccttggcgagatcagtctgctgtggcacactgggaggtgggtggtagtagtagtaggtagtcttagaactattaaaaaaaaagtgactttcatttattctttgacaattttatagatgtaaacagtgtcttgatcctgtgtacccccaactcaaccctcctcctcccaggacccccaacacattccttgtgccacctttcttttttccttctttgtaacccagagtacagttagtcctgcctgttggaatgttggctggtcctgctggctttatcctgtgtaggtagtcatggccgtggtgagttcttgactgtgctgtctatatcccgtctagacaacagcgcgcctcctcttcccagtgttccctgatccttgggagagagatatgagaaaggttgacactaacgccctgtatagggagaagccacttgtctcagtactaacccattaggcgtctgcagtaacggctgcccactgtggagagaagccatgctggccaagggtaagaagagcgctggtccatgggtacagacatgagtgttcagaagccagcgtggcattacgtgtcctttagcaaaggaacagtaagaagtccctcatgaggcccgtgactggtctaactatggagttttgacaaggtttgtggtacaaggtctgaattcctgcagagtaggtcttcaatgccaaaggggctggttattcataaccttcatgctattattgcctgagggagcagatcgggcatggtaggtcggtcttgtagcatggaggattgggtgctagctaagacgaccgatgtgttttctccctcccctggcctgcatggctcccgacagctctgaaagctagtcagctctgaggaagctttcagctgatgtctgtgtcagagcaagcagagtgtgtcttccgcagtagaatcttaccaactaatttgggtgacctctgggacctccctgaccaataagttgtagggaggtatcttctattgtcccgcttcatctctgggatatctgagggacaggaaagatcagcaaggtgaccgacctcaggcttacattcaggaagaggtaagtctggaaattgaaccccggggtatctcaatccaaagcttatttctgcctctgcaccagtagtggggagtttagaacgtcgtgggagctgattccacagttagcactggcaggtgcccactgcgcagatccattggctgaagctatgctgcgcctacccagctggctgcccaccttgggctgctgccctggacatgcccaccatgggactctgcagggccatgtgcccattgcaccaggccctgtcttttccttttccctgccagcttgaggatggttttatcagaggagggacagtgggtgccagtgcaagaggactggaagggaacatttgcagtgtcacatagcgagtttgagtttacctaatggctgccaagtcatatctgcctttgtggggatcgtagaggttaattaccacaggcctcaaactcaggtcccatgtgttcagtgtcctgaggtggccctccccctgcaggtcactaagaacacccagagaacatgacattgctcacggggagctcctggggccccctcatgccagcataacactgctgggcagcttggagcttctggcccagacagaagtgggctgggacacgaggccatgctgctaggcaacccatcagcgcatttctgctgatcaccagcttggccctgtctgtggatgacaagaggcctctgctcttgacccttaataatagtccaggggcggggacatggttcccagaagtcactggtcctgcatgcttgcctacgccagtgggaaacagggttgaggggtattgcacgggatgcctggtgggtctgctaagtgcagaatggtccaggtggacctcacgagaagaagtagaaagttgaagatgctcttgatggctcggtagctctgcttttgggggccctgtgtgagccactccatgaccaggtgcccaggcacttcctgactccgtatggtaatgactgaatcaaggcagaagtaaaaggcttctgggagccttctgaagaggtcaggagccgcatcccacaggcagcacaggaatttgcaggtcatcaaggccctggttccacacttcccagcaggcacaagttgtggtgtgctgggtcttctttactcccagagggcagccctgcaactcctgagctgctttggcgaacctctggtgtctaattctacatcctgaccaaagatgttgctttccaaaatgttctcaaataaaggttctggaatctgtgtggtgtgtgtgtgtgtgtgtgtgtgtgtgtgtgtacgcggacatggatgtatcaggttgcggtgcccatgcggagatcaggaatcaactgtcctctctgcccacctttacgtgcgtcccagggatggaagtcatgccattggacttaaggggaagcatctgccaagtctagactcttactgccaggagatgcctttgttaacacttgggagtgagagcctccatgggcataggactttgcctacagctgagagacgtgctgagataatgacccgtatatccaaaagccccttgagctcttaatggaggggccagagctgtaggaagtgagtaagacaggaggttgggggagggccctgaggaaagcgccagtgtggaggggcatcagcttgtagccctctcagggacccagggctgtctgcagctcaaagctgctaatccaggtacctgggtgagagtgagctgttgccacacagcgtgagtggggtgctctgagcccctggtctggcacaagttcgctgcacacatgactcaagtagcctgtttgcttgtttggaggataggatgctgtcagtcagtgtgaggattcgtgaaaagccaccgagttgagcctcccaaatgagtctctcagctctgctagaatcccgttttgtggctgtcactactggctgctttataaatggtttaggacattctcggggagaccagggtaagaaccactcaaaatatcagaactgaggagtcggtctgtcctgtgaacttctatctggatgccaccccagtatagatactgctcacccctctccaagtgtgagcccgtaggaaagatgagtcggctgtcttgaagacattcaatctctgaatatttcaggtagaagatgcatggggctggagagatggctcagcagttaagagcactgactgctcttctgaaggtccttcaaatcccagcacacatgtggctcacaaccatctgtaatgagatctgacgccctcttctggtgcgtctgaagacagctacagtgtacttatgtataataataaataaatctttgtaaaatgtaatttaaaaaaaagatatataaagagcacctgcttagagagctgtgggaggggagggtgtgtatgtacccctcagtgttccaagtgtgacagggtcggagcagctgctgccaaccagctgtccaccctttggtcttcacattgcagagttgggagaggccagtggaggcttcagacaaggcttggatggcagggaaaggatgcgcaaggtgtccagcccttgagatccagggggccacaccagcaggaggggaggggcctgggagtgaggagctcaagaagagctgggtgccaggatcacactgagtattggcatgcgttctgcaccactcctcatgattgttagggaaaccctgagtctcaaaggtgagatgttttaaccctgggctgaggcacacaagccgggcctgtctcaggcagcctcaggctggctggggtcagagctgctcactcaggacagaatgatggagcatcggccccatgccagatatgttaggtgcttggaaaatggcggccaacctagtgtcaacagccctcaatccacacatggagtttgcgtcctatgaggggatggggttatagactctgcttgcaaacaggcactatggtgtcttcactgaaggcagcagagggagggaggtgggggtgggggaagcaagactctacaggggagaagagagctgctaactagatgggagggggaggagacatcagatagagtgggagtgggttgggaggtggagagggtaaagtgacaggtgtcacagtttctctggtttcccagctgttcaatccagaagaaagtcgggcacatgacaaggcgtttgtcttggtgtcgctctctagtctgtggggtctgagaaaagtcaaggtgtgtcctgcaatctggaggccctatggtcttcagccctaacagcctgcttgagaggctctgatatagggatctctctctctctctctcttttttttttttttttgtttttttttatgttttgtttttttgttttttttttttttttgttgtttctctgtatagccctggctatcctggaactcactttgtagaccaggctcacctcaaactcagaaatctgcctgcctctgcctccaaagtgctaggattaaaggtgtgtgccaccaccgcccagctgatataggcatctcaaatgacattttttggtcaggaaagcaagtgctagattctgtgtgttatagttatgtggatcctaatggggcacatgtatgtgagttagggcacagataggcatgtatgtttgtgtctgtgagcatctcttgttggggggggggtgcccagagttatgctttctttcctttggtcttttgagacagcgtcactgtgtagccttggctgccctggaactcagagaactgcctgcctctctctacctcctgatggttaatagaggcatgttctactcttccgaccgcagctcttgtgtcttctctgggctgtagtaggggctcctgggaccttggcagacacggactttgggacttgagggttagccccttgggaatctgacagctgaaacagaggcccaaactctggtccccagatgcagagtcataaaactggagactggcaatccctatacctccagttcccagtcatagcgggaccctcccctcccagttgggaagactgaaggtttgggctccaccaatcctaagtgaatctacagaataaccaggacatccgcactgtggcaaaaccagttagaagcccaagggttctgggttcctagcctactcttgtcccttgtcccataaccttagtcaaacagtgactcagtgttctcccctgtagaatgggaacctacctcatactttaggcatgaagtagaggtgagtgtctgagtgtgccaggcacagctttttccacaagtcacctcatccagtttccagccccatcctctaacgtggaactgttcccatcccgcttaggaccagagaggtaaaggtacttggcccaagtcactcagcggaaaggggccaggcagcctgagatgctgcctctcagacctgatacctagctaactggggacattagatcaagagtggccattagagctcagagagatgaagtgacttggatcgcccaggcaagaaagggtgaagtccaagaagaggccagatgtaactgtaactatctgccagtctcttggttgtggcctggtgtcttcctcactcccagccagcctgccgttaaaaagtgaaagcttcagactgagaagaacccgagaaggactgggccttcctctttagatgcctgcatggttgacagaccccagttctgtgccaggggtcatgggatgcctggtgtggtgtagaggaggctgcataccctcacacgtaggtatcagggagctaagagacttctgtctgtagccgagagaaaaagggaggctggaccagaggaggcctcagctgagccagtgtctggccatgtctttgtgagnnnnnnnnnnnnnnnnnnnnnnnnnnnnnnnnnnnnnnnnnnnnnnnnnnnnnnnnnnnnnnnnnnnnnnnnnnnnnnnnnnnnnnnnnnnnnnnnnnnnnnnnnnnnnnnnnnnnnnnnnnnnnnnnnnnnnnnnnnnnnnnnnnnnnnnnnnnnnnnnnnnnnnnnnnnnnnnnnnnnnnnnnnnnnnnnnnnnnnnnnnnnnnnnnnnnnnnnnnnnnnnnnnnnnnnnnnnnnnnnnnnnnnnnnnnnnnnnnnnnnnnnnnnnnnnnnnnnnnnnnnnnnnnnnnnnnnnnnnnnnnnnnnnnnnnnnnncctcaccctacaccgacattgtctgagatcaggagagagcacatcccgagtgccattttatcgctagaagtttgtcgattcagctcattacacttaattagaattatttaattagaatcttaataaaagagtaaagcaggaaggaggctgggagcggaggtgaggagatccgtgctgggcctgcgaagcagcagacgcagctggggaagtgcgggtgcaggggctgtgagggatgggggaaacctgcttgcacagagcatctgtagcaggtagggccactgcagctcaggagctgtcagtggagggcggagggggtggtctggactgggcctcatctcttctttaccagatgccaagccctgggctaggggagtgggcatgtggtatggggccccatttccggtccctgagggacacagttcacagacgagaagagacgcttacagagagaacaaactagaagtcagatgtttttacagatggtgtgggagacagagccattgccgcccagaggtgaggtacctgctctggctggggttcacatagggataactacacagagacccgagcgctgagttgtaggtagacaagaggggggtttgggggaagtgtagggaagggtgatggaaaatgaagcgttgcttcaaaggggggtgcagaacacagtagaggactttgtcacccttggagcctctttttcctcatctatgggagatggtagcaatggaacccacctcacacggctcttgcatggagaagctgagctgatgcctgcatagcacgtaggccagagctgggcagtggccaggagcatgagctacgacattcgtgtggcgatgtctctttaagtggtcagttacaccggtctaaagcacagagttaccagcctggaagtctgaagctcggagatactgggagaggttgtaggtgtgtgggagccaccccagcaggtgtggcagcgtggctgctggctgtcccctttagctcatcttcttcgcttattcctccaagaggcttttgtggttcaccacctttggcttctcaggggaaacagtctacagcatggcttcagggatgatcccagagaccaagccaacaaagctatagaggaagacctggttgcatggttagcagaatctcccgcccctcgcctggacagtggtggatggtccgtgcttctcatcaggaagccagttctaacaagaaaccagagccgcaccacatcacctctcgaccctgcggagtagcattcactgatatgcctggtaacaatatgctcgccggagtttatgtcaagctatagagaagaggacatcctcccaaatggtgtagggtgcaggcagtcaattgttctaaaacagggagagttggctccagggccacttgattgaaaccatcctagctggaaatcagcagaaatgagagaaaactcctagcagacttgtggggcaccagaagcccagctccctccctccgggtctcacagtttctgttactcgcagccaaatgtaccccatacagcacaaggccataaaataagagaaagagccgaggctgccccggggctgtgtgcatgtgtacagccggcagaagagggagaagctctgagcacagctgcctctggaatttgtccccggagagggatctaactctacattgggctttccacaaaccgctccagtggcagaaaaaggcaagagaatttttagcctggttatataaagtgtttcttggccccaggcacagactggagctaggatttgaggatttgaactaactcactctctctctctcttctctctctctcttctctcttctctctctctcttctctctcactgtctcctctctcactctcttctctcccttctctgttctccaccctctactcctgcagcaccccccctccccctttgtcacagaagcagaatctgccttcaaacacctcctgtccccatgggctgtatggactgggccctgccctcaggcctctgaccttgatggtggtttttcccttccagatggccacaggccaccatttaattaatggagtaaatgtaatttaattagctgtttcaacactcactccacacttcgggccattagatccacattcccttggatgtgctgtggggctttctccgccctctgacctgactagaccagacagatctttgattcttccatctcctcaacttccaaagtcaacttttttagtggaaaacaaaaggaaattactgaagagacaccaagttgctcatgggatctacgggaaaagctggctcaggggaaggtggagttgaggacaggttgtggctcctggcgtggacaatgtgccttatgggaaaccgtggccgtaagggataggggtgctcgctgggcagcccggcactgctactgctcaccaacaagtcgtttcagctgtgccctgtgtgacacttgtgtgtccctgacatgaaggaggtgcctgagaaactgaggtagggacaggtgtgcttccacagctggccagctgggaccaatgtcaggttcccacttaagacagacctgccttcctgctcaccagctaagaaaggggactgaatagtaagagttagaaacccagcaaaccgggtgttatcatttccacagaggtggtctctgcttaaattccaagagctgagcctggcagtggtggcacacacctttaatcccagcacttgggaggcagaggcaggcagatttctgagttcaaggccagcctggtctacagagggagtcccaggagagccagggctacacagagaaaccctgtctcgaaaatacaaaacaaaacaaaattccaagagctgttactggcttccccactgtggtagatcagagaagggctctgtgtttttgtctgttattatctccaggcttggtgggcatggtgacaacaggacaatgttgtaaccgtgagtccttgcaagccaggct

SEQ ID NO: 200 - DNA, 3311 bp, Mus musculus
gaaagttttcctggaggagttttggcggcggtagcggcgtcagtggcggcggcgacaaccggagcgggccatggacgcgctcaagtcggcggggcgcgcgctaatccggagccccagtctggccaagcagagctgggcgggcggccggcaccgcaagttgccagagaactggacggacacgcgggagacactgctggagggcatggttttcagcctcaagtaccttggtatgacgctggtggagcggcccaagggcgaggagctgtctgcagctgctgtcaagaggatcgtagctacagccaaggccagcgggaagaagctgcagaaggtgacactcaaggtgtcaccccgggggatcatcctgaccgacagcctcactagccagctcatcgagaacgtgtccatttacaggatctcctactgcactgcagacaagatgcacgacaaggtgttcgcctacatcgcccagagccagcagaacgagagcctcgagtgccacgccttcctctgcaccaagcggaaagtggcccaagccgtcaccctgactgtagcccaagccttcaaagttgcctttgagttttggcaggtgtccaaggaagagaaagagaaaagggagaaagccaaccaggaaggaggagacgtcccagggacccgacgggacagcaccccctcactgaaaaccttggtcgctaccgggaacctgctggatttggaagaggtggctaaggccccgttatctacagtcagcgctaataccaacaacgtggacgagacaccacggcctcaggtcttgggcaacaacagcgtcgtctgggagctggatgacggcctggacgaagcattttcaaggctggcgcagtcccggacaaaccctcaagtcctggacactggactgtcagcacaggacatccattatgcacagtgcttatcgcccaccgactgggacaagcctgacagcagtggcattgatcaagatgatgacgtcttcaccttctgaggacccgaggctggcaatacactactggcctagacatgggacggaccataagccaccagcagcaggcagccaacttcaggagccatcagctgcctttggccaggggcgtcagagcctacagattcaggttgcacagtcactcggggagagggggagaaagatgcctgcggtatccagttggtgactcctggtttatgctcggaaaccagtttgattcaggtgctcatgtgtgtggggcagggcctggcctcctggagccagtgccccctcctgctgtgggcgtcaggacaatgaccaaagccgttgatgttccttttctctgggcatcctcactcctgaagcagtaagagcctgccgttctttgtgtactggatgggacgtggctttcaggaaagttggggctcctcaagctctgcttcctcggggccgagtaactgaggctctcagagaggcagcccctgaccaaagacacatttaactctgcactttaactctcccgtagtggccatggttcgaggtccatgatggtgctttgggagtagagcttgcctcctgccctccctccacaagggggccccagtccctgacgtggcccatacagtgctaggacctagtgtaccagctgcccatgactcccagagtcactgcaaccatggtgatcacctctgtggctcctgggagtgccccccacccccaccgccaacagacaaagctgggcctgcttttctgttttgtctgtttgtccttgtgtgtgctccattttctgcttccccacaattcctgggatgataccaaagcctagcactaggctgtggcaggcgattcttgcatccattttacagataaagaaactgaggcgacacacgtgttgaggggtggagttgagaacagaacccagatctgataccaaagctgccgtctgtgctgccacctcccagcccacgcctctttctctgtggctttgttgtcctcccaggaaccaaaactccccagctattttctgaccaaaatgtgtttcataacaaaccatctggtgccttttcacacagcgctggcgcaggccgccatgccctgctagctgctatgccgctgacttctgggcagatgtgttttgaagtctgttaattccatgggtgaaacggtatctcactctagaaacatcttgctgtccttttctgacctgcagccgtagtggtccctcgaccctagctggtggtcggggcggtccagtggtgagcttctcttaatctcttttctcccttcgctggtcccgtgggctctggcatcctgaatctcagccaaactaacaacatctttccatcgcttgtgaaagctggtctcagtgtccccaggaaaacacacttttcctgagtggctgagtcggacccttgccttgggggttggggggcacttggagaattcttgctagaataaaggttgccagctccctttccctggccagctccaaggcccctgctccttagcccaagtggccagggtacgggcgcgagggggactgtgtggtgttgggtgatgctgtagtcttgcttcctgtgcctgctgccaatgctgctgtgtgaagctggaaaggcagttctgagcaggaaacaataaatgttccctttctgagtgtgagcatcacttggagtattgctggtaacaaagggcagggtgacggcttctggggagcattggtgtgtcaagagactggactaggccactgcaccagaatggagggcgaaggcaggtccccagttgttgggccagcagggtaccttccttcttctgcagactgcgatagtgtgacgaggtcactgttgggtgatgtaagaccacaccagtgggcctgtgcgtaagcactctctgtttctaacagtgtgttctggtcgggctctgggctcctgagacacgagtgtgagagtgtgcccatgtgtaccccttcccagggatggtgctgttcccatgactctccagtgactcagagttgcagggtttacctgctattggacctgggctcagtgctaaggaatgagcatggcccactcgaattcaagatgtgtggctttgtgtaaaaggggacagaagcagagggtggcgggttctgtgagatccaaagtccagctaccatgggtcagttacctgtttccttgagcctcagttttcctgtctgtaaacagggtcttctgtgcagtgtaaagcagtgtaaagactgtgtaaagcagtctcctgtgcctatgttcttgggattttatgagactgttgaccattatcacattattggtaatacatagccagtggctcaaaggttttctca

SEQ ID NO: 201 - protein, 320 aa, Mus musculus
RRQWRRRQPERAMDALKSAGRALIRSPSLAKQSWAGGRHRKLPENWTDTRETLLEGMVFSLKYLGMTLVERPKGEELSAAAVKRIVATAKASGKKLQKVTLKVSPRGIILTDSLTSQLIENVSIYRISYCTADKMHDKVFAYIAQSQQNESLECHAFLCTKRKVAQAVTLTVAQAFKVAFEFWQVSKEEKEKREKANQEGGDVPGTRRDSTPSLKTLVATGNLLDLEEVAKAPLSTVSANTNNVDETPRPQVLGNNSVVWELDDGLDEAFSRLAQSRTNPQVLDTGLSAQDIHYAQCLSPTDWDKPDSSGIDQDDDVFTF

SEQ ID NO: 202 - DNA, 34958 bp, Homo sapiens
  misc_feature (1)...(34958): n = A,T,C or G
nnnnnnnnnnnnnnnnnnnnnnnnnnnnnnnnnnnnnnnnnnnnnnnnnnnnnnnnnnnnnnnnnnnnnnnnnnnnnnnnnnnnnnnnnnnnnnnnnnnnnnnnnnnnnnnnnnnnnnnnnnnnnnnnnnnnnnnnnnnnnnnnnnnnnnnnnnnnnnnnnnnnnnnnnnnnnnnnnnnnnnnnnnnnnnnnnnnnnnnnnnnnnnnnnnnnnnnnnnnnnnnnnnnnnnnnnnnnnnnnnnnnnnnnnnnnnnnnnnnnnnnnnnnnnnnnnnnnnnnnnnnnnnnnnnnnnncacccctgcgccccagccagcagctgcggcggtcaggagcccactggcccgttctcccgccccctgcccgacccaccgggccaacttttgactccgggtgcccagacacccatccaggtgtgagcccggggtcgcaggtacgtacttgaaattgggaacgaggccccgcctggggtgcctcgggagagccccacatcaggcgatctagacccttacgtcccttcctctagccgggtccaggtggcaagcctggcgtcccgactatttttgaaacctgttttctctcgcacctttcccctcgggcttccagagtcccttgggtgcccaggcaaacgacagactcgccgccacctctccctggggcgtctgggaggctgggaggggcctccccccctttctctcccccagtctctgattacgctcagggaacttgtcacctggcaccttcccctgaagccagaagacccagcctagcgcaggtctcgttgtttgggagggagaagagagtggcttgcctggggtcacacacaccttcctgctggttttggagccagagcccaggactgctgcacactcccacctccctgccacctacttcgggccacagcttctcccctcatcaggaaacaactgacagtacagcaccccctcatcccatcccctcttggccttacagggctctgccaggggagcccgagctccctggtccaaggagtgccagcgtgtctgggcctagagggcccgcctccctcctcctctggccccactctgttgttcagctgtggccgcctcccagctgagactggcattggcattgggaatgtggggtggtgcctgctggtggggggtggggtcagagacccattagggctgggccactaggccaggggatgtaccgtttatcacactgattgcatcccaaaatagaccctttaaaaactggcaagatttgaccaggacttctgagatggccatctgttccagtgggagaatcctgcgggttttctccaggaatgagggagggagggtggtggggcagcccccagggaagtggttttgaaggaaggggggctggcaagggaagggaggctagaaagaaatatctctgaatctggggacgtggaagaggtagccgctttggatgtggaagagaatttctcttgccatcttcaatcttgagcaagtcacttgtcctttctgatcctcggtttcctcatctgcaacatggggataaaaactcttacctggcaggagtatcaaggagattattggtaataatgctccctcctaactggtggctttcttctcccctgctcctcttccccctgcctatccttgggacgctgccagcatgattagtactgtggtgagatgggttttgggggccccgagcctgtctgcacctttggaggaaaggagaggagcacctctccccctcctccaggccctggtaagcccaaagtgctgtcctggagcctctggatctgaaggagggcaggccgagccccacctgtccctcgtgatgaagtctcaatttcctcacctgtaaattgcaaataacagtagtacctgcctccagctgtttgtggggatcaagtggaattgcgtttgcctggcatagaggaggagtttggtaaatggtaactgctgcttttgtaactgttttacaacctgtttttgcttccattctctcattgactcctgtgaggtgacagagcagacccattttagagacaaaggaactgagactctgagcattggagtcattggctccagacacagagcatctaagaggcagagctccacattcctagcgcaggggtcttaccagtgtgcttggtgaactctgccatgggaggagctgggagcaggccccacctaccccacgctgggctggcagcctctgacagcagtggccacaggttagagcaggggccatggggtatgtgggggtgggggtgctagggtcaccttgctcagggttgtgacccagcctggccttggacctggtccctgtggttgagttttgaggccaaactgaagccagtggagttaaagttagactcgaaccctgctctcagttgtgacctgctcctcctcctcaaggtcctcactaggattagcatgagcattgcttatttgtggagaaagaagcccagagaagggcagcaccttgcctgaggtcacacagcaaagccagcaccccaggcttctttccacccagcttcatgcctgcagtggattcctggttgtcctgaccttgaaagagggctctcttcctctcccacacatggcttttcctatcccctggggagacatcaatattttatctcagtccctggccaggcattttccttccagctgcctggaagaggggctcaccttggcccctcagcactctttccagaggtactgggatcattcaggccctccggttattttgtgggttgtgcttacccagagagaaggggtgaagaaataggaggtgcaggttccagtaaagctagttcatggtggaaggcaagggagggaggatataatcatatttataatatttataataaaggatattgcaaatgaatgtggcccaacacaaattcataaactttcttatgggtttttttgtgatttttttttaagctcatcagctatcattagtattagtatattttatgtgtggcccaagacaattcttccagtgtggcccagggaagccaaaagattggacatctgtggcttacagtctggtgcaccacaacaagggtgtagatcagtggtgtggttgtggacattggtagcaggacaaataaaaataaagcagggtgaggaaatgatgggacagctttgtaagataggatggtgtcttcatttgggttcctctagagacaaggattggagtgcaagtcatttatttgggacaagatggcaggaaatattgttaggacaagtgagaagggaggggagtccacaaagtgggcattataaagcaaattaccagcagggcgcggtggctcatgcctgtaatcccagcactttgggagaccaaggtgggcagatcacctgaggtcaagagttcgagaccagcctggccaacatgatgaaaccccatctctacttaaaatataaaaattagctgggtggggtggtgcaggcctgtaatcccagctacttgggaggctgaggcaggagaatcgcttgaacttgggaggcagaggttgcagtgagccgggatcacgccactgcactccagcctgggggacacagtgagactttgtctcaaataataaataaataaataaataaataaataaataaataaataaagcaaattaccaccagggactcctggagcttaaccccgctgtgggaactgtgggaggcagtgtagaacgtgctcttcagagccgttccactggaggggcagttcccggaagcccggtggagaggactcctggggtcgggagatcttcattccccagtctgcgccagcctcagcatctccagcaggcagagtggcaggtactggcagtcagcacaacatggaaatggtgtgcagggaggataagggcggccactgacagcaccagggaaggtccctctgagaaggtgactcggtacacaccggtgaatcccaggagggaggagtctgggaacagtgttccagctagagggaacagcaagtgcagggaatgttgaactggaggctaggactctgcttctcccgggtctgggggctgtgtgaggggcatgtggcttgaaggagtcagaggtcacccactgcccactgagggtcagatactctttttgagcagccctgcagggctctgcctgaccccagcaaggggcttgggctgcaggaggcaggtatggactgaagtcccagtgctgtcaattatgagccatggtcaaactcctctgagcttctttatctgtgaaatgggaacactgatctatcctggactcttctctcaatatgagaatggtcatggacacgttaaatctctttgcatttgaccactgtaatgacagtagctcacacttgtgatacttggtatgtaccagacaagcttctaagctcacctcgggtgtgaactcagttcatcctcaagacaaccccatggatggatactctttttttttttttttttttttttttttaagagggagtctccttctgttgcccaggctggagtgcagcagtgggatcttggctcagtgcaacctccacctccttggtttaagtgattctcctgcctcagcctcccaagtagctgggattacaggcgcctgccaccacacacagctaatttttttgtatttttagtagagacagtgtttcaccatgttggccaggctgttctgaactcctgacctcaagtgatccacctgctttggccacccagagtgctgggattacagacatgagctaccacgcctggctgaggtggatactcctattgtccctgttatttatttatttatttgagacaaggtctcactctattgcccaggctggaatgcagtgatatgatcatagcttactgcagcctcgacctcctgggctcaagggatcctcctgggtagctagaactacaggtgcacactgccacgcccagctaattattttttgtagagacgaggtcttaccatgttgtccaggctggtcttgaactcctggcctcaagcaatccttccttctcagcctcctagcacactggaattacaggcatgagccactgtgcctgtcttgtccctgttttaaagttaggacactgagatccagggaggttcagtgactatgaactccacagcccatagcatatttttctcttactgtgtaagtaggtacttaggaaatggtagctgctgcaatttgtcattttaaaaattattttcttttgataacaatctcaacagctttgacttctgaaattttcctagtacttttcacgtccagaaacttctggtgacgctcctgaggggatgaacccatttgtcagatagaattacagcccagagaagcagctacactccaggtcagggcagagcttgagccctcttctgagatgttgtcactctggcctctgaggccatctccccaccaggctgggggaggctggaggccagagccccggttggaggctcccctggcccctgggtttggctgcagctctgatgttgcagacacaccagccaggcagggtctctgggagcagcagaacgggcacaagggcattcagcccagctctgactcccgggtggttgggggaccttaacaaggaaagaacacgtgttcacagctgtaatttagaccttagaccaggcatatggtctgtccccagctaactccagcagcaggtcatctgtaaaattgcaacgttaaaatagcgcagtcattacccactacagggccaaaaataactaggaccggaacagggctgtgcactcaggcctgtatttgcccaggggcctctgggagcacctcctgaagccgtgggctcctcccggcaataaggcctccggctgtggctggcgagtagggcgggtggcgggtgtggccctgagccctaccaatgggccttcactgagagctcccaggtgctggtttctgtggggagggtgtgggcatgaggggccttacgctctagtgaagacatgagtcatgtgcacagaccacaggagggaagcagcttcctagagagaaaggagcatctcagtggggcctgggaacatggggtacaagggagaaacaggaccagactggacggccacattgggcaggcgcacgcttccatgccaggtcctggggaagcagacatgaatggcaggtactttaaagggaagagacgtgtaggcagtgcttggcagtgggtggtgtggctgcaggaggaagaagagatttacagtcaagaaaggcaccaacagcccgcccacaggagggatgaggccccactggaaggtgtactgagcaactgcgatgggcctgcctctctgctaaattctataaacttatccaagggtcacaacagcccccaggagtcagagctgttgtttcccccattttaaagatgaaaaactgaggttcagggagggtaatgagctcactcaagatgactcagacatgaagcattggagctgatatcttaggattaaggccttgctgttaaccacgaggctatattgcctcaaaggaggcttcctggaagaggttggatgtgtggggtttgatcaagtgaagaaagggcatttaggatagagggaactacttgagcaaaggcaaagaagttagacagtaaatattacattattaggaagaagctctgcatggttggagcttcttggggtagggggtatgtagggatattgtgggagaagagacggggaaacttaaaattccctcacagtcactggtcattgtggggattgtctatagtggactgggtggggtgaggagagtccctctgacttgccatgttaccttgcacaggtcccatccctgtctgggcttcagttgtatcatcaagtgaggggcttgagctgagggcctaaggctgatgagtggcaaccagtctgtaaggacgtggttagaggaggggaagggtcaggccagggaaggaggaatgcagaaaaatgctgaacatttcaggggtcagggaggactagggaatgttttgacagcagagagatcaccagtgaccttggcaggctttggttctttggaatggagggagcggaagtgactttggaaaggggccaggaaagggctgaaccagaggaaatgggagaatggggacatgaaaatgggggctggagagggagagtggagaatgtttgccaggggtagggatggataatgagatgttcaaaccttgatcaattagtattgcttgcctggggccttgtgctgagaaaggatcagagggaagtagagctgcaattgattatcaatgtctgccaagggtgcgggtcataggcacagtagcacttctttccattgctgtccttgcttagatgggtctcaggttgaaattggtggcctgggtatcctagcctgcagaggggaagccttaggtattaggaatacctaattccaggtgagaagaaatgcctccgcctccaaaaacctgatcttttgctagaattaaggtagtttgctgcatgataaagtagtatggtctcatggtcaggagcttgggctttagagtcagtcctttgagtctcagtttcctctctgtaaaatgggaatgagagaatgcctgcttgcaaggtggctgtgagtgttagaggtgatggtaatagctatggctttattattgttgcatctttgttatatgaaagcgctgtttttccctgatgatggtgctgttattctgaacttgagagcagggtctgtgtctgagttgctccagggccccatcactcaacccaggactggggacatctcagggactttcacattcttttggaggatcaaatggaataggcttgtggttgatgggacagaggataaggtcatgttgggctttggggtcatctcagtggagacctggcctcatgttggggtggaggcccagggatgagatctagggctggagggtcactgggcctggggccagggctggggatgggatggggttgtcctcgtcatttcttccttgagcgagtattgagcgctacctgcatgccaggttctagatgacagtcagtaagtccctgctcacctgatctcaagacatgaggggaactgggtacatctgtaagttcctgtataaccctccccagccctgacacccgcaccctctttcagatgaagaaatggcctcagagagggacagtggcttgctcaaggcaaatccagagaaatgtgggtgtacaaggctccttctggctgtggagagggggaccagagcccctggaggcccagggctctaggataggagctgagaggggcagcagggatccagactgggtaggggacctggtgatgccacctggacccagacttctgctcttgacagagccggaactccagaaccaagctgagccttgtagtaggggcccacatccctgccagagcctcagctgccctggaactagcaatacccaaactttcttcctgtggcttttcaatcagagccagtgaggaaggcctcaggaggaggtagggagggcccaggacatctcccagcccctccctgggggatggtctagggaagctggccctggctacctctcgtggcccctggaagctgattcctggctggatcctgctctgtcctcaacaagattgtgtgtgaggctgaagagcagttttctttctcatctgtaaaatggtgcagtcataacaaacacctcctacaagcacagcatctgtgagggtttcctctctgtaaaatgggacagagaggtaggggacaggaaggggctctggcaggtggaagtgtgaggtgttcattcatctttcttcatgtcctccttccgaggagccggggatggtcagaaactgtcagtgcagcctgcttttgccctcatgcccatttgcctccacggggccctcacctacgtggtggggcgctctttccacgtgtccctcctggtccatttgcccacccagtgaggcaggctcatccccttatttcctgacatttgtgtggttggtgcttttagagaactctccttgtggactctgttctgcaccattgtcacagcccagagaggggggaatgttagtcccaaagaggagaggggacttccctaggaccatccagggggtgggaagcagagtgggtctcgaaccttctccgatttgggaaatcgccttctcctctccccacccacccttacccttccctgctctccctgggctactgtctcctgcccagcctcccacatgcccctgttggtctctacggatgcgcacagggaggaaagcagtgcaggctggggccatgggaaccgctcagggttgaagtccgactcattgtatgtggccttcatctcatgactttgcctccctgagcctcagtctcctaatctgtagaatcattgtctcacaggattgcactaaggattcagtaagaaatggtatgatttgccctcagcaagtggtagcattgaagtaaagagggctcagggcttgaaaatagggctcgaaacttggctcttgcacttcctggctctctggacttggttatgtgattgagcctccatggcctccgtgtctttgtctgtcaatgggtttgattaaagcgttgacctcataggttcttaggaggattaatgagaacattttatgtaaagctgcttacatggagccttggtatgtgccggaaagctttagccctttattaaaagtgacagcagacccagcacggtggctcatgcctgtaatcccagcactttgggaggctgaggcgggcagatcacttggggtcaggagttcgagaccagctactcgggaggcagaggcaggagaatcgcttgaacctggggtgcagaggttgcagtaagctgagctcgcaccactgcactccagcctgagtgacagagtgaaactcagtctcaaaaaaaaaaaaaaaaaaagagtggcagtagtggtgggggagacccccatcccccttgctggggtttcctaggaaagaaggctggtgagagctgttgctggtggtgggccctgagccgcagggtctgagggcctaccctgtgctaccccagagctgcctgagaactggacagacacgcgggagacgctgctggaggggatgctgttcagcctcaagtacctgggcatgacgctagtggagcagcccaagggtgaggagctgtcggccgccgccatcaagaggatcgtggctacagtgagcaccccagtcaggaagggtgggggaaccagggaccaaggaccagcttcttcccagggtgccctcgtcccagcttgttactccagttgggtgtgtctgagcctggccctgcccttcattctccttccatccagcttttgggccttggcagaggggaaccattggacttgcaaggtcacggttagtggcttccctccagccattatggcctcttccagcctccccacccccagctcaggctccctaccaatgcattggtgacttatcagcaccaggaagggtggggagtttgctttcccttgactacctgcccaatggcctgagagacagcatagcccatcagagagcagattgccccctccctaactttgagcaagggtgggccttttaaatccacttcccttggtggcctcagacccctcagctcaatggatggagcagagtactcaggagtcatcctgctgggttgtgctagctcattcagtgccgagtctgcaggcccttctagctgtgtgtccttgggtaagtcccttagcctctctgagtccatctctggggagagggaggatgactccaggtccacggtgcctgacagatagctggtgctcagcagatgctgctcctgtttctattgcaagaaggtgctggctgagtggtcttgcccacactgctgccagtcacctgagctgagatgggccccgtgcctggggcttaggaacagtgaagtgtaagccatgagggtgggtctcaagtgaggctggcagactcctctgactcctgtctgctcccaaggctaaggccagtgggaagaagctgcagaaggtgactctgaaggtgtcgccacggggaattatcctgacagacaacctcaccaaccagctcattgagaacgtgtccatatacaggtacgctcagcatggggttggcccatccactctgccacttggggcagtgggtggagtatcccatctgaatccaggctctaccacttcctacctgggtgacattggagcctcagtttcctcatctgtaaaatgggggtgggaacagatcctgctgcacagcgctgttaggaaacgtggagtgcacggcacctggctcatgatgagcatttggttaagtggcagctgctgctgtcatcatcaccagttgcagaagacagctgagcccacccgtgcccttcccccctactccccaccagcatgccgctgagtcgggcttggagcagagaactgcagagtcactgccttttccttctgctgtgaatgcagcagctcagctctgggtatctggccagacattccagggaggcctcagccaaggtctgaagtcagagtatagatggtctctctagtgggtcctctggtcagcccttagagcctcagactatccccacctctctcggctggtcagttgtagtttttcagaactggaagggacagctcaggtccattttacagatggagaagctgaggcccagagagggaattgcctaaggctgcacagtgaggtagtagctaaactggaactaggatatccgggccagagccctgtccagcaggctcccgtctgcctggcatccctccaccctcttgctttgtctctaagcagatggctcagcccgttggtgcacaggccagtagtagggtcagtagatgtgtgttgtgggggtctggctgatgtcttcctctcaccggcctgatcatacctgccttcctttagtcaacagtttcagatacctattctgccaacgtctgtgccagatgaggactccaatcctgctcattgccctcaaggagcttccactctagttgggtatagtcgggaggaaacaggagatagagcatagtgttccaaaaaggcaaggaggagatctgcctggggaaatcccggaaggcctcccaggggaggcggcaccttgctggggcttgaagaataataggatctagtttgttgttaccaaggacccagtaacatttagagcaggaagctggaccccctgggatggagaagaggtaggcagggacctaacaccttcacgctctgcccaccggggtgttgatgcctgtgattgaagctggggccacatggttgaggggtgagtctatggcgctcctgtcccacctctgggttgaggggtgagtctgtggtgctcctgccccacctctgggctaccggcccctccccgattgagactctgaggctgactggaggcaacgaggagggaccagacaagtgagggagggtgggaggccgagggctcgggtggcccctaggttacaggtgcgactgggggcagagagggtgctccatgcagagggagttgctgtgtgtctcctcccgggcccactggggctccttgttgggtcctcgtcacacacgcaccccacccctactcccagctcttcacccctggccacagctccagaacttgcaagtgtcccagtcaccctgagagagatggacctgaatctcaccagacctctgggcaggggcatggatcggagggcaggtggggtgggggaggccaggtgaagggcattggtgagcaggggagtgtcctgctttctgcttccccttctggccagttggcacacagccttaagaggcagcatggcagtcatggcctctggagtcctacaagtgagttcaggtctgggctcaggtctttagcctcagtttacttcatctgaaaaacatggatagtgatagaacccgtctcagagggtagctttgagaatcacatgaggtgaggtctagaaagctcttggcacattgcctggtatgtggtaagggttcagctattactgttttggggtgtggctcagtgtgggatgggagggagagggggaagtgccctgcttccagtctttaccccattccttccttcctgcctggcctgggcccctcctgcacagatggcctaggtacccagcctggaggccaaggctggattcccagagtctgccctggtggagtgggaatagcaggttctctgcaactcaggggagctgccctgcagggcttcccacatgtgctcaggcccctgtgccaggtctggtgatgcttcctccttgcctttcaggatctcctattgcacagcagacaagatgcacgacaaggtgtttgcatacatcgcccagagccagcacaaccagagcctcgagtgccacgccttcctctgcaccaagcggaagatggtcagcggggagggctggggcggggacagggtccagtggccttggcagccttgctctgggtggggggctgtctggtgtgggaggcaggacccaaaggtgaccattacttaagaagagggtgaaatctctgggaaccccaagtgggtgccgagagctaaggggtacagtggtggggctgcaggcaggcaggtgaaccgccggtcagctttgtgtgggcagtagctggcccatgtccccagtgtgtgtctgggcctgttctctctgtaacgggatttgctgggttgagattgttttggatctcctgtctttaatatggtctagggatgcagggccttctggtgattggtcctcggaaatgggagatcaggggggcctagggtggaaggcaaaggcgagagccgtcagagaaccaggcttgctgtgactggagtgtggagggcaatggctgtttcttggtgcctcctgtgagttcattccagctgtgaccagagtgtggaggacagtgaccgtctctcggtgcctcctgtgtgtgcattctagtgctaggcttccaggtcttcactcgtttaattctcacggctctgcaaggtggcaactgttactctctccatttttttttcttctttttttaaagttttaatgaggaaacagactcccagaggccagctatcttgctgtcagggttagagtgggggtttaaacccacgtttcttcccctccctgcgtgactggagagtgcagagctccttgtctcatttccaggacaccccctgaccacatcttagctgggatgagtgggaaccttggtggtcacgggggatttgtcctgaatttgggggcaagaagtggagtgggtcaacctttggcattgcagcttttgtttctgagacccccaggatctgagcattctccctataaggtgcttcctgacatccattgatgtagcattgacacctgttaacctctgttgacagctctgagccccagtccccatgccctatagcccttggaacctaggagacaagatccccttccctcccctgtcatcaaaggacatgtcaggtacatcacagtctttgtggtccccaggcttcctgctgcccatcaggacacactttagatattgtgtaagttgtaacaaatgatcgcaaatttagtggcttaaaacacaaatgtattctcttatggagaagaaaaatgtattctgtgacagaagtagatcaggagtctaaactaggtcggcaggattgtgtttttttctggaggttctggggggaatccatttccttaccttttctacctcccagagactgatcacctgcatttccaggtttgtgggcctgtcctcatcttccgagccagcaatgtagcatcttctggtctcctgatttcatcgtcacattgctgcttttagctctgactctcctaccccgctcagcactccttctgatgacatttggacactctgagtaatctgggataatctccatcgccacatccttaactcacttctgtaaagcccgtttgctgtgtaaggcagcattcacgggtctcagggattaggatgtggacatcttgggggcggacacacgattcagcccaccacaggtgtcatggaagaggcactgtaggaggagacagtctagcggtctcctggctgatttgctgtgttaccttggagaagatcctgcctttctctgggctgcttgcctatcagcagaatgagaaggttgcctcagtgacctccagggttgttctgaaaggccccaggttcttttgaacaccttgtttctttcctgcagactcagtgtcactggccacttgcctcgtgaagtcccagggctccaagttgctgtggcatctcctgtgagttcccacagatgtgactcgtggctttgtcttttaggaggccacacagacttaaaaatacagctccttatgtccccattgttcatctcttcctgcccgctgaccagggcaggccctgggcagggacagctggccctgggtgggaggggccttcgacggtgcagaggcttcctctgggatgaggggtctgggagtaagagagaggtgcaggcccagctcttacaagggagacctggcctgtggtcagagaacttcacacagacttgagtgaaatcagcctaccctcaggccatgaggtcagttacgaggaaaacagagccaggccgctgctcagccactgactgcagagccctgaccaggcagcagaagggcccctgccagacacccaaactcttcatctttcttagtgtattcttctcaggttgggttgatggctggagtggtttatccatctccctaccctttgctacctggcctccctgcttcaggggccctgcggagccctctccaagacagcgcagcccagcatggtgtaaatacatcacctgctacctcaaggtcttagcccaacccaggctgacagtgtgttggtggcctagacatgttggaaatcctagattcttgggctaagtggaagtgttcttgggggaggcaggagatggaatagctgcgtcagcctccgcacctgctggcagctccgccacagaggtttggcaccgtctgtcctggcctgagccatggagaaaacatccaaggcggtagagaacagcccagcatcagtacctggaacccaggggggcttagttctggggtggtagtaaatctcactaacttccctgaagttagagtcagtgagacttccctgagacagacaccttgaatggggctttgaaggctgaggagccaggaggagtttgccaggccgagagaagggggtggggtggtgggtggggagtgcacaccagcatgggattaacacacgtgcaaacgcagaggggcgaagtgaaatggttcccctggggtgggtggtgaggcagcttccgtttgcagtgggccttgaatcaggatgttgagggccttgaatcaggatgttgagggccttgaatcgggatgttgacaaaacgtcagtcattgtggctgggggcctccacatccctactcttcctggctgggctgccggaatgagttcatgacccattgaggttgggggagaaaggctcctttctacatcacccaccagtccgttcaactctggggcagcacagccaccccaggtctcccctccctggtgctgctgggcacagccagcatagggttcctccagggaatcccttccatctgcccaaccgggaggcctctgggctccaaagtgaaggtgtcatgcaggtgctgggcctgggctgatggtaagcaaagtgctacccccatttccacccaggcagcacggggccaggctgctccctcccccatgaccattggcatcttggagtgatccttgtgcaaggtttttgcttctggggcagcagggctgctggggggcatgtggctgtcttggtttgagtttctggccccttttgagccatgagcagcctggttcctgggaacaaggaatgtgaaaaactgggcaaggtagcatccactcaggataataaggcagacccgaaggccagaggcagtcaggaggggtgggcatcccgcctgggcaggcctgagcagtccctccacctaatgctggtcctcggatccctgcagccaccccaggaagcagggcccaccccactcccagtccctgcccagcctgggcttgcagctacctgcacacatccacctcttgggttgtattcagtttaacttacagcttgggacttcagggcaaaaaggtaggaatgtatgcaaatgaacaatcagatttatgcaactacagtctaagcttgtgtctccagatttccagcaggcttaaataatggcgttttcatatccctgccacattgggtgtccagcccttgcttgggtggatagtgatctgacttgggctggtaattagcccatatttttagttcatgggcaattctcaatggtaactgggtctattaaacttgattcagatatgacagcttaaattgtaaacagctgcgaagagtttcatacttaattaccatatttaagttttgccataaagtgcctgtacttccatcaaaaatgtaaatgttggagacattcaaatgaggttttatactttcgtgaagtgtaattggcacggatcagtcagtttgtttaggaattttaaatatttttttaaaaggagttttaaaggcagtggccacaggtccatttctcaattaaattgagttgtctgggggagggcagggagcggggctgaggctggtgaggcctgaacttgtagacttgaaagaggctggtgctttcttctctcagccagggcttcagaaggaagctagatgtttccggctatagctacgaactctgggacttccactcccagaagctgagctgattaaccctggactggaatggctgagagaggaaggtgttgagatgaatatgggctggggataggtcctgggtggaatgaggcctgcacctcaggtgaatgtaattcacccagcattgttgccacctctgggaggctttggcctgctcccgagggcaggggtgttcagattgattcttgcttttagggtgcacaaagctgggggaaacacaggcaggggagccagtgacactttcacatgcatagtgccagagggaggtgggtggggctcgaggagtctgggactggtgacaggagaggtggtgacatctgagttgggtttggaggggtgagggagagttcccctggggtgaagggccgaggtgtggcccttccttacaggtgggttatagcactgaccggttttggtccccgggccttcattgacatcttgctcctatcaggaaattgacaagccttctactctctttgtgggatccagttatggtcccaaccggaacctaactttcacctctctggctgtggctcatttggggcaatggctgggcccttccaattctggcttttctgttctccaattccaagggctaagtccacaggtaattagggagggtttcttggaggaagtaagcctcacagttcattgaattcagggaagcccaaaggggaaggaaannnnnnnnnnnnnnnnnnnnnnnnnnnnnnnnnnnnnnnnnnnnnnnnnnnnnnnnnnnnnnnnnngactctactgcctctgcgaggctatggccttatgacaccccaggctgctttggagacctgggaagggccaggaccctgctctgcccagcaggcattccagagcctgggatggagctgcagaagctgcagggagggagccagggggcctggcctggaggccccagccctccagtgcagacttgctctgccctggctgacactgcacccctccccatccccacttcctgttttcaggcacaggctgttaccctcaccgtagcccaggccttcaaagtcgcctttgagttttggcaggtgtccaaggaaggtgagactttgcatctacattgtgggtgtggtgggaggtggggagacacataaaggccctggggtcagacctggaccgacttcctgcctcatcacccacctggcttgtgactgtgagcaggtcccttcaccgctcagtctcggttttcccatctgaaaaatgggaacagccgtctccctccccaaaggtgcttgtgaggattaactgacatctgaaaggtttctttcctcccggctggaaacctgaaactgccccttgaggttggccaccgctaatcacccctgcccggtgattgctggggacagagtgctggggtctgaggctccaacatgttgtgccttggtcctgcagagaaagagaagagggacaaagccagccaagagggaggggacgtcctgggggcccgccaagactgcaccccccccttgaagagctgtgagtcctgacggggaagggggattgaccatgcggtgttggggttgcgcttcacccaggggggtcccactcctgcctgggctgggagagcctcttggtttttcacttgtgttttgttaaataaataatacacgttcattacagatcaattagaaaatgtagataaggggaagaaataactcattttagtacattttcttctagatatgtccctatgcaaatatataaatatgcgtctatctttctatatacttaacatagtattgtgtggtcgcttaagaaaacttaactattgtgaatacaaaagtttcagtctaagccattagtcaggttctcactctgtgggcagctgcgcatctgctgtggggaggtgccagggccgggctctgctgggaggcctgggcagggccacatcagaggggagggtcagggccaggacagcccagggagggggccaggaaggaagaggctgatctcccactgacaacctgaccggatccctcacagtggtcgccactgggaacctgctggacttagaggagacggctaaggccccgctgtccacggtcagcgccaacaccaccaacatggacgaggtgccgcggccacaagccttgagtggcagcagtgttgtctgggtgagtggttgtgtggccagcagatcggtgatcctcagcctgacctctgggtgagcctggggctgctccagggaccaggccctgggacccgtgacttgtgggcctctgggaggaccagacccagcccggtagtgcccaggcgcaggataggggatgaacaatgtcccttttgaacctgaggctgcatccccaacaggcttggctcccagcacagctgtctcctcacaatgcttggcctcttggcctgagcgtccacggctctgcccaccacaagaccagccaaaggcgcccttgttcttggtgtggcagagctcgctcctaccacccctccccctcagccgcctgaatgaggacccagagacttgggcagtcaccagcttggtccctgactccctcagggactcagggcaagccccctgacctctctgtctcagctttttcatctcagtaagggtgatgacctctgccaacggaatctccccgaggaacctgaaatttaattttaatttttcatttggaaataatttcagactgtgttacaaaattagtacagagaattcctgttcacccgtcatccagattccccaattgttaacatcttgcatgaccacattacactggtcagaatcaggaaacaaacacgatactgtgctgttatataatctatagaacttacacatttctccaggtgccccttcagtgtcctgtttctggcccaggatccattgcagaatcacatgttaacttgtcgtctctttaatttttaaaaatctgggtactgggggctcccctggtgtccctcgagcctgttctctgctgtttgggaaccacccttgccacttgcccatcctcaccagaaggccatggagggacctcacctgtcgcttttctgctgaggctgtgggactcctggcatcagttatccctcatgaacttggaattttggcttggcttttggaagtaaatgaaggcaagaaaactcccttccccaccctcttccttttggaatttgaaagccatagaagtcatcaggtccaatgccctcctcttattgaaggaaaagctgagtttcaacgtggagcagtgacttgcccaaggtctcacgggcaggtagcatggaccagggcactgaacccacctgggtctccagacaccctgggacatggcctttctcctctcccacgtctccagctttgggtccttgggctgagatgctggcgatgcacccaggcaggaggcctgcctgaggccgtgcctccaggcgcccaccctgagcttgtgtcctgagtccctgtagcttacccagggctgggacaagccccagctgtgagcatgggctcccccaaacatagttcttatctcctgctttgttttccccaaggagctggatgatggcctggatgaagcgttttcgaggtaatgctagcttcctgtgctgggtagggggcctggtgtgcgtgggctggccctgctgccctttctcctggggacctttcccctgattaagaacacaagccactcagaccccctccagagcaacagtcccatccctccactcaaatgcttccaggggcagggagctcactggggaggaaaccccttccagcgttgtccagagctgttagaaagttcttactgttgagtcaaaaactattcctggtggctgctctgccgcagtctgaggtgagcgaaacacactgcagctcaagttgatttcctccgacttgaggaggcgtggccttcaaaaatgggcttttttttttttttacaggctttgctccctccacaggtctgtgtttatgaacaggggaagggagaaagtgtttaatgaagctcgtgaagcgttccatagcagggaaggtcaggcacagtgaggaggtgttttggtatagcctttggtggcatttccccgttttcccaggggccatccttgtggccccctgcagcttggggacatgccactgagaaggctgtggctgaggagaggcctgggcaggtcagggttccgagccctgggtccccgtctgtcaggcctccctttctcacttgagaccctcagcagcctcctacagccctcccacatcaggggctttgtttggggttggagtcagcgatttttggtccagcgggtggggacagagtcagggtctttgccctcctgcctcctccttcctcttccttgcctccttcttgccagggactagtggaaaccccttggtccagcctggggcgagggcgacagtgacaccttccctgcctcactggctgacgacacctgccctctgaagaaaatcttttgtttgctttctccacattattttgagcatcatgtgccctttattaacaattttgaaaatcagcaaagcattaaacagaaagtaacaccatcctgtaatcccacagcccagagttttgggcttaattcatgctaatcctatacatatacattattttgcattgatcagctcatcgtatttgcattttgggatcctgatttttcacttaacagcgatgtgtcagaagcattgctccaggctgttaaaagctcctcgtaaacacctcttccattgactgcctaacattctcttaagggaagctgctataatttacttgactctcccctattcttttggacatgtaggttgtctccctttgtaaatttatttttcgaacagcacggtgttgacacagttatagccaaagaatcttccgtgttccctcccacagcttgttccccaccccacccccacccccgctgctccctttaccagccccttctcctctttcctgggcatgtcctgactgagctggggcacagagtgggtgctctggcctctcccgggggtgggtgcaccgctggctgcccctgacttttctgagctgtttgactctcaaggggaggtgctttgatctgaggttactccacctcccctgcaccgggggcttccttcttgggccatgtgccctgctgttccccactggtgccccctcgcgtctgaccctggggcgcgccagccctcacccaggctctcggctcacacagctctgccttccaggcttgcccagtctcggacaaaccctcaggtcctggacactggcctgacagcccaggacatgcattacgcccagtgcctctcgcctgtcgactgggacaagcctgacagcagcggcacagagcaggatgacctcttcagcttctgagggcccggggccagccggacacaagcggccctgacacgtgatggaccaaagccacctgctgcgggggagccagttctggggcccgcctgccacctctcccagccctcagcattgtcagcctgaagatcagagctgcagccagtcaggcaggggagagatttttcttttaagccctgctctttctctgagaaccaaaagatgccttgaatatttattcagtgacttctggcttatgctcagaagccagtctgcgtcaggcacgtctcctgctgcgtgacatgtgcagtgctgtaatcggctcccgcttgctctcctggagcaagctctgccctggctgtgggtatcaggactgtgaccaaagcatttctagtcccttctctctttctaaggacccaaatttccctgggggcatcctgcttcctgaaagctgttggatttcagtgatttttccccccaccccccagcacaggagagcacccacagccgcagaaggggaatgtgtcctcctgctctgcttcctcagggcccagcaggcgggggtttgagccctggaccccaggctcttagagactaaggggcagctcctgaccaaagacgatacagcttggcactttaaagcattaacagcaggtgtgaccctgagggctcctccatggtgctgcattgagtccagctttccttctgcccttcctccaggagaaggggcccaaggtccccgtggatggtctccacctgtgcttggaaccagtgtaactggctgctccctgctcccagggactgacacggggatcatctctgtgaccgccctccgtcgggcccctgcctgccttctcccctccacgcaaggctgtgctcttcctctggtttctgtgtgtccgtttgagtgtctgcgccccgcctccccatacttcctgggatgatgtgtgaaacctgacacctagatttatttggaaatattctatgaccactttacagatgaggaaactgaggcctcaagcgtggaggggtagagtgaagagtagaacccaggtctgatgccaaagctgctttcttctctgcctcctcctcacgcaactcacacctccttttcttctagctttgttgtcctcccaggaaccaaaaaaccccagctattttctgaccaaaatgtgtttcataacaaaccatctggtgcctttccacacagaactggcaggagcctcgtgtcctgctagctgtctctcttgttgatttccgtgaaaatgcaagtgtttgaagtctgctcattccgagggtgaaacaaaatccaaccctgtcagaatcatgctgttctctttgctgacactgtgaccctgggtcgggacagaccagcagcaatctgtctttagaatcgctttccttcctccccttttgcccccgtggggctcccggcatcctgaaagccagcaaagcctccagcatcttttccatcctgaggtgcctcccagtggcctggcttgtcggagcaagtttcatcagccctagggaaaacacggccctcctgggaacctccttacctggagtaaccggacaccttagacggaggtgcctgagggtggggtgggatttgcagggtcattatcagaacatgaggataacttccttgcccctgctctgtagccacctccttggcaccggcctctatttgtcataaggcggcgtgggcgaggcctgacacaggccagccttggcacgaggggggccaggggttctgagaagcgctgccctgtgagagccacgctggccttcgtctccatctctggttgacgggctgtccgtgtgcctcctgtgtgtctgcagacaagtcttgctgtgctttatttgtgaaactttaatgaggaaaaaacaaataataaatgttctcgttttgaaactcaagcaacgctcatcaggtggagtagactggcggcagcgtccggcggctcctgccctttggggatggcagcagcagtgaccacaggctgggtggggccgcgtgcccaggggcagcactgagtgggggtgatggtcttaggttcctggggttgaaggcccagtggggcccccttttcacccagcagctgggtgtgtgtgtgatgaggtcacctctggatgactcatggaggctacaccagggatctggtgcatcggctgaagcgtctgagagccccggcgggggactgtggccaggctgtgagtcccctgcagtgtgcatgaggttgtgtacgtgtccacgtgggcgttttccacagagaggatgtccattatttccatcactttttggatccgcaacactttatcattccacagacttgctccgggctgaacgtggactgggcctgggtctcagtactggggacaggggtccaggcgtggcccagatgaactcaggatgtgtggtttgggtgtgttgggggatggtgggaagtatttcagtgtcttgagagactcagggtctagccctagctctgccacttggaggctgtgacacttgatcagtcacctcttgagccttgattttcccgtctgtgaaaatggtgcaatgacctccccgctttttaccaccctgggttttgtgtgactcagtggtgaccatcatcacattgttggtagaacacttgtgcattcaggttatctcagaaccaaaggcaactggaactcaatatgtctaaaaatggtaaagtaaaatagttagcaaccagtgttaactgagctcttactatgtgccgggtgttgtgctgagctctgcaccatattgcaacggttgtgctgagcgcagatggcagatggcattagctcccgttactgctgaggacactgggctgggagaggaaggcagctgtgcttcaagtgctgggcggggccacagctgagccgccaacctgtgtggcccttaccccgccatgtcctggcttcccaggagcccagtctggccatatgctgcccgagaccacctgttgacctgtgcggtgaccctcacagaaaggccactctcttcaggttctttcagccactctccggagattccccaggcctctgcccctcagctgtggcttgtgggggtccacttggacatgtatctctttatccctttgaaactggtattttaagcgtccagaacccagaggcagagccctcatatcagcatcaggctgactccctgtgaattctcagtggttcatggatgactaagaaatcctcccctttcttctttccctcataatctgaaaagacacccaacaagtttatctttcggtttaaatttggccaatgtctttagtctccggatgtctcggattatgaatcctgagcgccagccgtctgctctttcatgcataagggatgaagccagggagaacaaagtcgcctttcagatttgacgtgactttcagcttcactgggtggatgttggggtctgctctcccaggaagagatcccatcccatgtacatctggggacttttcaacaagcctggctagggaataggggcagattcacatctggggggctggcttggggcctggtcttcctccggccattcccaggtgctcatcagaggaggtgcccgtttgtatattaagaagtaacccggccgggcgcagtggctcacacctgtaatcccagcactttgggaggccgaggcaggcggatcacgaggtcaggagatcgagaccatcctggctaacacggtgaaaccccgtctctactaaaaatacaaaaaattagccaggcgtggtggcgggcgcctgtagtcccagctacttgggaggctgaggcaggagaatggcatgaacccaggaggtggagcttgcagtgagccgagatcgggccactacactccagcctgggcgacagaatgagactccttctcaaaataaaaataaaaataaagtaacccttgggcctgttaggtcttttgcacctaacactggtgatactagtccttgcaacctcacatgctaccaggtaggtggtcctagtcccattttcctgatgaggcagctgagggtgaaggaggatcaacaagttgaccaaagtctcacatccactcggggatctgggatttgaaccctgctctctgaccccagcgctccggatttccactgcacagtgcctctccgtgcagatcaaggcaaaccccaaccgacctggtgtgccctgctctgcctcgccagcagccccagctaccacggaagacactggaagctgctggccagtgggtgtctccacaggcagaggctgacttcctagctagacaccagagcagatcccacctcttccccagtggctgccctttggggccacttctctggacatgcctagtttagaactccacaggggtatgtctcattgcattgagaccctgctttgtccccagtggcactgctcagcctgccagtggggcccacagtgagcattggtgcccctcagagaaggaagccttcctctgggaggtgaatgccagcctcggaagggcaggaaggagggtgcacatcttgaacaccagcagcatccacacgtaccagctagtttaagctgctgcacggcccctgtgcttgcacgtattgttagcccattttagagatgatgataccaaggcctgtggcggttacatgatcagccagcctcacacagctattaggaggcaggcctgggactcagagccagtgtgttccccactgtgctgggtggccctgcctctgcaggtcacttgggacattggcaaatcaggatgaccttgcttgcttaggaacttctgaacccagcccagagtaaccttagccaagtgtccagcacagaggtactggatcagatggtgcgtttgtggccaggacagatgtgggctgtgtcatgaatccttgttgccagacagcaattctgactgcacctgctgagccccagcacggcctgtctcagggtgactgaggcacagctgctcttgaccccctcgcagtccaggggttatagttcatggtgccctggaaagtccccgggcatgagctgggcttgcagtaggccagcgggacattggaagtcagagctgaggtatggcagctggggaagccaggtcaggctcttagaagaggggcatattcctgctgggcatcaaaggaagggtagaatggttggcgactgcatgtgctagcctgggagctccctgaggacatgcctgtctgatttgccccatggcctcagtgcccagcctagcacctggcacagagtggccatcagtgagtcagttcatcaggaggggagaacagcctggctcccatgagagctgtgagaaagggcagccctggctcagcaggcagcgctggagtccctgcagcctgggagtccactttgccggctgtcagacccttcctgtgacagctccccagtgtgcactgggtgcactgggcttaggcactctgggtctccgtcacacacagccgatggcatggcatgcccagcctggtttggtaaaatgttgtgtggtccaccctctgccccaaccaagatcttggttttcatgctgtcttcaaagtgagattctagaatgttaatgctgggagagcccctgatggttccccagcccacccactgagcttataatggggagttgagacctgcagagggcacaggacttgcccgggactcacaggcagttaagagagctgggatctgagctgtattttccaccgactccatgcccagtcctccatcaacctggagtaaaggagagagaagtccctcccactcttgctagaaggggcccatgtgcttgcagggaactggatgtgatgttggtaagaagaggctggagaaaggaccttggtggattcttgagcatgtaatgagcaccagctcatcatccgtctctccactgtccccctcaaggacgctgaagtctcatctgcagctcaggctgctggccagacacctagaagagggggcatggagctgcagttccgagtgcagcctctggggccacagccgtcaggactggctttcaatcccagacggccgatttttagccgcagaaacaacttagtagcctgtatctcagtctcctcacctgttaaataggataaaggtgcagtccaaacaggggctgctttgcggggcggggggaggtcagatgggggtgggggaagaccagtttctccccaggggtaaggcccacccagggtagccaaggtggggaggagacaagttgtgtcttaccagctcccctgatgcacccaggtgcacactcaggccccgccacgttgagaccaccacattatgccctcaggaaaaactcaacaaactctactgtctagtgaggaaagcgttgcagtctagctgtttccagtaggaagggatttagtgaagagcaccagatcacaaaagccctggcagggcgagggtgcaggtggtccctgcaggggctcagggatctggcggctgctgctcctgtaggtcccggtggctgcatcccggggcagagctggccggaagctgctggcaagggaagttgggaagaggtggtttgcaggcatcagcccttgcggctcaggagggcacagggaagggaagggaaatggtgctgagatgcagcagaccccctggcaccccaccaccccaacactgttggggggcagggagggtaaaaggagctgagggaggttagcccggagaaaacctggctgccacacctatgtcgggagctatgccgaggctttgcacacgttacgtaatccttaggacagccacgtgaggccatgaactgacctgatcaagatgtgaaaagctaggacagcaccccggggctatttcacacaggcggggcctgctcctgcctctccctgagccaggctcattcatccaatgcccagtgattgagtgcccaccacatgccaggatgcatgccaggcgtctggaacatggcagcaaacaaaacagcagaaatccccatcctcatggagctgacgctcccccaaatatgtataaatatttgtaaatacgtaaaaataggtgtggtgtaagcactccaaaggaaaaagggcggtggggggaaggggagtggcctggccggcagcgctgctgcacctggggtggtcagagttggacagagtgctggaggaggtagggaggccccagagaaagggcacctgagagggcaaagagcaagcgcaaagccccaggattgcagtttggaatgtgccaagggcaggaggaagtctgaggctggagaggagggaggaaggaggtggactgggaaatgggctcagagcaggtgcaggcctggaccacagggcggtggcaaggctcagacctgctgtgcagggctcagtgtggggtctcgaggacacgaaggctgcacagccaggggcaatgcagagactgaggctctaggatactgaggctgtcatccagggtcaagcccaagagagagcaacctccgggcttgcaagcgggcagatggaaggttgaaaaggcaaccccatgtcctcctgctctgttgtctgagcggggggcttccagatttgttgaagaaaaggatgtgtgcatggccagctgcctgggtttggtggtggtcccaaatctgtgtgtcgggagccctgtgggtgtctgtgggcctctggcagtagcctgagtcagagattggtgtatccccgtgtgatgtggagggctggtgtctcttggtccctgccagccgagcaagaggctgatgcagcgagtgttctgggcatgctatatcatttctctgggtgtgcatgagtgagcctgtgttggctccgtgggcctgtatgtgccaggagcgtgtagacctgaaggtctgtacatgagtcaagggtgagaggcctgtgtgtttccttgtgcgtctgtgggttcctgcttgtccgtagtgggcagcagtgaggggtgtctttgactttggcctgtcattgtctgtttcatgctcacttgacattccacagctcagctgtagttcttggaacgaatggaaacagacagcacccaggacccagtaggactggcctgtgcttcttggatacttgggttcagggtctcctccccagcggtctctaacagctgaggtagggacgactcaccgtcccggtccccaaatgcagtgctttaaactcagagaccctttcttcgggccgcaaggctggaccagggctctcactacccgggtgggaagactgtatgatgtttgggccttgccagccccaaggaagagtcagatctctaaacctgggggcctcctgggaaagccaggactccagcactgtggaaagagcatggaggtagaagtcagaaggacctgggttcaaatcccacttttgcccaggcataggggctcatgcctgtaatccaagcactttggaaggctgaggcaggtgaatcactagagtccggaaatttgagaccagcatgagcaacctggagaaaccctgtctctactaaaaaaaaaaaaaaaaaaaaaaaccagctgtgcatggtggcatgcatctgtagtcccagctactcaggagactgaggtgggaagatcacttgagcctggaaagtcaaggctgtagtgagctgtgattgcaccactgtactccagcctcggccacagaatgagaccctgtcttacaaaaacaaacaaacaaacaaacaaaaatctcactttgtcatttcctagttcaaaaaccttagtcaaatggctgctccgtttccttatctgtagaggcgggaccggcgtcttgggcctactgtggagattaaatgagcactgagtatgtgcccagccctgggctaagagctttacacaaacgaccccatgggcttctcacaataactctctggaatgggtacaggccccattttgcagaagaggaaactgaggcccagagagatggcatgacttgcccatggtcactcagctgggaactagtagagccaggatttgaaccaggcagtctgacttcaaaagcagcagcatgaggctgggtgtggtggctcacgcctgtaatcccagcacttcgggaggccaaggtgagcggatcagttgaggtcaggagtttgagaccagcctggccaacatggtgaaaccccatctctattaaaaaaaaaaaaaaaattagccgggcatggtggcatgtgcctgtaatcccagctactcgggaggccgaagcaggaagatcacttgaattcgggaggcagaggttgcagtgagccaagatcgtgccactgcactccagcctgggcaacagagtgagactcctcaaaaaaaacaaaagtaggccagacgtggtggctcacgcctgtaattccagcactttgggaggtgaaagcaggtggatcgcttgaggtcgggagttcaagaccagcctaaccaacatggagaaaccccatttctactaaaaatacaaaataagccgggtgtggtggcacatgcctgtaatcgcagctactggggaggctggggcaggagaatcacttgaaaccagaaggcagaggttgcagtgagccgagaccgtgccactgcgctctagcctggtcaacaagagtgaaactccatctcaaaaaaacaaaaaacaaaataaaacaaaataaaaacaaaagtagcagtatgagacggtgaaaggaaagcagagcgcctggctttgggtgcccggccagtggtggctgttactactgaggctcagagagatgaagcaacttgccacaggccacacagccagaaaggaacggggccaagattcaaggccaatcctaacccaacacaccatccactttatctttcacagaggctctctcccaccccatccggcctgcccttcagtggaaactgagatggggcccagatttggggtgggacttggctaaggtcacacagaaggaggctgcccctcctgatgtggaggtggcagcatggtgccatcaggcagaggcactaggagtggcctgagacacagacccaaggaggagccagcggtggggttcaggcctgcacctgctgtctctaagagcagaggagcttctgcccggtgcagggagcctggggcggctctccatggcgatgttcctgcgagcgtggcagtcggtcctagccccacttagtcaccccaggcagcagagaccctgtgccatccccgcattcacctcctgagaaagatcgggaggaagcatgtcctgaacgctgctttattgcaataaatttgtggaatcagctcattacatttaattagaattatttaattagaatcttaataaaagagtagagcaggaaggaggctgatgaacggagctgaggagagccttgctgagtgtgaggagcagacccagctgggaggtggagtgggggaggggctgccaggatgcgagcctggatggctaggcagaggggacgtgccaggaccaccaggacctgggctgggctttccctgacctgttccttaccaggtggccctgtgggcaggtcctgggctggtttcctgccctcaaggaactcgaggttcatgcagggaacagacgaggagccagacagttaccacgcccagtgcaggaggcagagtcacatgccagccagagatgagcgtcgagcctggtgtgcggttaggaaggctttctacagcagggaggcctgcggtgagacctcactgtgttgaagttagacgaggaggggaagggctccaagcaggtgtgagggaaggcggagcatttgaggcacctggcggggacaagacagggtgcatagcagaggcctggcgccgggtggcaggctcaggtcccggcatcaccgtgagttggctctggcaagtgacctgggcaggttatgccaccctcggagcctcatcttccccatctgtaaatgggggtgatagtggggctcttgtgtggatgagaggagctgcagagagcacttggaacagtgcctggcccacgtcagtgcgtgtgcaccagctattgggactgttgttaggattgtcgcagtggaggtctccagcaggtcatcagttacacaggtcgggagctcagggggcatctgggctggggacgtagctctgtcatcagtgaagcggcaggtgtgggtgagccccccacctccatttgctctttcctcattccctgaaaaagacagttttgttcagagatctcaccccaacagggctctggctcttcagggaacactgggagagttatttcctctctctctctctgtctctctctcctcagcacacaaagaagcgggtgaccgttgactaaagacaaaaatcaagcttttaaagcattaaaattagttttatacagaagtcttgctgatgactatagacagaggcctatggcccgcaagcagccctccagagagggtttgtcagacaactccggcacggcatttgagcccactgctgatatgcagctggtggaggttcggtagtgcaaaatcacattgaaatttgggtgcaggagtccatctggtgatagattacagaggcatcatcactaaccccgttagacatcattaccttatgtgtaggaaaaggcaaggactaggatcgtttgtctttttttttttccttaagacaaggtctcactctgtcgcccaggctggagtgcagtgcagtggtgtgatcatggctcactgcagcctcaacctccccggcccaagcgacccttccacctcagcctgttgaatagctgggacgacaggcacacatgccactgcacctggctaatttatatattttttgtagagatgaggtttcaccatgttgcccaggctggtctcagactcctgagactcaatcaatccatccaccttggcctcccaaagtgctgggattacaggtgtgagccactgtgcctggtgtggggccatttatcttttaaagaatatagtgactcaggtgagagacgtgagggttttgtctttaaagcatcttt

SEQ ID NO: 203 - DNA, 2748 bp, Homo sapiens
taccccagagctgcctgagaactggacagacacgcgggagacgctgctggaggggatgctgttcagcctcaagtacctgggcatgacgctagtggagcagcccaagggtgaggagctgtcggccgccgccatcaagaggatcgtggctacagctaaggccagtgggaagaagctgcagaaggtgactctgaaggtgtcgccacggggaattatcctgacagacaacctcaccaaccagctcattgagaacgtgtccatatacaggatctcctattgcacagcagacaagatgcacgacaaggtgtttgcatacatcgcccagagccagcacaaccagagcctcgagtgccacgccttcctctgcaccaagcggaagatggcacaggctgttaccctcaccgtagcccaggccttcaaagtcgcctttgagttttggcaggtgtccaaggaagagaaagagaagagggacaaagccagccaagagggaggggacgtcctgggggcccgccaagactgcaccccccccttgaagagcttggtcgccactgggaacctgctggacttagaggagacggctaaggccccgctgtccacggtcagcgccaacaccaccaacatggacgaggtgccgcggccacaagccttgagtggcagcagtgttgtctgggagctggatgatggcctggatgaagcgttttcgaggcttgcccagtctcggacaaaccctcaggtcctggacactggcctgacagcccaggacatgcattacgcccagtgcctctcgcctgtcgactgggacaagcctgacagcagcggcacagagcaggatgacctcttcagcttctgagggcccggggccagccggacacaagcggccctgacacgtgatggaccaaagccacctgctgcgggggagccagttctggggcccgcctgccacctctcccagccctcagcattgtcagcctgaagatcagagctgcagccagtcaggcaggggagagatttttcttttaagccctgctctttctctgagaaccaaaagatgccttgaatatttattcagtgacttctggcttatgctcagaagccagtctgcgtcaggcacgtctcctgctgcgtgacatgtgcagtgctgtaatcggctcccgcttgctctcctggagcaagctctgccctggctgtgggtatcaggactgtgaccaaagcatttctagtcccttctctctttctaaggacccaaatttccctgggggcatcctgcttcctgaaagctgttggatttcagtgatttttccccccaccccccagcacaggagagcacccacagccgcagaaggggaatgtgtcctcctgctctgcttcctcagggcccagcaggcgggggtttgagccctggaccccaggctcttagagactaaggggcagctcctgaccaaagacgatacagcttggcactttaaagcattaacagcaggtgtgaccctgagggctcctccatggtgctgcattgagtccagctttccttctgcccttcctccaggagaaggggcccaaggtccccgtggatggtctccacctgtgcttggaaccagtgtaactggctgctccctgctcccagggactgacacggggatcatctctgtgaccgccctccgtcgggcccctgcctgccttctcccctccacgcaaggctgtgctcttcctctggtttctgtgtgtccgtttgagtgtctgcgccccgcctccccatacttcctgggatgatgtgtgaaacctgacacctagatttatttggaaatattctatgaccactttacagatgaggaaactgaggcctcaagcgtggaggggtagagtgaagagtagaacccaggtctgatgccaaagctgctttcttctctgcctcctcctcacgcaactcacacctccttttcttctagctttgttgtcctcccaggaaccaaaaaaccccagctattttctgaccaaaatgtgtttcataacaaaccatctggtgcctttccacacagaactggcaggagcctcgtgtcctgctagctgtctctcttgttgatttccgtgaaaatgcaagtgtttgaagtctgctcattccgagggtgaaacaaaatccaaccctgtcagaatcatgctgttctctttgctgacactgtgaccctgggtcgggacagaccagcagcaatctgtctttagaatcgctttccttcctccccttttgcccccgtggggctcccggcatcctgaaagccagcaaagcctccagcatcttttccatcctgaggtgcctcccagtggcctggcttgtcggagcaagtttcatcagccctagggaaaacacggccctcctgggaacctccttacctggagtaaccggacaccttagacggaggtgcctgagggtggggtgggatttgcagggtcattatcagaacatgaggataacttccttgcccctgctctgtagccacctccttggcaccggcctctatttgtcataaggcggcgtgggcgaggcctgacacaggccagccttggcacgaggggggccaggggttctgagaagcgctgccctgtgagagccacgctggccttcgtctccatctctggttgacgggctgtccgtgtgcctcctgtgtgtctgcagacaagtcttgctgtgctttatttgtgaaactttaatgaggaaaaaacaaataataaatgttctcgttttgaaactcaagcaac

SEQ ID NO: 204 - protein, 278 aa, Homo sapiens
LPENWTDTRETLLEGMLFSLKYLGMTLVEQPKGEELSAAAIKRIVATAKASGKKLQKVTLKVSPRGIILTDNLTNQLIENVSIYRISYCTADKMHDKVFAYIAQSQHNQSLECHAFLCTKRKMAQAVTLTVAQAFKVAFEFWQVSKEEKEKRDKASQEGGDVLGARQDCTPPLKSLVATGNLLDLEETAKAPLSTVSANTTNMDEVPRPQALSGSSVVWELDDGLDEAFSRLAQSRTNPQVLDTGLTAQDMHYAQCLSPVDWDKPDSSGTEQDDLFSF

SEQ ID NO: 205 - DNA, 36312 bp, Mus musculus
  misc_feature (1)...(36312): n = A,T,C or G
tcctcctctgtgaccaggtttggtggcaaatgcctgagggccgaggcgggagaagtgagtgtagcctaggctatcaggtgcgttcagagggaaacttagggaaacctgcctcaaagaggctgagcgtgtagctgagaggcacagcatttatctagaatccaccactaagggcctgggcaggacatggctcagcagtaagacttgaccaaatccaccagtgaggagctgtggcttagcagtagaccacctgcctagcatcccccatgcgggactggggagatagttcagtggtagagtgcttgcttaacaaatgtgaggttgtaggttcaatccctgatgctcacgcacagtattcagaagataaaagaccaagaaagtaataactatttgtgtccagaacatacagagaactctcagaactcaataagaaaaacaattcaaaacttttaaacagacagtatttggaaaaacatcacccaggatggtaacaaacagcacagagactatacgcatgcttggtgttggcattggggaatggagattggacctccagaagatgctgctggatgcttccaggctaccttgaaggctggctgtggcgtggcaggggagtcgagcagtgtagaagataggcaggtgctttcttctgaggcatacctatggtatggtgtagccaaactagatactgacagcaagaaaggtaaatgcctgaccccaggagtaactgagtgttagggtccagcacagcacctttagaacagccccgcgtcaggcctgagctctcgggagatgagtgtggaagcgggtgtgtccaccgcatagatgactccctcagagtctgctgtacaagtccactgagtgaagatgccagagagaacactagtgcacgatgcagggctattgggccaggcaggggaagccccagagctaaagttacttcagggtttgtggtggccgtttgcaggtgtgtcccactgtggtttcttattgtcatacttcagtatagccttacttttttgttttgttttttcgagacagggtttctctgtgtagccctggctgtcctggaactcactctgtagaccaggctggccttgaatcagagatccacctgcctctgattctggtgtgctgggattaaaggtgtgtgccaccgctgcctgttgaaaaatactttacatcatgactgtgaccctcacacttttcctgggggggggggggtaggggggggtatttagatttagttggttgactgatttttttttgttgttgttttgttttgtttgaaatggtgtctcactctgcaccccaggataacctggaacttgtgtaactcaacatggtctcagattacagggatccttcctcaatgcagttgcaagctgccaagtctagctctcctttctgtcttgagacattctgaactctcagtcagactgaaggtataactagccactttctgcagcacagaccctgaagctggttctgtgggctcccattttctccctctagagagccgccctggcctgggctgccgagagctggtcttcaggaacctctccaaggtgcttcctgccatctgtcatgatatcaccgactgggtggtggggacgcgggtgaaggcagcacagctgctgccggtgctgctgctgcacgcagaggaccacatcacccagcacctggagatcgtcctcagaaccctgcatcaggcctgcaccgatgaagagaaggctgtggtcggcagtgtgagtgtcctaccatgcaatggcaaagctctcagccctgtagaagcagttcttagtcaccagctaggtgaaggggtagacctctcctgcccttctcacctctcccatagtcagccactagcctggccctggtggtgccctccaggcaaactttgtttcacctttgatttcaccgggcacatgcagcaggctctgcttccagtgaccaggctgtcagcagctggcctaagagactggcttttccagcccaggcacacttatgtcatttccacacaaaacttagggggtggggggagggaatcctttcatgtgtgtttacatatgtatgtgcagtcaattgtatgagttcatgtgcagttgtgtgcatgcttatggaagcccaaatttaacactggatattagcggctgtccattgattgcaggatctctcactaaagcaggagctcacagattcagctagtcttacctagccagtgtgctctacggtcccctgtgtctgtatcctgggtactgggaggacaagaggctgtcatcccttccctcctcctacatgggtgctggggatctgaactctgatcactgggcttatgcagcaagcacggcattccctgagctacctctccaggcattaccaggaacgtgtgagcatctgttttactggcagaataaaggattttctatcttccagtatggtttatgaaggagtgggagggactgataagaagtgctgtgtgcaggctcctgtgtctgtatgctctgtgccttccctgtgtgctgcccctgtctgctccaagatgcagacctggctgggaccccaagctttgtgcctccctctccagcgactccagccccctcactggcagccctcactgctgcccagctctgtgttgtgtcttgagtgagtattttgttaatgcaaacagcagcgaagggcctgtggggctggtgtgcactgccctgcatttggccctggtccttgccattgctgaattccctagggtgcggaggcattggttgtatgaatgagacacttcggctgctggtgtcaaatgaagcaggagagccaggtgcatggcttcagagccctgggtcccatttgccttggtatcccccatgagagaaatgagggtgtatgcttccccacaggtcctgtaactcatgccctgtgacaggagaggccctgtgtggtaagcctagtcaccacagtgggagccctggctgtggccatatttccagaactctgcatcttcccttctttcttgcagtgcataagagccgcagagctcattggcacctttgtcagcccagaagtatttctgaaactgatcttagccatgctgaagaaagcaccctctgcctctggcctcttgatcctcgcttctgtcatccggggctgcccccggaatgccctccagccacacgtcacagtcatagccacagagctggcccaggagcacatctgccaggggtctgagaatgtaagtgggtatccggaagggtgggcatcaggctgtcctagtgctggccactctctgagtgtaactgctgatgctggctgatgctgccacgggtggcagcagcacactaaggtgccagtggcagcagcccctattcagccctgtagccacccacaacaggcagccatttaagatttcctcttgttagtgtcagtggcttgggcagctcaagatccatccatctcccaggagagtccagccggccttgctgctgtgggtggtcgtaggtcagggacacgtgtctgagggagtccggggactacgcagcacatcattggtgtgaacacatcctcaggggtgaccagaagctcattcttgtacgtgtcactcagcacttgaatcctatgtttgaagtaaccacttgtgacctgatggagaggtttgctttaagctgagccagagcagcctaacctggacttgacccctgggatgtgttctggttgcttctactcagggcaaaatgaaggttgctgtgttgagatgtgttaggcataccctctcctccagtaccctgatgctcctcttgggaaactaggttctgctccctggccagcactgactgacagatgtcagccctgatgctctgtgcagccattttgttgtctgagtgaaagacctgtaggtgtggtgtcacatactggtgtcttagttactttgttagtgctgtgatgaaacaccatgaccaaggcaatttacaatagaaagtattggggccttataatttcagggggttagagtccatggacatgatgacaggaagcatggccacaggcagacatggcactggggcaaaagctgagaactgacatttgatccacaagcgcaaggcggcaggagaaagttaactggaaaagctgtggacttttgaaactgcaaagcccacccctagtgacacacctccaacaaagccactcttcccaaccctttccaaacagttccactaactggggtccaaatgttcaaatctatgagcctatgggggccactgtcattcagcccgtacacctgtaattccagaaatctgggaggatggagaacagcctgggctacatagtgagaactaaggcatttgacttttaaataacaagataagaagggagccccgtgggaacagggctggagtcgtagggaggagtgagggggattgtgttcctgctcaccactcggtgtccccgtttcccagaactcatctggataaattgccgatctgtcagctgcgtgtttccctggatacacagaacattccccctctggaaggtgtggcttcaagtcttaaagaaattgtggccacttgattttttagtgtcgcttccagagaatgtagatctggcctgtcaggctcgcctgtgctgacgggagaatcactgtccagcctcctagcaaaggaggctgatgtcttttttaaagtgtattttgctttgtacatgtggggtgggtgggtggttagggtttttgttgttttttgttttgttttgtcgagacagtcctgtgtagccgaggcagaaccttaactagatagccaattttggccttgaattcttgatcccctgcctccacctccccgatcatgagacaatgggcctatgaatgagaagggggaaaagaaaagaggacaggccctctcctaagcggctgaggttttattgtacacagaagggagggtagaggcagagacaactggggccgccccagtgaacatttcctggctggctgaactgggccttgtgaggaaacggagaagagggcctggagaccaagaagccaggagaccaagagtccaagcaagaggccagcataatcgaaatggctaggttctacaggaatcagagatgctgggtgaaggagactcagcccaatccctaggctagaaagtttggggtagggaacgggtatgccagccagaatgtccataacaggtactggcgatgctaagggaggctgcactcacctgctcccctgggctctcacccaggaaggtagaaatcccacaggctgcttttctgcatgtgtgtcctttctcttttttttttttttttttgagacagggtttctttgtatagctctggctgtcctggaactcactcagaaatccttctgcctctgcctcctgagaactgggattaaaggcagtgtgccaccactgtcaggcctttattcttatcccatgtctgtttcacaggtttcataaagcgcagaataaatacaaatggcagttttaagatacaagtgaacattcacagtgtgtattttttgttttgttttgttttgttgttgttttgaaacaggggttttctatgcagctctggctggcctggaattcgcttgtagatcaggctggccttgaactccttagttcacctctactcccaagcactgggattaaagtaccccacaccatctgctggcccatgataagtattctttatccctctgaagcttccctgttggcccactgtgccctcctctgtggctgtgttcaggtcaaggcctgcagccctcaagtggggtgcagcaacttctctggctcttgctgcgtgtgtgcgtggtgggtaccacactggcagtgggctgtggagggagggatgctaactcccactgttgtcttccagaatctctacctggagcatctgctgctgtgtgtgcaggccctgctgtctgtatgtcaggaagactgtcgagctgccagcctgcagttcctggaggtgctggtgacaataatggcagtctcagatgccgtgggtcttgagaagaaggtaagggcacagcaccctgcagctacagtctctctctacaggaaatgtagttgtcttctgttagtctttagcatggttgaatttcacacctggggcaggcttgactagcaaaggtgaatgaattcagaatatttagaaggagtctctcacaaggtggcctccagggaatgacccctttatatagtcatattgggatgctggacggaccctctaatctcttggtgcttcaaaatgctcctgatcagccaaaagctatagtgaaggctgatgactgtccagtgtagcacagctcttagagttatttctgtccccttgactctgcatttaagctttaattttatttatttattttgcttttgttattgttgttgttctgtttttttagatggccttattatatagcccaggctacccctgaacttctgaaggcaaacttctgtctcacaaataaggtggagaataactgaagtaggccctcagcgtcagcctctgttttcccgtgcgcgtgcgcgcacatgcataaatccctaacgtagaattcctgtgagcctcaataaccatctgggccagatgctacttcttcagggtgagcccagagtaaggctctcagccaccgccctgggcctgcaggaggcttaggttcctgtggaaccctacctgagggggccttttcctctcttgttggggactttctctattcagattcttctctgtgaagaaacctttgcagagagtacgtgtcatatgtcatcaaagacagcttgtcactgataggactatgagttctagcaaggctgtgcgtgcaggccacaggaaggaagccagacccatcaggtcaggaagagatatatatggcccactgccctgggggaatgtcagggactgcctagtgtattaaaccctccttcagccccccactaacctttgtggttggttccagagaggccagcgagtactttcaaccctgagatctgctctgggtaggagagctatgcggggagggtgcaggcaaggcagccttcagttttacagtttgggagatttgggtggtggctttgttgtgggtgtgagggtggagggttgttcgcagctgggggtggggctagggcctttcatgtcagcttcagtgtttcagggcttttattttgtttgagtttttggcttttttagttgtgtacatatgtgtatttgtatgtgggcatgaccacatgtgtcctgagaagccagagacatcggatccccaagaattgtagtaacagatggctgtgagccccctgacatgggaccctaacacaggacctctacaagagagcattgggccatctctctagacatggttttttgtgtttgttttgtttgttttggtttttggttggttagttttttgacacagggtttctccctggctgtcctggaactaactttgtagagcaggctagactcaaactcatagagatctgcctgcttgtgtctcctgagtgctgggattaaggcatgcatcaccacacccagctggacttttgttttttaaatgtggtctttctgtgtagggcaggctgactttgaactcttaatcttcctgccagagctatctataaatagtaacagggtttttttttcatgctcgtatgtgtgtgtgggcatgtgtgcttttccatgtgactatgtgtgtaagtgtatgtgtgcatgtacatgtgagtgtgtgtgagtgtgtgcatgtatgtgtgagagtgtgtgtgtgtctgtgtgtgtcgatgccattcctctggcatcatccagagtttctctttctttgccttccattttatttttgaaagactttttgatttttgtgtgtgtgtgtgtgtgtgtgtgtgtgtgtgtacgtgtacatgagtgcagtacctgcagaagatggacaagagtttcaaattccatggagttaagagttgtgagctgggggctggagagatgactcagtggctaagagcactgactgctctttcagaggtcctgagttcaattcccagcaaccacatggtggctcacaaccatgtgtaatgggatctgatgccctcttctggtttgtctgaagacagctgcagtgtactcatatacatacataaatcttcttttaaaattcctttaaagttgtggatatgacctatttatcatgatgctgggaactaagtttgggtcctcttcgagagtagtatgtgctcttaattgctgagcatctctctggccctacctatttgcctatctgacaatcttttactggctcaccaaacagaccaggccagccagcaagccctaaggaccaccatacccactccatctctgcctccattgctgagattataggcatacaccaccatgcctggcttctcatatgggttcttgagaccagattcagggcctcgcgcttacaaatgactaagcaatcctccccctctaccccaagccctgtcttatttaaaactactttgccccttgttcatgtgtggtcgagtccctgttagcataggctctgaacacctttaggaaacacatgcatgcacagacatgcttgcatgtgggttcatagacgcacataagtgagctgggcaccttgggctgctgagtggatgggtttgtgtctgttgttacctgctggagaagcagcactggcaggcagaggcggaaagtggtgtggggaggcctgatgctctgacgtagccctgctgtggccccgtgcctgctctttggtgggcttgttctataatacttacttcctggtcagatgtttctgtttagctgatgtttcctatatgtcttagacctcagatgacaagagaatctctagaaatggaaagctttaaaaaatagactccaagctgggtgctgctggtgcgtgtctttagtcccaggtctccagaggcagagacagttggatctctgagttaagaggccagcctgatctacagaatgagtttcaggacagccatggatactgtgagaaaccgtatatcaaaaaaaaaacaaaaaatagggctggagagatggctcagcggttaagagcactgactgctcttccagacgtcctgagttcaattcccagcaaccacatggaggctcacaactatgtaatgggatccgatgccctcttctggtgtgtctgaagacagtttattcacatacataaaataaatctttaacaaaatgtattattaaaaaatgcaccagcgtggtggtacacgcctttaatcccagcactcgggaggcagaggcaggtggatttctgagtttgaggccagcctggtctacagagtgagttccaggacagccagggctatacagagaaaccctgtctcgaaaaaaaccaataaataaataaataaataaataaatgctagccactatggggaccggtgagatggctcctcgtgtcaggttgcttgctcctaaggccgacaatttgagtttgatccctggagtccaacggtgagcgagctgactccttcaagtcctcttctgacttggatacgtgcaccgaggcctgcataccctcttccccacaaagaacatcagtaaatgtaaatgaaaagaacaactggactctaagttggggctataactcagctaatttacctagtatgatacagcataaaactgtgtgttagcacatacctgtaattcccacactcaagttagaaacaggaggattcggaatttgagatattcttagccagccagactgcatgagatcctgtctcaaaaagtcaaaaatacttttttggttttttgagacagggtttctctgtagccttggctatcctggaactcactctgtagatcaggttggcctcgaactcagagatccaactgcctctgcctcccgagtgcttcgattaaaggcgtgcactgttgccaccaccacccggcctaaaagttatttttaatttaaaaatcagtctggtcccatcctttgtgtccccttttgtaggcccagaagaccatggacacactggctgaggtggaggatatccccagcagtcaggacctctaccgcaagcatgtgggtgcactcctggagcggctgacagcctcgcatggcgagtgggcagtgcactctgtgcagttgctgaagttcactgtgctcctcacccaggcaggtgagctgcagggccctggccttgaccccagcgtagttcttgttccagtgacagggcctacatagctcaggatggcatcaaaccaggtctgctcctgccttgtcttcccacatgctggggtcacaagaatgagccactgaacccaggagaaatgtcttccacggtaagccttgagaatagggtgtgccgtggtttctttggcagcttgtgttctttagctccgtctggtttacagtgggatctagcatctccagccacagaggctttttgcggaagtgagaaagaagcgttgtatttttattttgttattttttgtatttttaattccaagagatgcagcccccttcacaaagcccccagctttgaaggaaaggctgtagatacaagaggcacagccccattcctttgctccagccatgcagcgtggcacatctttgtgcatatgctagaaggtcttgtttgctgcagtgttagagtatggacagatgagaatgcagaggtggcacttacaggactgaagagatggctcattcagtcaggtacacacacacacacattcatgcagtcatatgtatgcataacataaaacaaaaaaaattttaaaggccaagcatggtatcatgttcctgtaatcctggcactggggagacaaaggcaggaggatccttgggccttgctggccagccagtttaggtgattcagggcgccctgggtgcagtggaaggtgtttccaaaatgaagtgacaagcacttgaggagaacacctgatgtcaaactctggcttccatgtgcttgcccacacaaggaataacaagaggccatcccactccctgagacgacctgccttgctggatggggttgctcctggccctgtgagcctggatcatgggaaagtcctactccatccatccttcaggacccagtaccctttcctctcctggccgggtggtcagtagtggggccctttgtactcagcctggctgcaagtagggacattgttacagttttagtgtggcttggtgagtgcccttgtgtggcctccagttcagtcctttccgattggcccagctccctctgggggccatttcccaccatcctctgccccctaagctcctgggtctactcagtgtctggaaggtggaatgtgggtatcagagcctacatgtcgagggcctttgaggctttctgctttgcttgctgagatataaagaccagaagaagaactgactcagtgcagcagctcctcctgtccctgccagtgtccccgaacactgaggggcacacttctctgatgtgaccagtggcagagtgcacccaggtctccagccaggagctgccagtcccaggaaaagctggacttgcactgcagcatgtttctctgggtggacttgtttggttgtgaggacctggtctcatgcagctgagaccagcctcagacttacggtatagctgaggatgagcctgaagtcttcgtcttgcctccatctcctaagagccggggctacaggtttccacccttgtgcctgctttatgcagtcctgggctggaatctagaaccataggtgttctaggcgggcactctaagcacagatagcccagcccttcactcagtggcgattttcttgacagacagttgcttctcactgcagctgaggtgagagtgggcttctgtctcctgcatccaagccctttatcctttgtgaatgagactccagcctgagctcttgcttttactctgagtgctggcttatcagttgcaggtttccagacatctgtcttttgatgttgacagtctgggcaaaccctggcactctcctgtgccacttggaacagtcctctggtggtcctccatgctggagggagggatcctgcttgtcttgtcagaccagcagctgctttccccgctgccatttttgtttcccttctcctcagatcctcacagctgcaggcagatgacgctgctgccgcctctataggcctccagtgccactgtacagacactggacctacaggggtctgagaaactgcatcttgaaatggagatttagatgacttgctgtgatgtctggtggtagaattagcaaattgtgcctgagactatgctaaaatgttaagtcccgtttagggccaggccatagctgagaagtgtccaggggtgcgttctggagagttagctatatatgtccaactctagaggctgggcagttccagtcaccaggcagtgaaccctcaggtaagagttgacttatgaagtctttgtgacctggggaagggtggctgaagggagtagaccctgcctcttggctttcatacgacacggtttgagcagacagtgggcatggcatgctttgattttttggatgtctcttgactttagttcaggagttcggatgagtaggccttcattgaggaccatcccaggtccttgtaaaaatgccaggcattttgtttgtttgtttgtttgttcatttgtttgttttattttgtttttcaagacagtgtagactgggtagccctgactctactggaattttttgtgtaacccaggctggcctcagactcacaggtccacctgcctctgcctcctcattgccgggattaaaactgggtgccaccatgatgatgtaatcttggcccttggagaggtagagacagaccaatctctgggactccgtggccagtcagcctagcctaagcgttaagtctcaggtccatgagagaccctgcctcaaaacaagaaggttgatggtcactaatgaacaattggaggctaagatattgtctcaattcagggcttaataataaatcctgtgtcaaaagaaaaagggggctggagaaatggttccaccattaagacctcttcctgctcttgctctcaagagacctgaggcttggctcctagcacccatgtcatgtggctctaacccctgtgactccagctccaagagggtcattgcttccggcctgatactgcagccatgcacacagcctcaggcacacatgaacagtattaaaaataatgaagttatttttttaaaagattaatttattacgtatagtgttctgcctgcgtgtatgcctgcaggccagaagaggacatcagagtgagccaccatgtgggtgctgggaattgaactcaggacctctggaagagcagccagtgtaatctctgagttctctctctagcttcctgaagtaaaaaaaattaataataataatttaaggaagaatttaggccgggcgtggtggcgcacgcctttaatcccagcaatttggaggcagaggcaggcggatttctgagttcaaggccagcctggcctacaaagtgagttccaggacagccaggactatacagagaaaccctgtctcgaaaaaaccaaaaaaaaaaaaaaaaaaaaaaaagaaagaaagaaagaaagaatttagggggctggagagatggctcagcggttaagagcactgactgctcttctgaaggtcctgagttcaattcccagcaaccacatggtggctcacaaccatctgtaatggggtctgacaccttctggggtatctttcaaaaaaaaataatttagaataatttagaagttgtaaagagaagctggatttgtgtcttggtcacatagggagggcgatgctggagtttgttagtgtcctcagcagttgggagagcagcatgtcaggaaggcgagccatggcctgtggcttgcagggctcctaccccagcagtgaggcctgggaagccatcggtggcctgctgcagcccctgttctctttcctaggcccggctgtgggagaagcgctgcagcatgtgatccccaccctcagggcctgtctccagccctccacagacccacacatgcgcctgaagctcttctctatcctgtccatgatgctgctgaggcctaaggacactgtcgattctcaggggtaggtcgaccctcaggtctgtgtacagcccacgtatgtgttggatgggtcttcccacgaccccctgggcagggcccccaaggtctaaagtccgggcttcttggtggtctgtatctctagaatccaccccactaggtaaacagtgatcttggtgagtataccacagagacacagacagtaaatcaaagtcactttagaggagtcattaaaattccatcgagtgagaaagttttagggcgcattaactattaatggcttctgtttcggctgttctgttttaaaaggcttttggcacctttcagacctaacagacctgactaaattagcattgatggtgaaggcttaagggtagtctgttatctcagaaaagctcaggggcagctctgcaacctaagagcctcagattttatggctttgaagtaaagggaaagtggaacaaagagcttaggaaagaacaggctctcaggggaggagggaagcaagccaagacacacacacacacacacacacacacacacagcagctcatcctggagaggagggtagagcgaggacacacacacacacacacacacacagcagctcatcctggagaggagggtagagcgaggagacacgcacacacacacacacacacacacacacacacacacacacacccctccctctccttggttcattgaacagactaagattcaaatcactctgggaccttccaatcctgacccttggcatcctgggtcttgcagatggagacctgagaacttaagccctgtgcgagctcctgggatgccacctccccccacctcaccccatcccccacccccaaaatcaaaaaacctgtcactgtgaagtgtggtaagcaaactataaagttccctatgagtttctcattctaacctttctccttcgagtgcactcttaatgtggggctgactgccagcctctcacacgctgcaggaaattctgtttcctgcgatctaaaaaacctcagggctgaaaagggaccataaaaaggtattaatgagcgtcttggcaacaggccttcgggcaggcgtgtacacaggagtggagtgagagaatggctgagctgccaccagactgtagccttttctacacacccagtatgctgaggaacactgccacccctgacccacaaacacagctgccaggtttgggccaggttcccagtgacacacttcagacctctccagggatcaggtcagtctagagaatccaattatgcagatgacttactgagtgagagattgctactgtttgggtagggacagtttgaaaatagcattgtcttagtgttctattgccatgacggaacaccataatcaaaagagatttaaggagtttatttcacttgtacacggtccactgagagaagtcaggacagaaagctggagctaatgtagatgccactgaagagggctgcctactaactacttattggcttgctctgcctgctgttttatagcacaggagccctgtggtagcaccacccacaatgggcaggttcctcccatctcaaccactaattaagaaaatgccctgcaggcttgcctacagctagatcttagagaggcagtttttcagtcgtggtccccttagaattagtctctcagctgagtctagtttgtgtcaagttaacataaaactagtcagtacaaaatattatttggttttgatttataatcacagaatggtagaatgaaaggttggttgtccagtcaagactcagtctaaggatgtcatctctggcagggagtcaggattcttagagaaggctctctcagcaagccagagtggtagcaccaccacatccacctaccacacaaccggagactcccactccccaccccttccttgcactcttgcctgagctatggagatgcctgtgagagagttggaggggactacagaaagctctaccgaagccactgcctttgcagggggcctttgcttcagtgcttgtggtagccttgaagtaaaatttggtgtaaattctggactggagcccagtgagtaaaggcatttgcttccagacctgactacctgagttcaggcctcagggcccacatggtagaaggaaaccaactcctgcaagttgtcctctgacttccgtgtgtgcactgtggacgtgtagtacacgagtgcaatagataaatgaaatgtaatgcaaagttaagaaacaagatcggggcctacggcctaggaatgtggcttagctggtagagtgtttctctagctcacaggaagccttgtattccttctccaacactgcataaactcagagtggtggtgtacgcctgcaatcccagcactcagagtggtggtgtacgcctgcaatcccagcactcagagaggtggtgtacgcctgcaaccccagcactcagagaggtggtgtacgcctgcaatcccagcactcagagtggtggtgtacgcctgcaatcccagcactcagagaggtggtgtacgcctgcaaccccagcactcagagaggtggtgtacgcctgtaatcccagcactgagtggtggtgtacgcctgcaatcccagcactcagagtggtggtgtacgcctgtaatcccagcactcaggaagtggaagcaggggatcaggtattccaggctagcctagactatataacaagaccttgtctcaaaaaccaaacagacagacaaacagacaaacatgagctggatgtgtggctcagttggaagaaggcttgcccagcattctccagctttgtacaaaatgggtgtggaggaacatgcctgtagtttctgcactcaggcaggagaataagacatttaagatcatcatcttcagctatataggagatttgagtccagcctgggctatatgagatcccatctttttaagttaaaaatgaaagtaggttatagaccagcagtggtggggagagaagtcatgagcaactggcagactgtctgctctctgaagggtgaagccctgagcagtttgttagagagggcatgacagacagttccccttcaggtagcctcacattagcaagacctgctggacatcttctgtatgagagttcttgttaataaaagaagatgttttgtgtgtgtgcaggtacctgaagaggctcttagaggacattgcatggccctggagctgtagtcacggggttgtgaaccaaacacgggtcctctagaagagcgagctgcaagtgctcttgagcaccaggccgtctcagccccgtgttacttcttttttggttttgttggttttttgagacatggtttctctggtagccctggctgtcctgaaactcactctgtagacaggctggccttaaaactcacagagatcctcctgcctctacctctctagtgctgggattaaagatgtgtgcaccaccacacccaacccttatttcttgcttcctttgttttaatggcacagatggcaggttcaatgggtggtgacggaggtgccatatgacccacatagattatcatggttggtgcagcccttgagcacagagccccctgaaaccaccttgtgcagaggcacagggtcaggtccagttccattcccaaactgaagcatgtccttcagagtagtctgtttgtccttcctcacttgccctcttgttccagacagttccgtggctatttggatatggtaataaatgacatcctagcccccaacctgcagtggcatgcagggaggacagctgcagccatccggacggctgctatatcctgcctgtgggcactcatcagcagtgacatcttatcggccaagcaggtaaggacagctgtgaccaccccagttgtttgtccatgtgtgtatcatgggaccttacagaactgcgtcattcaatcagcacagaaagctctaaagggctgaagtctgtggggccagatcagggcagggcccaagtctcttgctctggttctcacatctccttgaaagatctgggatctggtctacaaactgtcttagtttcttatcctactgttgtgataaaataccctgacaaaagcaactcaaaagagactagggatataccaggtcacaggtatatggggagatgacatgccagccatacctgagtttggatcccagcatccatgtaaagaagcaaaaaacaaaaacagaacaggcctggccacatgggtgaccagcattgacagagcagagacagggttcactgacagtcagtaagctctgacttcgggatagaccctgtgtcaatatagaaggtgctggatggatggagagatggcccagtgcttcagagcccttctgctcttgcagaggacccaagttcagtttctagtacccatgtctggtggctcacaactcctgagaatctgatgctctcttctggactctgaatagacaaacagacacaaacatagaaaattgtgtgtgtgtatgagtgtgtatacacggtggagaatgataatgaaagatgcctggtatcaattcctggccttcaaaaaaaagcacatgaacacacatatgcattatgtctgctgcaactgcacacacagtgtagcacgtattattaagattagtgccacagaaattctccatcagatattgggtaaatggtctccgaagtcagtttctgttgaatgctcttcacaaaattccaagcttaggatgagggatagccctgggctcagctcttaccacacacaggtgaagtggctgagagtggcaggccaggcctgcgttgctctaagcagtgaagtgagccaggcgactgagccatggaaaggtgaggcttctgcacggctcctctgcctgccatccgctcacggtgtgtgagcgccccctgctgacaacaggggtcgttacctaactctcacatgttgcactctacagtgggtaggatctgaggtactcgactgaccaaattaaagcagaaatggttaagatgatctgaactttagagaaaatgcagtatttctgttctagaacagcaaagctgcaggcaaagccctccccttgtgttgtgatcccttccctcctgacatggatgccctccccaagatcccccaccgtctcccactggtaccctatctagtcagcccctgccatcatcctgctgcccgctgttttcttgtatttattacaccatgagaaggcccacttccagaagcccttctgcttccctgcaaagtgtcacagaggcagccacttggtggcagtacagtcataactcaccaggccctcagcccagggcatgcagccacactgcttgtccccatcagcacctccttcactggcaccacctaccctcccatccctttcacctcctcagcaaaggtgatgccctcttgttgatcacgagagccctgctcaggccacttacaggcctgtgaaccattcactggttcacgcctccctcattctcgtgtcccgtgaagccttatatatgcatctaaatgtggtttatctcccaggcttgtcccattacatgccaggtaagtgttctgcatttgagccacagctccaggccctttactagaaggttctaggcaggggctaccatggagccacaggcccagtcctctccctgggggatgttaagcaagtgttctgtggctaatctgtgttcctaactgattccacttttaatttggagacaggatctcagtaagagtcctcagctggctttgaacttcctctgtaatccaggcagactgaactatgaatctcctgcctcagcttctagtgctcactaggatagggctttgcccagcttttcctactttcaaaacaaaacaaaattccctgtcatagcccttacagctcccatcattccctgcgcttctctccactgaacccctggagaactgcctacacttcaaattttattttagtagagcaaagggttcttttttttttctttgtagtgtgtgtgtgtgtgtgtgtgtgttcgttcgtgtttgttcatgagtgccagaattaacttctgaatatctgtcctggctagttttatgtcagcttgacacgagctaagattctcccaagaggagaaaaccacaattgagaaaatccagctgtaagcagacgagcctgtaggacattttcttgatctagggttgatgtggaagggccagtacactgtggttgggaacagccctgggctggcggccctgggttctaaacgaaggcaggctgagcaagccagtgagcagcatcctccatggcctctccatgcatcagcccctgcctccccgttgcctcccgaagcagactgtgatttaggatatgtaagccacgtagccctaacaaaggcagcatcggaagtcactcctcacatgctgtccaccgtgggtctcttcctggcctggcaccgggaatgcagatgtacaccaccacacccagcgcgtccatgagtgctgggttgatctcgattctgaaagttctctaccatctcagtgagtcttctctccaagcccctgatgggttttttgttagttgattggtttttccattggggtggttttctgtaggtcaggctgtcctagaactccctgtttaacagagcctgcccttgaagtgctgggattacaggtgaactgtctgtaattcacatggtctgcttgccttgtgtggcctggcctatcctgtagcactctgagccgataataagtgactggtggtggcctgtaatcccagccctcgggaggcagaggcagagctctgagtgtgagaccagcatggtctacagagtgagttccaggacagccagggctacacagagaaacctcgaatcgaaaaacaaataattaataaattcaagtgattcaagggccagtgaggtgacttggcaagtgagggcagtggccatcaagcctggccaatgtgctgagtgtgctcccaggagccgtgtggttaagggaaagaactgactcttgcagattgtcctctacacgtgtgtacctgcacgcttgcacacccacagacctacacacagaagataagcaaaacttttattgttacaaacaaaaccaaaaagattcaaatctacttgtaggtgtgcttcgcagcattcaagctgcattgcctggcattgagcactggtgtgctgacagcatgggtggtcccacgttcctcacacccatttgtggcctgcaggtgcaagaggcacaagagaccctgatgccacaagtgctggctacgctggaggacgactcccagaccacacgcctgatgtcctgccgcatcatcaacatgttcctcaagaattcaggggacaccatggagccagagaaattcctcaaggtctatcctggtaagacaccaggcgtgcgtgagcacacacgcgcacacacacgcacacacacacgcacacacacgcacgcgcacacacacgcacgcacacacacacacaccacgttatttagtaacttctcttgtagttagacatagagagaatatttcttttgactcctgctgggtatccatatgccatcacagtgacagatgagccagtcctgactgagcagccttcatgagaagcaagaggtgggcattattggagatggaggccaggctctgtttccaggaccggtagggtgtagccaataaaggtgggagaccctccttgaagcagaaattttccaggttccagtttaaagtaagtgtgtgtgtgtgtgtgtgtgtgtgtgaaataaggtttctatctgccattgctacagagagcaatctacctggagctggcgtggtggggcatgatgtgggcagctgcattacctgtctagaggcagcctgagcaccaagccagttagagacagagataatgaggctgtcaaagccaacaagatcccaggcggtgacccgggacagtactgtacagaacagagcacaagaggaacagacgcgtcctgaggagcagtgagcgtgaggggacgtggggaaagccagcacagagatgcttaagtctccacgctagcttgctgacagccccagcacagtgcagggctggtagatggtcctcaggacaggtggtcttagagggctgaggacacacccctcagggttcccatttacagtggcttgctattgtcaaaaaccaaaatagtaacatcctttagaggcaagtcaagacctggccattcttgcacactgctctaatcccagcatttgagattagtgcctgggcagggagcactattgcaaatcctaggcaggccacatagaaaattccaagccagccaggtctacacaatgagacccagtctcaaaacaaacaagaaagccaggcatgatggcacaaaaccataatcctagcactttggatgtgaaggcaagagcattgagttcaaggccaaccctagcttcactagcccttgtctcagaatgaacaaaaagtcctaggctaggcatgctaggtgtgtgcctttaatcctagaacttcccaggcagaagcaagcagatctctgaattcaaggccagcctggtttacatagcaggttccgaaccagccagggctaatcaatgagatcatcttttttttttcccctggacagggtttctctgtgtagccctggctgtcctggaactcactctgtagaccaggctggcctcgaactcagaaatcctcctgcctctgcctcccgagtgctgggattaaaggcatgtgccgccaccgcccagctgagatcatcttttaaataaaaagtctcccaagagtattagataaactctgaaatggccgaaggagaaacgagtgcattaaaggcctttagctccctaacacagcctctggcaggaggaaccaaggcgtatttctccagggacgaagcggtggctccagaagagatggtgaccagggttgaaggtagacttggattctcaggcctagagaacagaatggctgaggtgggagaaatctctaccagaaaaccccacaggctctgctggcctctcacattaagtttctgattgttttgtttttgtttccacccacagtctgtgtggctctactttttagcaagcttggctaatgcttgctgtcgactgccagggctggtggcttcctacttaggagggagtgccagtgggagagtgcacacattgggcacagctcctgctctgccattatggcaagcatagctctgcaccacattgcgacttcttagtgcaaggaggaggctgttgtgtaggtgccctgggccaaccctgaacagaggacagaggggactgctcataaagggcagtgtcagctgcccccagcctgttcacccttgcaagttagccccacgaacatcaaccccctgtaattccagaattggtctgggtgccaccaagcctgggatgggtgagtccttgcactcaggtttacgcctcagccggtcttgctctcgtgactcggactcagttctctgtcatcctgaggtgtgtagatggtttccttctgtgcctgtccaaagtatgtgagcaagaagcagccagagcccagcatgttggggacccccacgagtccttccttcaggtccctgtcctaaagcctgtgctcctggcaggcggccttgcactctgcctgtgctcctggcaggcggccttgcactctgcctgtgcagtgatgcttttcatgccttcaggaagccagggccatcctgctcatgatcaagggtgtctggcagcacaaactcaacgttctggtacagggcaaagagccttcccaactaacactcagctgttacccatttgtgcgttttccagaacgtttgtattataaaagtaggttccagccagacagtggtggtgcacacctttaatcccagcacttgggaggcagaggcaggtggatttctgagtttgaggccagcctggtttatggagcaagttttagggtaaccagggctacacagagaaaccctgtcttgggacaagaagtttctgcctgtcaggaaaggtagatctggttttggcaacaggcagcctggtgaaggacttcccacagaaacaaaccaagggtgacagtgtggtggggttgctggcctcaggctcgtgagcctgcagcaggtgtgaggaaggtcagcccatgctgttgtctggtgtgcgcctaggtcgtcatgggggtctcagggctgatgggactgaacagcttcagggaagtgagggccatcattgaagatgccagtgctgaggactctcctcttctgagagatggattcttgggccccagagaaaaggccctccacgtttgcaccttggccctcatgcctactcccactccccacagagctcttgaagcgcctagatgatgtctccaatgatgtgaggatggcagctgcttctgccttgctcacctggctcaagtgcatcgagagcttggatgggaagtccgcctatcagagcagcgttcagttcctgtaccgggagctgctggtccacctggatgacccagagagtgccattcaagacaccgtcctaggtaagctctccaggctacagtctgtagggcctgtggcttctagtgccctgagaccaggtatgtgtgatgtgagtgtttgcctgtgcacgtctgtgtatccaaacatgcaatagccatgaaggccagaagaggacattggataccctcgatcttgagttacattcaggtggttgtgagttgccatgtaatatgagaatcaaatccaggtcctcttaactgctgagccatctctccagcccccacttttttatatttaacacacacacacacacacacacacacacacacacacacacacacggggcggggagggggaggaagggataaaaataataagaatactgttacaaacagcttagcatgatgcaggaaggccagcttctggatgctgctgacttagagggaagagtgggaggagtcgttgcagggggtgagggaagactctggctacactgagcctctttggcttccttggcttgagcacctgctggaagagatttgccatttgtttgttcataataaaacacactgcagggccagcgagatggcttagcagataaaggcacttgctgtcaagggtggacacctgagtgtcatccccagaacccacatggtagaaggagagaacactcaaaggtttccccttgagttctgcatgcatgtaagaaggtggtttcagccccgtgggatctacccagcagccagagagaaagattgccagctctgtaaagctgggaggtgggcacccagcccactgatgctggactcagggttctatgctctcttctagaagtcctcaaggagggcagcgtcctgttcccagatgtgctggtgcgggagacggaggctgtcgtccacaaacaccgctcagctacctactgcgagcagctgctgcagcacatgcagaccatggccgctgctcggtgactgtgtgcatcagctactgaaggcagacagtggtggcctgcagacctcgcacttgagacactgtgtccatggcctcgggccatccttgggcccccagatggtgcttgaacatcagcttctgtgtttcctaagcagatttctggggttttgtaacacacatacacacacacacacacacacacacacacacacacacacacacacacacgccagcttcccaattagctgcttgaacataatgtttttaaattacaagccccaggggtcctgggctgctttcagattcaccataatgctcttcacattgcaggaaagccaaaggattataaaacaaccaaccatccacttcctctgggctctgtcccatcatcctgtgctgaggacagtgtccagtcttgactcactgataaagtttctcccaactattctgggttttgacacagggtttccctgtgaggctttgactattctggaactctcagagatccaccagcctcttcctccccacactgagattaaagacccgcaccactaccaccctgctcctcccgattttaaatacactggaatgtcttgcagtgtgggtgcactgtcctggtgtttctgtttctcagtattagtgatgcccgtgggtaaaggatagactaggaaaccagccttcatccctaccacttgctgtagcagtcagtaaggtggccattctccagtgtcttttccaccaagtgcctaaagatttctaagtggttcttagccgcagcctatatttttgttaagacaatgttggggggggggggggtcgtgtccaacaaattttaacatttctgctttgccatttatggaattaaattatttattatagttatttgtgtggccatctgtgtgatttgactgattacactacatccgtacagacagctcctgtctccatatgtcggtgttgaggtggtccagcctgagggatgctggctgtggactccatgggatgggcccctctagtgacagtcatcactggctatgacctgcattctgacatgaggtagctggagggccaataaggcccagccatcaccagggtaagccgggtacaccagtatggtcccgagtcaggctggacatccaggtgggtgaagtttggcctcagagtgcctggcccagggactgcggcctgaaactgcattctgtccatttcccattatccttgctgcctggagctctgtcggtcatgtgcaagattgttcagctctttgttttatctattacaatctgtatttgtcaaagagtgcacataggctacagcgtacatgtagaagtaggacctgaaggactcaggtctctcattccaccatgtgggtcctggggattgaagtcgagttgacagcattggcagcaagcaccttggcctgctgagccatcttgttggtcagagcaccaggcattttattttatttattgtgcattactgagtattgaacttaagactttgccaatgtgttctacccataagccatgcccccagcccatcacttatttaaagcaggagtcacctccctccacccctagctcagcatcgcatctttgcaaagagatatccagtaagtatcctaggcttcatggatcttccggatcagctgttgctggggctccagctgtactcaaaagccttgtggatacattgctcatggtgtgggcctgtttcccattgctccaaacataatggctgagtcagattggggaggtgagtcccatagagtcgggggttatttgtagctgctttattgatctgaagttagagtgggctattaggtgacaggcacacaccacagcaccacctccattgaggcagaccgctttgaggagcctgtggggtgagcgcacttaaccaccatcacattagcatcatatggacacttgttagcagtgcagacaggccatctcaccagctgcctccttaggagggaagatgctcagttggaagagaagcctccctagggtggaagtgggaaaatgaggtcaggagctgtgtcctctcctcctcatgcccacctttctttttgaaaaacaaaacccctcagtcaagcccatgtaaacaactggatttcttttcttttcttttttgagacagagtttctctgcatagccctggctgccctagaactctggagaccaggctggcctctactcagatctgccttcaaagggctgggattaaaggtgtttgccacctctgcctggctaacaaatgggcttcttaatgtgtcacagcccgtgagacagctcagtgggtgaaacgacttgctgagcaagcccagtgatgaaagggtcggtggaaagaatgacctccatatatgcagtgtagcatgtgtgctcacacaaatggatggtacacaggagtgtattcaagggttggagagatgtctcaggcaaaggcacctgtcaccaagccctgggacacacatggtagcaggaaagaactgactctgccaagttatcctctgacactcacaaaaagacatgttgcatgccctctttgcaacacgcaaataaatacaatttagttttttaaaaaggaaaaagaaaaggccaagtggtggtggtgcgcacctttaatcccagcactcaggaggcagaggcaggcggatttctgagttcgaggccagcctcgtctacagagtgagttccaggacagccagggctatacagagaaaccctgtctcaaaaaacatataaaaaaattaaaaaaaaaattagaggccagtctaagatagatacagagtgagttcaagaccacctagactttgcctcaatataaaaagtaaaacaggctaggtgagcccaaaagatgactcaactggcaagagtgcttgtcactcaaacctgacgacctgaatcagtccccaggacccatgactgaaggaaagaaccaactcatgggagttttcttctcgtcatctgcacacacacacacacacacacacacacacacaattaaaggggggctgggcagatggctcacagtttaagagcacctgctgctcttgcagaggactagcacccatatagtggctcacggccatccagaattccatccagttctagtgggtcaggtgtcttctgacctcatgggcatcagtcactagcatgcacgtaggcaaaacacccacactcaaattaaaaataataattggtggtgcacgcctttaatcccagcacttggcaggcagaggcaggtggatttctgagttcaaggccagcctggtctacaaagtgagttccaggacagccagggctatacagagaaaccctgtctcgaaaaaccaaaaaaaaaaaaaaaaaaaaaaaaaaaaataataataataataataacaacaacaacacagaggagccgggcagtggtggcacacgcctttaatcccagcacttgggaggcagaagcaggtggacttctgagtttgaggccagcctggtctacagagtgagttccaggacagccagcgctatgcagaggaaccctgtctcgaaaaatcaaaaataaataataataaggaaggggatgtagttcaataatagagcaactgcctagaatcccccagggaggggctgggggcgtggctcagtggtagagcccctgcctagaatcccccagtgaggggctgggatgtggctcagtggtagagcacctacctagaatcccccagtgagggctggggccgtggctcagtggtagagcacctacctagaatcccccagtgagggctggggccgtggctcagtggtagagcacctccctatcatgtgctaccagtgtatctttggttcagtctcttgctttcaccaagaagtaaatgttagctggtagtggtggtatatataggcttgtcatttcagcttctcataaggctgaagcaggaggattacataataaagaatacaaaaccagcttgggcaacttagtgagaacctacctaaaaaaaaaaaaaaaaaggaggagaagaagaagaaggggggtggaggaggaggaggaggaagaagaggaggaagaagaagaagaagaagaagaagaagaagaagaagannnnnnnnnnnnnnnnnnnnnnnnnnnnnnnnnnnnnnnnnnnnnnnnnnnnnnnnnnnnnnnnnnnnnnnnnnnnnnnnnnnnnnnnnnnnnnnnnnnnnnnnnnnnnnnnnnnnnnnnnnnnnnnnnnnnnnnnnnnnnnnnnnnnnnnnnnnnnnnnnnnnnnnnnnnnnnnnnnnnnnnnnnnnnnnnnnnnnnnnnnnnnnnnnnnnnnnnnnnnnnnnnnnnnnnnnnnnnnnnnnnnnnnnnnnnnnnnnnnnnnnnnnnnnnnnnnnnnnnnnnnnnnnnnnnnnnnnnnnnnnnnnnnnnnnnnnnnnnnnnnnnnnnnnnnnnnnnnnnnnnnnnnnnnnnnnnnnnnnnnnnnnnnnnnnnnnnnnnnnnnnnnnnnnnnnnnnnnnnnnnnnnnnnnnnnnnnnnnnnnnnnnnnnnnnnnnnnnnnnnnnnnnnnnnnnnnnnnnnnnnnnnnnnnnnnnnnnnnnnnnnnnnnnnnnnnnnnnnnnnnnnnnnnnnnnnnnnnnnnnnnnnnnnnnnnnnnnnnnnnnnnnnnnnnnnnnnnnnnnnnnnnnnnnnnnnnnnnnnnnnnnnnnnnnnnnnnnnnnnnnnnnnnnnnnnnnnnnnnnnnnnnnnnnnnnnnnnnnnnnnnnnnnnnnnnnnnnnnnnnnnnnnnnnnnnnnnnnnnnnnnnnnnnnnnnnnnnnnnnnnnnnnnnnnnnnnnnnnnnnnnnnnnnnnnnnnnnnnnnnnnnnnnnnnnnnnnnnnnnnnnnnnnnnnnnnnnnnnnnnnnnnnnnnnnnnnnnnnnnnnnnnnnnnnnnnnnnnnnnnnnnnnnnnnnnnnnnnnnnnnnnnnnnnnnnnnnnnnnnnnnnnnnnnnnnnnnnnnnnnnnnnnnnnnnnnnnnnnnnnnnnnnnnnnnnnnnnnnnnnnnnnnnnnnnnnnnnnnnnnnnnnnnnnnnnnnnnnnnnnnnnnnnnnnnnnnnnnnnnnnnnnnnnnnnnnnnnnnnnnnnnnnnnnnnnnnnnnnnnnnnnnnnnnnnnnnnnnnnnnnnnnnnnnnnnnnnnnnnnnnnnnnnnnnnnnnnnnnnnnnnnnnnnnnnnnnnnnnnnnnnnnnnnnnnnnnnnnnnnnnnnnnnnnnnnnnnnnnnnnnnnnnnnnnnnnnnnnnnnnnnnnnnnnnnnnnnnnnnnnnnnnnnnnnnnnnnnnnnnnnnnnnnnnnnnnnnnnnnnnnnnnnnnnnnnnnnnnnnnnnnnnnnnnnnnnnnnnnnnnnnnnnnnnnnnnnnnnnnnnnnnnnnnnnnnnnnnnnnnnnnnnnnnnnnnnnnnnnnnnnnnnnnnnnnnnnnnnnnnnnnnnnnnnnnnnnnnnnnnnnnnnnnnnnnnnnnnnnnnnnnnnnnnnnnnnnnnnnnnnnnnnnnnnnnnnnnnnnnnnnnnnnnnnnnnnnnnnnnnnnnnnnnnnnnnnnnnnnnnnnnnnnnnnnnnnnnnnnnnnnnnnnnnnnnnnnnnnnnnnnnnnnnnnnnnnnnnnnnnnnnnnnnnnnnnnnnnnnnnnnnnnnnnnnnnnnnnnnnnnnnnnnnnnnnnnnnnnnnnnnnnnnnnnnnnnnnnnnnnntccctccctccctccctcccttttttaagagagtgtctctttatgtagccatggctatccattacatagaccaggctggcctggaacccataaagattggcctgactgtccgcagaatgctggaactaaaggcgtgcaaaaccctgcctgccattgttaccttcctcaagtgcctggggggcagggagcaacccagatttgtgtgctatcctcatcctctgcctccccacaatatcccagccccacacagaccacctttcccttttcatggtcaaagtcacgccttacagttagaatgtgtttatatatgtgtgtgtgtgtgtgtgtgtgtgtgtgtgtgtgtgtgtgtgtatttttggttttttgagacagggtttctctgtatagccctgactgtcctggaactcactctgtagaccaggctggcctcgaactcagaaatctgcctgcctctgcctctggggttaaaggcgtgctagaaatatttacatttcagtggttcctatgtaagtttatttcaaaggctacagcttgactagacattctgcctgcaagtcctaggatggctcagcaggtaaagtgcagaaactgtaggcttgagttcatattgcaggaatccatgaataaagctggagtctgtgtataatttcagcactcctaagatgaaatggcaggctgatccaagagaatattctacaagcccacaggcctggagtacttagtacagcagcaaatacccagaggaactatctttaaaaatagggtagaaggcaaggaccaatacccaaagacaaacaagaaacaaaagaaatataagaaggagctgatgaagtggcttcatggtcatagggacatttcaccaagcccgatgacctagtgttccatcccagggacccacatggtagaactgactcctgaaaattgtgaccacatatgcactatggcacacatacactcacataggctacacttccatcagaaacattttctgcttgtggttcatttatcaatcaactagtaaagtaacatttttcttccactgatatgaaatgtcctaaaatgaattaatttatatgtatatatatttttccatgattttctcaaaatgctttagtttggtctgctatttccattcatatttgtttgtgtatatttacttgttttgttttggtttttggtttttggagacagggtttctctgtgtagccctggatgtcctggaactctgtagaccaggctggtctcgaactcagaaatccacctgcctctgcctcccgagtgctgggattacaggcgtgcgccaccaacccggcttttgttttgttttgaaatactctcatgtagcccagactcatctcacacctgttaggtggctaaagctgacctctgattgccatgcctccctgagtgctggaattatacgcctgcgccatctttcctggtttctgtggtgctggagatgaaactcagggcttcctaggcaagcactttaccaactgagccgtatcccaggcacatcagtggtgtgtgctcagttttgaaacagagtctcactgtgtagctctagttctaactctcatggaactcctggaactatgtaaagcaggctagccttgaactcacagagatccatctacctcccaaatgctgggactaaaggcatacgccactacgcctagctattcattttgttctgttttaacttgaattttaatttgtatttccctaagactgaggatcctggccacctctgtgtgtggtaagttattcttaagcatctcatggcatagctggtcaatttttttcaacccatttctggtgccttcttactaagatagccaagtccctccactctccctgggattctgattagcatattctcaaaaacctttctgtacccccttccctagaaagaagtaagccccttggttccagagcctttgttctcctgcaggttccctggagcctcccgtttagaaaccagtggctcccttggctattttgggtgactcggtttccttgtcaggcttctctcctgagctaggtgtgcaagcagagccttccaggcatcatccttctaagatgctgggacctccgtaagggccacagccaggaatcagctgcttggggtgcctggccctgctctgagagcctgccggttaaagatgatgcccttcctctgcagaggaggacctggctctttgcacttgggccggagcatcatgccagttgcctgttgttctaggctccagtatgagagagcacagttgtttcaacacagagtttagcttaatccctggagtgccaggcatgcccccagcctcacccagcctcaattccatgcctattctcggatactccacctacccacattctacagcttccggcctactgaaatttgcctgagtcctgtgggtgttccagtccttttcttctgcctactttatcccctgtcttctccacttgttgggcacaaactttttaaacacggggatgtttacctgggacgtttcctcttcctcttgtgctgtgtgctgacagggtacaagcctttaggtcgaaaagcagactctaacagaagtcacagactctacctgtatttaaaagaaacaatggcgtggacctcacagttacaggagccaggcttggtaccaaatgtctgtgatccccatactggggagacaagggcaaaaggctcaggagttcaaggataacctgggctacataagatcccatgctaaaaacaaagagagactaaaacatgtccaaaagtagttccttctgggtgatgagatataagtgactttgttccttttccttccttccttccttccttccttccttccttccttccttccttccttccttccttacttgtttttggaaaccaagtgtcctatatatagcccaggctgatctggaaggcaccatgttgccctggatgaccttgaacttctgcttctcttccctccactttcccaagtgctggggttgcaggcatgtaccactatgcctggctttgtgcggtgctggggactgtacctagggctttgtgcatgctaatcaagaagtctagcatttgagccatattcagttcgtggtttgtttcttgaacttaaaaacacatgatgaggtcctctgagcatcagggactcatcttttgagacatctgcttcctgatgtgaaatctttctcccatcaacagccatatgaaaattgtagcctccactgcacttgtataatttcctatgataaacaaccaagatggattctagtcaaggctacctcctggttctacctcacacagcaagacaaatgcatggccttggcctggagccggggcttgtcatttgcagatgtctttgctcacatgactatggtatccgccttctctnnnnnnnnnnnnnnnnnnnnccttccttccttcctttcttccttccttccttccttcctttctttctttctttctttcttcctttctttctttctttctttctttctctttttttcttttgtttttttgtttgtttgttttttgttttttgggtttttttttttgagacggggtttctctgtgtagccctggctgtctggaactcactctgtagaccaggctaccctctaactccgaactctgcctacctctgcctcccaagtgctgggattaaaggcgtgtgccgccactgcctggctttttctctttctaaaagaattttaggggctggagaggtggcttaacatttaagagcacttgttgctcttgcagaggacccaggctcaattcccagtacccacgtgttgactcacaactatctgtacctccagttccaggggatctgatacagccttctgacccttcaaggccactgagcatagtgtataggagcacatgcatgatgacaagtgtgtggaggtcagaggacaagttgcaggagccaggagccattcccccctttccactatgtgggtctcagggatagaatgagaccatcagacttagaaacaagcactttttattggctgagccatcttaccatctctctctctctctctctctctctctccctcttctctctctccttgttctctctccccctcccagggggagttccctatgtagctaaagctggcttttaggcagtcctcctgcctcaagctcttgagtactatattacagccctgtaccaccctgcctggcactgtatctggctgagaagggacagccagtgctttacccacgagagggacaaaagtctttaagtctttttgggtcacagagtagaagaaactagatttacttgactgcagtgaggaagacccaaagaggaaagggcaaggtgcatccaggaattgaaactggaaggcgtcaagttggagatcccaaaaagatcagagagtggctagggctcacctgcagccagccaaagttcagagacatgaaatgtggaggtcaagggcccaggaggagcctggcatgatggagctgccttcaatcatgtggctggccaggtgctgctaagagtgcagccaggagctgaggtccaagagcctcagaaggacctggagctgtctggcctttggcagcctgagttctggcaaagggctggagggagggggggagacatccttctagagttttactgaaaagagaaatgaggaagccagcaagggcttattttgtttctaggacacaaaccttttgttgttttataaagtgtatgtgcataagagttgggcctgtatgtatacctgtgcaccaagtgtatacttgctgtctacagagctcagaagaggccatcagatcccccagaactggagttgtggatggttgtgagctgctgtgtgagtgctggaaatgaagctgtgtcctctgctagaacaaccgccaagtcatctttctagtcctcgtttgttattttgaaattaatatgtatatgttagaattatttattttattattttctatgcatgagtagctcctggcaaagggaccaatctagagtcttctggtgctggggcctgtgagacagcttgacaggtaagggctcttgctgtacaggcttagtaagcagccagttctgttgtgctgtgagtgtgtgtgtgtgtgtgtgtgtgtgtgagtgtgtgtgtgtgtgtgtgtgtgagtgtgtgtgtgtgtgagagtgtgtgtgtgtgagtgtgtatgtg

SEQ ID NO: 206 - DNA, 1793 bp, Mus musculus
ctggctgaggtggaggatatccccagcagtcaggacctctaccgcaagcatgtgggtgcactcctggagcggctgacagcctcgcatggcgagtgggcagtgcactctgtgcagttgctgaagttcactgtgctcctcacccaggcaggcccggctgtgggagaagcgctgcagcatgtgatccccaccctcagggcctgtctccagccctccacagacccacacatgcgcctgaagctcttctctatcctgtccatgatgctgctgaggcctaaggacactgtcgattctcagggacagttccgtggctatttggatatggtaataaatgacatcctagcccccaacctgcagtggcatgcagggaggacagctgcagccatccggacggctgctatatcctgcctgtgggcactcatcagcagtgacatcttatcggccaagcaggtgcaagaggcacaagagaccctgatgccacaagtgctggctacgctggaggacgactcccagaccacacgcctgatgtcctgccgcatcatcaacatgttcctcaagaattcaggggacaccatggagccagagaaattcctcaaggtctatcctgagctcttgaagcgcctagatgatgtctccaatgatgtgaggatggcagctgcttctgccttgctcacctggctcaagtgcatcgagagcttggatgggaagtccgcctatcagagcagcgttcagttcctgtaccgggagctgctggtccacctggatgacccagagagtgccattcaagacaccgtcctagaagtcctcaaggagggcagcgtcctgttcccagatgtgctggtgcgggagacggaggctgtcgtccacaaacaccgctcagctacctactgcgagcagctgctgcagcacatgcagaccatggccgctgctcggtgactgtgtgcatcagctactgaaggcagacagtggtggcctgcagacctcgcacttgagacactgtgtccatggcctcgggccatccttgggcccccagatggtgcttgaacatcagcttctgtgtttcctaagcagatttctggggttttgtaacacacatacacacacacacacacacacacacacacacacacacacacacacacacgccagcttcccaattagctgcttgaacataatgtttttaaattacaagccccaggggtcctgggctgctttcagattcaccataatgctcttcacattgcaggaaagccaaaggattataaaacaaccaaccatccacttcctctgggctctgtcccatcatcctgtgctgaggacagtgtccagtcttgactcactgataaagtttctcccaactattctgggttttgacacagggtttccctgtgaggctttgactattctggaactctcagagatccaccagcctcttcctccccacactgagattaaagacccgcaccactaccaccctgctcctcccgattttaaatacactggaatgtcttgcagtgtgggtgcactgtcctggtgtttctgtttctcagtattagtgatgcccgtgggtaaaggatagactaggaaaccagccttcatccctaccacttgctgtagcagtcagtaaggtggccattctccagtgtcttttccaccaagtgcctaaagatttctaagtggttcttagccgcagcctatatttttgttaagacaatgttggggggggggggggtcgtgtccaacaaattttaacatttctgctttgccatttatggaattaaattatttattatagt

SEQ ID NO: 207 - protein, 310 aa, Mus musculus
LAEVEDIPSSQDLYRKHVGALLERLTASHGEWAVHSVQLLKFTVLLTQAGPAVGEALQHVIPTLRACLQPSTDPHMRLKLFSILSMMLLRPKDTVDSQGQFRGYLDMVINDILAPNLQWHAGRTAAAIRTAAISCLWALISSDILSAKQVQEAQETLMPQVLATLEDDSQTTRLMSCRIINMFLKNSGDTMEPEKFLKVYPELLKRLDDVSNDVRMAAASALLTWLKCIESLDGKSAYQSSVQFLYRELLVHLDDPESAIQDTVLEVLKEGSVLFPDVLVRETEAVVHKHRSATYCEQLLQHMQTMAAAR

SEQ ID NO: 208 - DNA, 64721 bp, Homo sapiens
  misc_feature (1)...(64721): n = A,T,C or G
tgtgcgcagagacacagggggaccctttcccaccaggagcctttgttcacccccttggtctcatcaggccagcggaagttgagtcaccatgtacgctggccggcccctcctggagctggcgtgggttcggcaccaggcagcacagagggcccctgaggacatcaggctctgcccagtggggagaaagtgggcagagtgcggggtcagtgtccatgctgcccggcacttgcagcaggcacttctggcactggctaaatatttgggctgcggagggcagttcaaggggccagggcaagaacagagcccagcaagaagtgcaggcggccggctggtttttctctcccaccttccttaagcctgaggcagagcatggcccacaaggaaagtggagtctgtgtcatgggccaagtcttactcctcaaaacagtgtgatgactctgtatggagagctctgtgtgaatactgaagctccatagctgatagctgtcggtgtaagcctactgtcactgtctaaaaataaccatcactgtctaaaaataccgtcactgtctaaaaataccatcactgtatcgatagctgtctgtaaatactggaactctgtggagcacgctctgtaaatactggaactctattgctagctgtaaacggtgtaactcagtataactataccgtaactctaaaaataccataactatgtgtcgacagctgcctataaatgctataactgtattggtagctatgtataagcagcctactctgtatcaatagctgtctgttagaaagctgacatcacattgttgatctaaagcaagcttgtccaacctgcggcccgtgggccacatgcagcccgggacggctttgaatgctgcccaacaccaattcataaactttcttaaaatgttacgagattgtttttgtgatttttttttttcttttagctcgtcagctatcattagtgttagtgttattttatgtgtggcccaagacaattcttccagcatggcccgtttcttcccaatggggtttgcgtcctattagagaccctgcacggcccttcacgtgagtttcgtgtggagtcacggtgctgccccttttactctgatcagccctgcgaccccgtcctggagctccatgtgggctccttgcagacacctccaccccctcaacaacccagggactggtgccctgggaccccatcctctctgcacagaaggtcctgactgccttctgactcgtaggaaaccttccagcagcctgctagactcggcttaaatcactgaacttcactggaagggcctggaaataacttcatctcctccttacaaggctcagaggcctcagagctcactcaggtagcacagccaggtgagcctcagagcaaggtcaggacacaggcggtctagccgccctggagccttaggccccgggatggtgtctgaagttgtggaaagggggtgtcccagtgcggcaggggctaatgcatctccccacgctcacatgactgcagctccgagcccaggacactgaccacacccagaaccccggcgaggcaggcaggacggacgtatggccgtgcagttgtgaagcaggccttgaacaaactgccctgtgccgccctcaggtggatgactcatggacttcgccctgcaggggtgccctggttgtcgccaggcctgcagtcggcagctgctcagctttgctgcagttttcctgctcgatgtgtgctgctggtgaggccaccaggcctgttcttgtcaagagagaccttccgggaacaacagatgttacaggagagactggggatgcatggacagcttttcagagatgagtgtttgtcacgttcctgccaagtacctgtttgccatttgtatgccttcttttgagaaatgtctattcagatctgtccatttttaaatcgcgttattagatttttttctattgagtttgagctccttatggattctggttgtcagtcccttgtcagatgggtatttgtgcagctgtttgctcccatcctgtgggttgtctcctcactattgattgttttatttgctgtgcagaagctttttaacttgatgtgatcccatttgcccaggccatgtcccagagagtttccccaatgttttcttttagtggtttcatagtttgaggtcttagattgaggtctttaatctattttgatttgatttttgtacatggtgagagataggggtccagtttcatttttctgcatatggagttccagttttcccagcaccatttattgaagaaactgtcctctccccaagatatgtccttggcacctttgtcaaaataagttcactgtaaatgtatggatttaatttctggcttctctattctgttccattggtctgtgtgtctgtttttatgccagtgccaagctgttctggtcgctgtagctctgtagtataaattgaagtcaggtaatgtgatccctccagttttttgtttgtttttgtcttgttttgttttttgctcaggatggctttggctattcaacgtctttcgaggttccatataaatttaggattattttttctatttctgtgaagaatgtcattggtattttgatagggattgcgttgagtctgtaaattgctttgggtagtatggacattttgggtagtatggacaatattgattcttccagtccatggagtatgttaccattttttgtgtgtgtcctcttcagttttctcatgtcagtggtttatagttttctttcttttttttgagacagtctcgctctgtcatccagggtggagtgcagtggtgcgatctctgcttactgcaagctccgcctcccaggttcacgccattctccttcctcagcctcccgagtagctgggactacaggcgcctgccaccgcacctggctaattttttgtgtttttagtagagacagtttcaccatgttagccaggatggtctcaatctcctgacttcgtgatccgactgcctcagcctcccaaagtgctgggattacaggtgtgagccactgcgcctggccttatagttttcattgtagagatctttcacttctttggttaagttaattcctaggtatcttattttgtttgtagctattgtaaatggaattactttcttgatttctttttcagatttgttaactgttggcatgtagaaatgctactggggcttttttggtgattttgtatcctgcaactttactgaatttgtttatctgttctaataggttttttgtggaatctttaggtttttccaaatgtaagattatatcatctgcaaacaagaataattatcttccttttcaatttggattccctttatttttcttgtctaattgttctagctagagcttccagtactgtgttaactaacagtggtgaaagcgagcatccttgtcttgctccagatttagaagaaaggctttcaatttttccccattcagtgtggtactagctgtgagtcttgtatatggcttttattgtactgaggtgtgttccttctatacccagttttttgaagatttttatcatgtagggatgttgaattttatcaatacttttcagcatcacttgaaataatcacgtagttcttgtccttcattctgccgatatgatgtgtcacattgatggatttgtgtatgttgagccatccttgcattcctggaataaatctcacttggtcatgacaaatgatctttctcatgtgctgttgaaacagtggaaactttgcgtcagtgttcatcagggatattgtcctgtagttttccttttcgattgcatctggctggttctggtatcagggtagtactggcctcataaattaagtttggaggtattccttcctcttctagttcttggaatagtttgagtaggagtgacattagttctttaaacgtttgataacatttggcagtgaaatattgcgacccgggcttttctttgctcagtggcttttcattgcggcttcaatatcattacttgttactggtctgttcaaggtttggatttatgatttaatctgtgtaggtcatatgtgtctaggaatttatccatttcttctaggttttccaatttattggcatatagttgctcacagtatagttgctcacagtgtagctgctcacggtgttgctcacagtgtcgttgctcatattgtagttgctcatattgttgctcatagtgttgttcttcatggtatagctgctcacagtgtcgctgctcacgatgtcattgctcacggtgtagttcatggtgtagctgctcacggtgtagctgctcacagtgtcgttgctcatattgtagttgctcatactgttgctcatggtgttcttcatggtgtagctgctcacagtgtcgccactcatgatgtcattgctcacggtgtagttcatggtgtagctgctcatggtgtagctgctcacggtgtagctgctcacggtgtcattgctcatattgtagttgctcataccgttgctcgtggtgttgttcttcatggtgtagctgctcacagtgtcgccgctcacgatgtcattgctcacggtgtagttcatggtgtagctgctcacggtgtagctgctcatggtgtcgttgctcatattgtagttgctcatattgctcatggtgttgttcttcatggtgtagctgcttacaacgtcgctgctcacagtgtagttgttcatggtgtagctgctcccggtgtagctgctcatggtgtcgttgctcatattgtagttgctcatattgttgctcacggttttcttcatggtgtagctgctcacagtgtcgctgctcacgatgtcattgctcacagtgtagttgctcacagtctctaatgatgctttgaatttctgtagtatcagttgtttgtaatgtcctcttcgatctctgattttatttacttgggtcttctctttttcttagtctggttaaaggtgtgttgattttgcttgtccaaaaatctaactgttcattttgttggtcttttttattttttttaatttcaatttcatttatttctgctcttatttcttgtcttctactaattttgggtttggtttgctcttgctttcctagttctttacgatgcagtgttaggttgctgtttgaagttatctgctctttgaatgtaggtgctaattgctatacacttgcctcttagtgctgcttttgctgtttttgcatattgtgtttccattttcatttaagaatttttaaaatttccttcttaatttcttcattgacccaccggtcattcaggagcatattatttaatttccatgtatttgtatagtttccaaagttcttgttattaatttctagtttcatgttttaaggcttgtttcgtggcctaacatatggtctgtccttgaaaatgatctgtgtgctgaggagaagaatgtgtattctgtagctcttggatgcaatgttctataaatacctatgaggtccattagatctatagtacagattaagtctgatgtttctttgttgattttctctctggatgatttgtccagtactggaagtggggcattgaagcctctagctgttactgtgttggagtctgtctctctctttagctctagtaatatttggtttatatatctggatactccagtgttgggtgcatatatatttaaagttgttatatcctcttgctgagttgacccctttatcattatatgatgacctttgtctcttagtatagttttcgtcttgaaatctgttttgtcttaagtgtagctattcctgctctttcttgctttccatttgtatggaatatcttttttcgcatccctttattttcagcctacgtgtgcctttttagtgacgtgtatttcttgtaggcaacagattgctgggtcctgtttttctttacccattcagccgctctgtcttttgaatggagagtttagtctggttacgttcaatgttgttattgataagtaaggacttactcctgccgttttgttgttttctggttgtttcgtggtctgctcttccttccttcttgccttcttgttttcctttttatgaagatgattttctctggcggtatgttttaatttcttttttgtgtgtgtgtgtgtatctgttgtggcgttttttatttgaagttaccatgaggcttgcaaataacataacccattattttaaactgatagctgaacactgattccaaaaacaagcaagccaagaaaaaaatgaataaaaactctacaccttaattttatgccctcagctttttaactttttgttgtttttacttatatctttgtcttgaaaagtcattgtagttatttttatttttatttatttatttatttttattgttttatttttgagatggagtctcactctgtcacccaggctggagtgcaatggcgccatctcagctcactgcaacctatgcctcccaggttcaagcgattctcctgcctcagcctcccgagtagctgggactacaggcacccaccaccacacccagctaatttttgtatttttagtagagacaaggtttcatcatgttggccaggcttgtcttgaactcctgagctcaggtgatctgcccacctcagcctcccaaagtgctgggattacaggtgtgagccactgcacccaaccagttagttatttttcataggctcatcttttagtctttctagtcaagatgtgagtagtttacacatcacagttacagtgttacaacattgtgttgttctgtgtgcttactgttaccactgagttttatccttttagatgatttcttattgctcctcagcatccttatttttcagattgaagaaccctctttaacatttcctgtaggacaggtctgatgttgatgaaattcctcagcttttgtttgtctgggaaagtctgtctccttcatgtttgaaggatttttcactggatacactagggtaaaagtttactttccttcagcactttaaatatgccaagccactgtctcctgcccagtgaggtctcctctgagaagtcgttgccaggcgtactggagctgcgttgtacgtgatttgttgttttttctcttgctgcttttagaaccctttcttcatctttgatctttgggagtttgattgttaaatgtcttgaggtagttttattgggttaaatctggttggtgttctgtagccttcttgtacttcagtgctggtatctttttctaggtttggaaaattctttgatattatccctttgagtaaactttctaccccgatttctctctacctgctcttgaaggccaggaactcttagatttgcccctttgaggctattttccagatgctgtacatgtgcttcattctttctattcttttttcttttgtcttctctgtgtattttcaaatagcccgtcttcaagctgctcactaattctttcttccacatagtcagttctgctgttgagaggctccaatgcattcttcagtatgctaattccttttttctacgccagaatttctgcttgatgctttttaattatttcaatatctgttaatttctctgataggattctgaattctttctccatgttatcttggattttgctgggcttcctcaaatagctattttgagttttctgtctgaaaggtcacctatccctgtcaccccaggattggtcaccggagccttatttagttcacttggtgaggtcatgttttcctggatgctcctgatgcttgtggctgttggtcgatcttgctaggtatttactgtcatctttgcagtctgggcttgtttgtacccatctgtcttgggaaggcttctaatccatttattttgctttttagaaaaaaaaaattgaaaaacgtcctgcttttttaaactcttatatggcagttcggtgttcagtgctgtttttgaactaaaagaaaagggataattcgtctcatgctaattggaatttgcaggtttcttatgatactaagtagagactgatagaaaaggtggcagtccgtgagactcaggagcagccccaaatcccggccctagctgtccttgctatcaggtgagatgtttgaagctcctttctgcaaaagaagcctatctgtgggttccgacagacaggtggccgtcctgggtggggccccgcagagaccctggcacacagtgcaggaggtcagggaggagaaagcagcgaggccaaacccagcgagttcagactgctccctggctgccggcctggggcagagtgtgctcaggccttgtggccctggacgcctgcccatctcccggagagggccccatcactgtacacctgtttgggctgggggctggctgcagtctggcttgtctcagccacgccctctgccccatcactgtatacctgtttgggctgggggctggctgcagtctggcttgtctcagccacgccctctgcctgacaggctttgcagcatctcagcacatggcactgggtgagcttggagtgttgccgctcacctggattagcgtcgtggcaggtgcggccgtggcaggtgtcgactgcattaaaccctgggctgtctctgctcgagacctgccggcgccatgggtgaagacgacagtgacagtttgttctgtggggactctctagccaggtggtggaatggccgtggagctgatttgggtttctcttagttgttatctgggcatttgtatttgtggttgctagtaaggccctgtgtcagttaatgaccccggcaaacgcgccacacattcctgtgtcccctcgcgtgcttcccctgctgctcgcacgccgagagtcgcctgtgcgcaccgcacgggcagcgggagtcaggcgcaacgggcctctccttgtgtgaacttgccctcccctcacgggaccttagtgacgagccctgtcagtcattctttcccatcttccaggtggcaatgaacttcggagcagtcaggccagggcccgggtcccaggccggcaggggcggatcctaggtgcgtctgcttggctctgggccttgttggagccggggcggagcagcccctcctccgagtcccagcgagtgaccacgccatgggcacagctgctgctcgggtcccctgcacctacgactggctgtgagcgctattgctaatggtgcatggctgggcagagacgcttcatccaaagtgtcaggagggatgaggctcctgctccccacggcccagccagggactgatggcaccacggagtcggcccctggcctcacaggggacagctctgtagctcgttcacaccccagagctcccaggatccgtctgcggctggcttcagccccaccgcttcctcacctggcttcttcctggccgttcccgcttcccttaaggagtgttggtgctggtccccgtctcaggcattgccctttgggagcttggctagagcacctggtgtgtgtgaagctggtttcttccgcctgcataggcaaggtaggcagaggccctcgtgccccctcttcagacacccagcagcagaactggggaccctactggtttcctccagagtccctgggctctgggaccagacgcctttgaggtatggccacggtgcaccacacttgctgtagccacggctcaccaagcacccagggtgagacaggcccagcccggccaggaggttttcatgcagaagactttgaacacgctgcacggctcaggtagcagctgggagcctgctctcgccaacaggaccaggccggggcacggggtatgtgtgtgtgagcctgcaggacagcagcattcctctccggcccagccaggagggactggcggagctggccgggacccaggcttggtggcgcccaggaccccggccacgcgcctctgtcttggggatggcatctaggcggtggtaggtggcccaggacctggccgtgcctctgcctcaggcagcgtccgtatggcagcactcagagccgcaccgtggcgtcagccccggcatcccctttgcctacacgaatccttatcccttcctctcatgcgcaggtccggcgggcggtggcctccgtggtgggcggctggctgctgtgtctgcgtgaccgttactccttcttccacaagctcatccctctgctgctcagtagcctcaacgacgaggtgcctgaggtcaggtacgtgggcaggcggccgcgggccttgtcttcctaaacggtcatgtgtagcagtggtggtttctctttgctcccagtctctcacagaaacctgctggtgtcccttcgtccctgtgctccgaagggatgtgccgtacagaagtcgtctcgttttgtaaatggcatttcccatctttttaacattggactgagtatatcgacagagatcagacggccccctttgtgtactgtcagtagagtgctcacaagatgaagtggaatttctggtccaccttttcgggggttggggagcttcccgctctcacgcaatggggtctttgggtgacccgtgtcctggcgcagccctgcggcctcccctgcgtgccctgccctgagccactgttgtctgtctgttgtgccgcaggcagctggctgccagcctctgggaggacgttggcctgcagtggcagaaggagaatgaggaggacctgaaggacaagctggactttgcccctcccaccccaccccattaccctccacatggtgagtgaccgcggcagaggggagcgccaggaggcgagcccttgttgggtgggaaaggggcttctgagcctgaaggaagcttcagctcttgcagttctgagcccaggcggccgcgtcggaaaggtgcaggcgtctccccactgggctggggctcctgcatcctgggcagagcacgtctctcctcagcatctggagagcccccatgtgccttgcagtgacctctcccctcctctggccagctttattttaaaaaggctgtgggcttctgaaagtgtccagcgcactgccagatggtgtccgcccccctcccttggctgtgcacacaagggtgcattgaactctgggttcctgggcagctctgctggtggttggggggtgttggaaacagtgggatgaggggcttatcatttcaccaagacagagctcagcacgagggccacgggtgaggtgaggtcttcttcatggttccacatgatttccaacctgggaacagggtctcctgctgcgtggcctccccgcccttcccacatttgctccctggccatgttgcaggcacccatgtgcatctctccgcagagcccagcaggtctggctgagtctgagtggaggctcccaggtccagccccaacacatttgctctgccacgccgccggcccaccttgggcttcatctgtttagaaaccgccctcctctcgcggggctgagtgtcttccacttgcacgcggtcaagtgctttcatcacttgagtctatctgcggggcatcttcttaaaagtaaataatagatacgcactgacgaggacaaaaagtaggtgaagcgcagcccacatcagatgcccagcccaaatcagatgcccagctcaaatcagacgcccagctcaaatcacatgcccagctcaaatcagacgcccagctcaaatcaatcagatgcccagcccaaatcagacgcccagctcaaatcacatgcccagctcaaatcaatcatgcccagctcaaatcacatgcccagctcaaatcaatcatgcccagctcaaatcaatcatgcccagctcaaatcagatgcccagctcaaatcaatcagatgcccagcccaaatcagacgcccagctcaaatcaatcagatgcccagcccaaattagacgcccagctcaaatcacatgcccagctcaaatcaatcatgcccagctcaaatcacatgcccagctcaaatcaatcatgcccagctcaaatcacatgcccagctcaaatcaatcatgcccagctcaaatcacatgcccagctcaaatcaatcatgcccagctcaaatcaatcatgcccagctcaaatcagatgcccagctcaaatcaatcagatgcccagcccaaatcagacgcccagctcaaatcacatgcccagctcaaatcaatcatgcccagctcaaatcacatgccccgctcaaatcaatcatgcccagctcaaatcagatgcccagctcaaatcaatcatgtccagctcaaatcaatcattcccagctcaaatcagatgcacagcccaaatcagatgccctgagagatttgcagtctcaacttacttcccatgtcacctccctggcctagttgaggcgctgaagtagcccggggtcaggtcctggagggaaatgtattccgtcaaatacagcattaaagtagcttcttggccgggcacagtagctcacgcctgtatcccaactacacggggggccagggtgggaggatcacctgagcccaggagttggagaccaacctgggcaacacagcaagactcctactttacaaatattttaacaaaaacaaaacaaattcgctgggcgtggtggtgcatgcctgtatcccagctgctccggaggctgaggtgggaggatcgcttgggtccaggaagttgaggctgcggtgagctatgaccacacccctgcactccagcctgggtgacagagtgagaccccgtttaaaacaaacaaacaaaaaacagtttctcatgtctggtattgatgtttggtgccctgttaaatccacgcctacagagccgtggctcctcccgagcctgtgaatcacagggttgcttttcctcccggtcggcattctccaccttgcagccccaccccacgctgcacagttgctgtacagggaaagcaagcacacatgtttggaaaaggcacagaaattagttgcaagcaaggtttgttctgatggagtgaagccagtgagaacgctcgatacttttttttttttttttttgagacagagnnnnnnnnnnnnnnnnnnnnnnnnnnnnnnnnnnnnnnnnnnnnnnnnnnnnnnnnnnnnnnnnnnnnnnnnnnnnnnnnnnnnnnnnnnnnnnnnnnnnnnnnnnnnnnnnnnnnnnnnnnnnnnnnnnnnnnnnnnnnnnnnnnnnnnnnnnnnnnnnnnnnnnnnnnnnnnnnnnnnnnnnnnnnnnnnnnnnnnnnnnnnnnnnnnnnnnnnnnnnnnnnnnnnnnnnnnnnnnnnnnnnnnnnnnnnnnnnnnnnnnnnnnnnnnnnnnnnnnnnnnnnnnnnnnnnnnnnnnnnnnnnnnnnnnnnnnnnnnnnnnnnnnnnnnnnnnnnnnnnnnnnnnnnnnnnnnnnnnnnnnnnnnnnnnnnnnnnnnnnnnnnnnnnnnnnnnnnnnnnnnnnnnnnnnnnnnnnnnnnnnnnnnnnnnnnnnnnnnnnnnnnnnnnnnnnnnnnnnnnnnnnnnnnnnnnnnnnnnnnnnnnnnnnnnnnaatgatgattttgaatttcatccatgtccctacaaaggacatgaactcatcattttttatggctgcatagtattccatggtgtatatgtaccacgttttcttaatccagtctatcattgttggacatttgggttggttccaagtctttgctattgtgaatagagctgcaataaacatacatgtgcctgtgtctttatagcagcatgatttatagtcctttgggtatatacccagtaatgggatggctgggtcaaatggtatgtgggcgaaggacatgaacagacacttctcaaaagaagacatttatgcagccaaaaaacacatgaaaaaatgctcatgatcactggccatcagagaaatgcaaatcaaaaccacagtgagataccatctcacaccagttagaatggcaatcattaaaaagtcaggaaacaacaagtgctggagaggatgtggagaaataggaacacttttacactgttggtgggactgtaaactagttcaaccattgtggaagtcagtgtggcgattcctcagggatctagaactaattttgtatttttaatagagacggggtttcgccatgttggtcagggtggtctcgaactccagacctcaggtgatccgcctgcctcagcctcccaaagtgctggtattacagaggtgagccaccacgcctggaccactcaatctgttttaaaatgtggaacttagacacgaggccacttacgaactcactgttgaactcacactcttgtctctgcatcagtgatgggagtggaatcccacgcgtgctgtggtgctctgtcagtgcctctccctccagccgcctgtggtgggcttctgcgttggtcggacctttaagctaagctgtgggttgtttgctcctggtgatttcagctgggctctcctcaccaatgaggaaatgctgctccttagagagggtccagcctgtctgcctaattcatgctacacggagcccaagctgcatggcaaatcgttctccacgtgctcactgagaaaccagtggaagacccttcaggtgtcagtggggcaggaatggcagtccccaagacccaggagggtccagtccttcccgctgtgcaccggagagggaggcggggggtcggggggactgtttctggaaggtacgatctatgatccttggaatgcggtaagggagaagacagagcgaggcgcacacgcatacacacacacacacatattcacatgcatgcacatgtacacacacacctgtgcacacatgtacatgcatatcgcacacacgtgcacatatgcacacgtgtgtacatgcatatcgtcacacgcgtacacacatcctcgcacatgtgcacacccatatacacatctgcacacgtatacacatacacacctgtgcacacacgtgtacatgtatatcctcacacacgtacacacttatcctcacacacgtgtacacacgtatacacatctgcacacgtgtgtacatgcatatcacacgtacgtgtgtgtgcacatacatgtacacatgtacatacacatcctgccctaccccgccaactgtctggccctgctagtaggttcccggaaggggcttcctccctgtggtggaaacacaggctctttggaggctgcctgatttagaattggttcaaggacttgggaatgttcctgactgataattacaaaaacacagttagttatccgtgccgaggcgtagagagtgtcgttaggcacagaacttttgtttcaagtggagcagagtaaatttagaattgaatgacagtcagtcagtcgcataagcactacgttgtgttagatttttggcattttctcctcaaattacttttctccagtctgtagatttgaattttaaatacgatttctcagatttttttctacagtattttaaatgtcagatcagaagattttttgagtctcttcctcagaagtttgcactggccctgtattgccaagcacacaccctccctgccgtcctgccaccccccgcctgccgtgcccagggtctgtgacgctctccttactgtcttgcccccccccgcccgctgggcccaggctctgtgtcctcactttcccccgcccgtcatgcctagggcctgtgacgccctccttaccgtcctgctgccccccacccaacatgcccagggcctgtgacgccctccttaccgtcctgctgccccccgcccgtcatgcctagggcctgtgacgccctccttaccgtcctgctgccccccacccaacatgcccagggtttgtgacgccctccttaccgtcctgccctgtccagcgtctgtgtcatccctttcccccgcccgccgtgcccaggctctgtgtcgtcccttttccccgcccgtcgtgcctagggactgtgacgccctccttacggtcctgccaccccccacccaccttgcccagggtctgtgacgtccttaccatcctgccaccccctgcccaccctgcccagggtctgtgatagcccttcccccgggaccacgctgcattcacccttcagggctgcagctctgtgagttttgagcagcaccgcctctgtcccctgcatgtgggcatctccaccgcccagaactgctcatgggccctggcactgctgctgtgggctgcgtcctgtgtgtcccttccaggatgtcacttgcatgaggttgtgggagcgtggccgctggcgtctgctctttcctctctgtgtcggaggctcatgcatggcacctgtgtctgcagcactttccttcttcgcgtgagtcacggtccctcccgtggatggaccatctggtcaccagcaggggcatattcgggtcctttctagtttttggccatcacaggtaaagctgatgtaaacacttgcagactggtttttgtgagagtgttttattggataaacactcaggcgtggggttgctgggccataggtacagtccttactttgttagaaactcaccacacgctgttttccacacccttcgcgccatgtcacatccccacgggcactggatgagatttccaggtgctgcagtcaggccagcgtgtggggtggagtttgctgtttttagtgtgtcggttggtgtgcagtgttggcacacggtgttggtgtccagtgttgacacacggtattggggtttgctgtttttagtgtgtccagctggtgtgcaatggtggcacagggtgttggtggggtttgctattttcagcgtgtccggctggtgtgcagtggtggcccacggtgttggtggggtttgctgtttttaccgtgtctggctggtgtgcagtgttgtcacacagggttggtggggtttgctgtttttagcgtatccggctggtgtgcagtgttgtcacacagggttggtggggtttgctgtttttagtgtgtccagttggtgtgcagtggtggcccacagtgttggtggggtttgctggtttcagtgtgtccggctggtgtgcagtggtggcccacggtgttggtggggtttgctggtttcagcgtgtccggctggtgtgcagtgttgtcacacagggttggtggggtttgctggtttcagtgtgtccagttggtgtgcagtggtggcccacggtgttggtggggtttgctggtttgagcgtgtccggctggtgtgcagtggtggcccacggtgttggtggggtttgctggtttcagcgtgtccggctggtgtgcagtgttgtcacacagggttggtggggtttgctggtttcagtgtgtccagttggtgtgcagtggtggcccacggtgttggtggggtttgctggtttgagcgtgtccggctggtgtgcagtggtggcccacggtgttggtggggtttgctggtttcagcgtgtccggctggtgtgcagtggtggcccatggtgttttactttgcgattccctaatgagaggacattggggccttttcctgtgctgtggtgtgcttctgtgcacccgtacgtcgtctttggtggccattcagaactgccatccattaaatcgagttctgtgtttctgagtgcggagtttgaggaccccttccgtgctctggatgcaggtccctcatcagactgttttaggctccacagccaggcctcagctccagctcccgctcctctcctcagagctccggcagctgccgcccccatcccccctgctctgtttcctcctgccccctaccacagtagaggtgctccttctcctcggtggactcgggccctgtgctcacctcaccgctcgctccaggggccagtctgtctgctgccatcctctgcacccagaggcggtgagccaggcttagtggctctgtgagcacccagcgagctgatgagtggctgcgtgtcctgtcttaccagcaagaacggacagtccaaccgtgtggttgggttgccgagtgcgtgaacaggcaaagttcggtaatattttcagaccactgctaatgcagacggtgctcagaggtaatgacctatcaataaggaattcacatgggcctggatctgaagtttcatcagagtccagttttcctgtttcctaagaaaataaggtacacaccatgtggaaatataattcgtaccatataatttgttgttagctttgcagacacagcgtaagtttccattaacagcactgaaacctccgccttaaaaaccaagcttcgtgctgggagggttgggagggcaccacttaccgtcctcaagtcggtcatttccctgaacagagtgcccttctcacacggaagcacacgttcacgcctggtgtgtatctgacaatcacactgccagccgccagcagcagatggcttggtgacagcggctccagagtcctgtctgctttgagattatccctctgttaagattgttttccttggcaatgcctgagcgtaaaggaaagcgtctcgatgctggtgagtggccggccagagcttttcacacaggaggacagagttggctcttcttaaagcctgacttagaagtgagcagggttccctgtggatgaacgctgccacgtgacagccttcccccttcattctcctgttctgccttggagctcgcacccattctgctttgcttgtgtgtttcatccatgtgtttggaaagatggaagcttgaatggaaattgtcagaaacgttacgttgtgcaaatgggctggaaaagctggttaacattgtttgaagccagcaaggtcccacgagcattggcccactctgagttagccgggggtgttacagaagaaggaacttctttttctttttttgaggcagacttgctctgtcacccaggctggagtgcagtggtgcgatcccagctcactgcaacctccgcctcccagattcaagcaactactgtcctgcctcagcctcccgagtagctgtgattacagacgcgcaccaccgcacctggataatttttgtgtttttagtagagacagggtttcaccatatcagtcaggctggtctccaactcctggcctcaggtgatccacccgccttggcctcccaaagtgctaggattacaggtgtgagccacggtgcccagcctatgtctgctataatattaagtatagaaaaacaggcttcagaaccatgttcagaagcatgtgctgagtaacagcgtttgagtccataaggaccacgtggaggagggtggtcccctctgatagtaacattgtgtttctcctttttctgtgtttggaaacactcactcactgtctgtgctacagtttctgcgtgttgagtgcagtcacctgctgcacaggttcgtggcctaggagcctcacaggctatatcgcacagcccaggcatcgcacagccaggcacgtaggaggctgcgccatctaggcttgtgtacgtcactgtagtacgttcacacggcaacgaaatcacccaatgacgtgtttcccagaacgcaccccccaccgttcagcaacgcttgactgtaccagcggtcccctgccattttggcaccagggactggttttgtggaagacaatttttccatgggtggggcagggagcagggtggtttcaggttgaaattgttctacctcagatcatgaggcattcaattctcataaggagcacgtaacccaggtccctcacacgcacagttcacaggagggtttgccctcccctgagaatctcatgccgccactgatctgacaggaggtggagctcaggcggtcacactccttcaccatctgctcacctcctgctgtggggcccagttcctaacaggccttaaaccagtcccagcctgtgtccaggccttgcgtacccctgcccagcaccggccagtatttctttggaaacacccagaagcccaggtgcccacaaagctctgttcagctgtcagcagacccctccccggctgttcctggtcacgcatctctcattttgcaaactttccagagcggatcgtcatcaggaagaaaggtgcagctgggcgttggtggcgcatgcctgtaatactgaggtcaagagttcaagaccaggctggccaacatggtgaaaccccatctctactaaaaatacaaaacttagccaggtgtggtggcatgcacctgtagtaccagctactcaggaggctgagacatgagaatggagaattgcctgaactcaggaggtgaaggttgcagtgagctgagatcgcaccattgcactccagcctggatgacagagcgagactgcatttcaaaaaaaaacgaagagaggtgtgtttgcaccctggcttttttgttttttacaaaatgatgacaggatcatttaaacagccagcagaattttaattatttggaactaattccataatacaggataaaaacagaaaaataaccagaaaaaggttaaaaatggggtgtcctggtacaagctgttcttattaaaacataccctttagcctggatgcagtggctcacacctgtaatcttagcactttgagaggccgaggcaggagggttacttaagcccagaaggtcagtgctgcagtgagctgtgatcgtaccactgcactccagcctgggtnnnnnnnnnnnnnnnnnnnnnnnnnnnnnnnnnnnnnnnnnnnnnnnnnnnnnnnnnnnnnnnnnnnnnnnnnnnnnnnnnnnnnnnnnnnnnnnnnnnnnncagtggtgtaatcttggctcactgcaacccccacctcctgggttcaagtgattctgctgcctcagcctctgagtagctgggattacaggcgctcgccagcacgaccggcttattttttctatttttagtagagacggggtttcaccatgttagtcagggtggtcttgaactcctgacctcaggtgacccgcctgccttggcctcgcaaagtgctgggattacaggcatgagccaccgtgcccggcctgaattttgaagatcagaatcttttcatcaaagtccctgaaggcttttctgtagaaatcgacaaactgattgtgaaattctcgtgggcgtgcaaaggacccacagctgccgaaacactggggaggagtgaagctgaatggcagcaggtcctgggtgcaagactcacaaaaccacagtcatggggccacgtggtgttggctttcagaccgatgagcagaacgagagcgtccagaaacaggcgcccacacgcggaccactgacttgatgaaggctcaaagaccatttaatggcatcttttaataaggatactgtaaatgataggatcactcatacaccagaaagtgaacttggagtcaaaaaattaaccccagatgcgtcagggatctgaaggtaaagcccagaaccgcagagctagggcgaagcctttgtgacagtgggccgggccacacttcgtgggatacgtcctcaaaagaccgcagagtgatgacgaagcctttgtcaccgcgggccgggccacgcttccctgggtgcatcctcaaaagactgcagagtgacgacgaagccttcgtgaccgcgggctgggccacgcttcgtgggatacgtcctcaaaagaccacagagtgacgacgaagcctttgtcaccacgggccaggccacacttccctgggtgcatcctcaaaagactgcagagtgacgacgaagccttcgtgaccacgggccgggccacacttcgcgggatacgtcctcaaaagaccacagaatgatgacgaagcctttgtcaccgcgggccgggccacgcttccctgggtgcatcctcaaaagactgcagagtgacgacgaagccttcgtgaccacgggccgggccacacttcgcgggatacgtcctcaaaagaccacagaatgatgacgaagcctttgtcaccgcgggccgggccacgcttccctgggtgcatcctcaaaagactgcagagtgacgacgaagccttcgtgaccgcgggccaggccacgcttccctgggtgcatcctcaaaagaccgcagagctaggacgaaggcttcgtgaccgcgggccgggccacgcttccctgggtgcgtcctcaaaagaccgctctgtaacagggtaaagcaatgtgtggacttcatcaaaatgaacacttctgctttttcaaaggcctgttgaaaaaacgaaaagacaaaccaaagactgagatgtttggagatgatgtatgtaaggatttatctccagagtataggaagagctcttgaaactcagcaggaaaacaatccatttttttaaatgggcagaaaacaatttggaaagaccctttaccagggaagataggcggcaaacaagcctgtgaagaagacgctcggcgtcgttagtcatcggggaatgcaaaggaaaagcacacggaaatgccactgtgcctctcggactgctttcaattcaagactgagcgtaccgcgtgccgctgagagtgggaaggagcgcggactggctcaaacactttggaaaatggttggacagtttctaaaacagttaaacgtgcaccttccctgtggcccagcccttccacagctggtatttgtcccggcacagtgaaagcccaggccacacagacttgccctggacaccatttgaatgcttctccacagaggagcgggcactaaactggcatctccccagaacaggccacttcccaggttcagaaaggagcgggcacaggcgggcctcagaaaacgacgcagagtgaaagaagcggagaagggaggagagtgaacgagaggcttccacttgtgtcaggctctagaaagtgcagctcagtcacgggacagatccaggggtgccggggtgccttgggggctgcagtgcagaggagcagaggaagccgggcgaaggacgcagctgtcacccccaccatgccgatggcttcgcagccgtgtctctcatatggcgatggcttcgaaggcatgtctctctgatcatatggggacggcttcacagacgtgtctctctcatcatatggggacggcttcacaggcgtgtctctgtcatcatatggcgatggcttcgcaggcttgtctctctgatcatatggggacggcttcgcaggcgtgtctctctcatatggggacggcttcgcaggcgtgtctctctgatcatatggcgacggcttcgcaggcgtgtctctctcatcatatggcgatggcttcgcaggcgtgtctctctcatcatatggggatggcttcgcaggcgtgtctctctgatcatatggcgacggcttcgcaggcgtctctctctcatcatatggcgatggcttcgcaggcgtgtgtctctctgatcatatggggacggcttcgcaggcgtgtctctctcatcatatggcgatggcttcgcaggcgtgtgtctctctgatcatagggggacggcttcgcaggcgtgtctctcatcatatggcgatggcttcgcaggcgtgtgtctctctgatcatagggggacggcttcgcaggcgtgtctctctgatcatacacgtcagcacgtgtggcaagtgtgttgtttgcatctctgtgtggctctaaatgtttgttttttgagacagggtctcgctctgtcacccaggctggagtgctgtggcgcaatcctcccacctcagactcctgcgtagctgggaccacaggcatgcaccacggcacctggctaatcttcctgttttttatagagatggggtctttgccatgttgcccaggctggtcttgacttcctgggctctagtgatccacctgccttggcctccacagggctaggactgcagccgtgcaccgcctctgtgaatgttctgaacgacggggcatttgtcagctttgcgtccaccccaagacttgttttgaaatggtgaggttgaaactcacaggtgtcccttaaatgtgatgtgcggtaacttgagttgttgaggttttgcttgtgaatttctcattcttctttccctttttcgttccagagcgccgccctgtgctgggctgccgggagctcgtcttcaggaacctctccaagatcctccctgccctgtgccacgacatcaccgactgggtggtggggacccgagtgaagtcggcacagctgctcccagtgctgctgctgcatgccgaggaccacgccacgcagcacctggaggtcgtcctccggaccctgttccaggcctgcaccgacgaggaggcagccgtggtccaaagtgtaagtggccgtgttccagtcgtggtcgcggagctgtaactcgagcttaagatcccgcctctgtggtgtgcggggcccgaggctgtactgtagccaagacagcgttcccctcacccctgggccgcaggccctccccacacccagcccctgggaacaactgatctcctttctgtgcccgtaggtaacagcgtgttgagggtgaacccttcatgctcattttcaagcacactcgggggtgcagtgccaggtgcatgttgtgtagacgtgttgtgtagacgtgccgtgcaccagacagacagggcccgggctgctgacacaggaccgagatgcccagcgttcagcattgacatctgggctgtcctgagggcccttccaggcctcgcaggggctgtgggagcacccagacgggggatgatggcacagcttcgggtgtcctgcgagtggtgtccctggtgcagtcctctttctcactccctgtccacactcggctgctggttatcgcctcgtcaccactgggtacgcacgagggagtcccatgctcaggcctctcctcctcactaggccgggccacgccctgcgctgacagtcaccaccatgaggacttcacacccacctcacaaggatgcttcctagtgctcaggagaacaactaaagctttgacttgagatttcagttgaaaatatcctcatcttgaaccttaaattccattgcaaggtagcctggccagcagcttttacttctagtggtccaggtcactgttactagcccggcgtagtggcgtgcacctgtggttccagctcccgggaggctgaggtgggaggatcgcttgagcccgggagtttgaggcctcagtgagctatgattgcgccactactctccagcctgggcgacggaatgagacactgtctcagataaaacaaaaaaatctaaatcattgtgactgatttaaagtaaatgttccaggttccatgttatttacatgtcatgtttctgcttttcaaaaactaccgtgaatttaaaattgtctgtagttctctgtggaacctacaggagagcaagagacacgggggtgaggctgagaggacgagagacgtgtgtgggatccgctgtggaatcccacggtgcagaggggctggtgtgtgtgtgatccactgtggaatcccacagtgcagaggggctggtgtgtgtgtgatccggtgtgaaatcccacggtgcagaggggctggtgtgtgtgtgatccgctgtggaatcccacggtgcagaggggctggtgtgtgtgtgatccgctgtggaatcccatggtgcagaggggctggtgtgtgtgtgatccgctgtggaatcccacggtgcagaggggctggtgtgtgtgtgatccgctgtggaatcccatggtgcagaggggctggtgtgtggtgtccactgtggaatcccatggtgcagaggggctggtgtgtgtgtgatccgctgtggaatcccacagtgcagaggggctggtgtgtgtgtgatccgctgtggaatcccacggtgcagaggggctggtgtgtggtgtccactgtggaatcccacggtgcagaggggctggtgagtgtgtgatccactgtgggcttccacggtacagaggggctggtgtgtattgatcagcttagtgatgggaaggttgggtcactggtgtccgatgaggggtgtgtggtgaaccccacagctgggacacagcatcctttgggccagacttcactgcctgggaggcgtgtccggctcgctggcctcagggacgttctgagaccacacccggacccttgtacctttcctgagggctctgagcatgtgccaaggactcactctgcctaacacggggctctgtctggtgcacggctgtgtctgggaggccacggcgccgagagcaggagcccggctgagaccctcgggtttggctctgagttttctcatgtttctttctcgcagtgtaccagatccgcagagctcgtcgggacgtttgtcagccctgaggtgtttctgaagctgatcttatcgacgctgaagaagacgccctctgcctccggcctcctggtgctggcctccgccatgcggggttgcccccgagaagccctccagccgcacctggcagccatcgccacagagctggcacaggcccacatctgccaggcatctgaaaacgtaagagcacttgggagatgcgggagtggagaggaggagcctcccctgcccggccgtcagccatcgtaatgacatgtctgtgggttgccctgtgccgccaggctgggctgtcggaagcacccagcgacgtgtctgtgggtccgccccgtgccgccaggccgggccatcggaaacacctgcagtaaccggagtgccctcgctgatagcccttgttccggggcctcgtcctgggctgtgcagagctccagccctagccccagccccagctgcaggcggccgctcacgtttacattcgttgctgcccctttcttggccacactgaccacagttcacgtgtttgatgactcaggaggcgtccatggccgggaccctctggcccatgctgctgggggtagatgtggggtccacgtcatcccacccctgaggagcgtggtcgcacgtccaccatcccatccagtccccagggtacctgcacagatcgcacgtcctcagggggcactgatagcctgttccccatcagccctgcctggcgttccgatctgtgcttctcacagcccagctgaggatttgccagagacatttgtttaattttaaattgagcagcaaatccttgagctcagaagctggaacagcctgggtagttgggctcaattgtttggaataatccatagttgtattccatggaagaagaggtgatggctttgctttcatttgaaggtgagtggtccctgtcagtgtgtgtgttggactcagcaccccagatatttctgggacacagggctgcccccaccaggcggccgtgccatgcagggcgggcctcagctcacccctggaggcacttgctccggctcgatcgtttccggcggcttctatggacccaaagctggcctggggcacggggacttgccactgtgctctcagcccggcctgtcctgtgtcaggctccctctccgtcctcagaacgagaggtggggctgttgacagtcatttttgtaaactgttttaagaaacctgtaagcagttcctggaatacatagagggaaggaaacggagctggggtaaggaagggagcgggggaggggcccaggccgcgtgctcatggcatttcagccatgcttcagcttttcccaaaacccgtttttaacacatcatcgaatgtgtgtcagttctccactttccttcacccacgaggggttatgaggatgcctttgatttctgtatacagatttgcaagccagaagcattttttcctagaagggcataacttgaaaatgtgcacaggtgcctaaatccttatctcacaaactttatagcaaagaaagtgtagttttcacatctccatgttggttacaggaaaacggaattgtgtcatcccacagttgtgcatttggctccccatcttccagttttatcgaggaaaaatttaatcacaatctttcaaacagagacgtctttctgacaaagtccagtcacacgggacccctgggaagccagcctcaaccttccaggctgcgaacgtgtgtcggccctttggccaaggagccagtcacagtgaaaacccaagacgtacatttcactcctttcttgtttttatttttttgttttaggttgatcctcccacctcagcctcctgagtcactgggactacaggtgtgcaccaccacacctgggtaatttttttttatttatttttatttatttactttttgggacagagtcttgctctgtcacccaggctagaatgcagtggcgcaatcttggctcactgcagcctccgcctcccaggttcaagcgattctcctgcctcagcctcccaagtagctgggattacaggcatgcaccaccacacccggctaatttttgtgtttttagtagagacggggtttctccatgttggccaggctggtcttgaactcctgacttcaagtgatcagcccacctcggcctcccaaagtgctgggattacaggtgtgagccactgcacctggccccattttactccttaacagacttaaatttttggcaagaaagggtgaaggtactcaggtctcagtcagaatcaggcccgtggttctgtgctcttcccacgcccctgtgctcttcccgcggccggccgggctttgtgtcatgtcatttgggaagtcgattatgtttcccacagctattctccagtagctatgagaacaggttgaaaatgtctttcaagaacaaaccgaaattgttttaaaagctcgtgtttaaacagagaagtccgtgtaaatgtattctaaactgagcctggcttcactccctgccctggggttcacaggaaatctggctttagcagtaggtacttccaggtgtctcgggcccagtaggtcccctagagctcgacagacgggaactggagtctcctgggaaggagtttaggacaggtgtctagagtgaggaaatgggtaactcaccgatttgcttctcacacagggaagccagcagttgtgggatgccattgccattgttgaaataggagtctcttgtgcttttctgaattaaaaacctttgcagtcttagataacattgtttcagaaaacaatgtttgaaatagtatttcaaaaaatactgagaattatttcctgctgtatcttttttctttttcgttctgtgtgtgtgcgttgtatgtaggcagacactgaaaattgtctggtcaaatatagagaaatctataaatgtgaagtcttgtcacttcctcagagacggtgctgcgttcgtggcaggagggtggtgcttgctgcaaaggatgcctgattccctgtttgttcctgtgcttggaggtgtggtcagccaggaggggctgtgtcttctaaacgcacctgccttttgattttaaccgaaaagatgatcgctcctgaaatgtacatgacaggtcattctagaaactagccagatattgtcctcagaagtcagccagttagtacaggccttagagaaattgggctgtgggaaaaatcaggaatggaataaaaacaaatctgtggcttctgtgggagttggggccacgacagggccacacggctcctccagctccgagggagacggggccgcgcggctcctccagctccgagggagatggagccatgcagctctgtgtcttctgtgggtcagggcggggccggggtgcaaggacagaacgctgctgtagtacagtgggagtgttttgtttagtcttccatgatttacgtcagtggggaatgaggcttagagttttagagctgattaggaaatttagaaccaacccattgtctagccaaataattaccaaacttctttgaacttgcacccccattagtaaaaacagtttttaagcataggcctccaatatatgtacactgttgataaatcacgtgtttaaattacatggccacggtcctgactcactctgtactttatgaaacatacataaaatagacattagagggacgttataagaagtaaatacaggccaggcgtggtggttcttatctatgatcccagcactttgagaggccacggcaggaggatcacttaaggctaggagtttgagactgcagttagccacgattgcaccactgcactccagcctgggcgacagagcaagaccctgtctctaaaaaataagttaaaatttatttagaaagaagtaagcacacgcaaagccttaggaattcttgggtccagcacacgcctgctgtgttgcgggcttcagagcctggctgattcacagtggatgaggctggagccgggaggggaagccattcatccagcgcagccgtaggtgcagagctgagactccacctccccgtcaatcagtaaacatgttaagccatagaattttatttgtcttaaaacttggtgttatagaaaagctcaaaaatgcacagaagaggggcaggcagcagagcgactgccagcttcagcgctgaccagcccttggcatgcgtgttctgcctgcctggggccacttttctttttaactttggagggcggggagaacttgggcatgttgtaaagcagataatgcagtgcgccgtcatttccctcacaggtgccgtgtgcatcactaacgcagcttctccaccacatagctcaagtgcctgttcacatttcacaaaataagcacagattccttagctcccagtctgtgttcagttttcccatcaacaagcacgcccttttatggttgacatgccggcaccctacctccagcgcctggggggctctccctgcaagggctctcccatggctgctgcccctcgtgagccgtagactaggagccccgggcgggctctgtcggccctggcactggggccggagcgggagccctgtattagtccattctcatgtcgctaataaagatctaccacagactgggtaatttataaagaaaaagaggcttaatggactcaaagttccacatggctgtgcaggcctcaccatcatggtggaaggcaaaggaggagcaaagtcacgtcttacgtggcggcaggcgagagagtgtgcaggggaactgccctttatactaacatcagatcttgtgagacttaatatcaagagaacagcacgggaaagacccacccccatgattcagttccctcccacagggtccctcccaggatacgtggggattatgggagctacagttcaagatgggattcgggtggggacacgaccaaattgtaccaagctctgacggtgctgccggtctcttccaggacctctacctggagcgcctgctgctgtgtgtgcaggctctggtgtctgtgtgtcatgaggactgtggcgtggccagcctgcagctcttggacgtgctgctgacaatagtggccctcgcaggtgctaccggcctgagggacaaggtaaggctgacagtggtggctgctgcttgacctagcggagctcacagctggaaggcatctctaagtgaggtgaactgtctcctatgcatcccctctgtgcttgagccccaggcctcaaacatgtctgaccagcaaagaccagggattgagaaccttgcgggtgagtccccgggcaacggccttcggggcagctctccagctgccagtgtattctggcatcagggagtggagacagctgtttaatgttagggtcttcagcaaagaagcaaacaagaaataagaggtaacctttaaacctgcgcacttgagtagggtttaatagtgcacatgtcgctgggcgtggcagctcacgcctgtaatcccagcacttttgggaggccgaggtgggcggatcacctgaggtcaggagtttgagaccagcctgaccaacatggtgaaaccccgtctctactaaaaatacaaaaaattagccaggcgtgttggcatgtgcctgtagtcccagctactcaggaggctgaggcaggaaaattgcttgaaccagggaagcagaggttgcagtgagccaagatcgtgccactgcactccagcctgggnnnnnnnnnnnnnnnnnnnnnnnnnnnnnnnnnnnnnnnnnnnnnnnnnnnnnnnnnnnnnnnnnnnnnnnnnnnnnnnnnnnnnnnnnnnnnnnnnnnnnnnnnnnnnnnnnnnnnnnnnnnnnnnnnnnnnnnnnnnnnnnnnnnnnnnnnnnnnnnnnnnnnnnnnnnnnnnnnnnnnnnnnnnnnnnnnnnnnnnnnnnnnnnnnnnnnnnnnnnnnnnnnnnnnnnnnnnnnnnnnnnnnnnnnnnnnnnnnnnnnnnnnnnnnnnnnnnnnnnnnnnnnnnnnnnnnnnnnnnnnnnnnnnnnnnnnnnnnnnnnnnnnnnnnnnnnnnnnnnnnnnnnnnnnnnnnnnnnnnnnnnnnnnnnnnnnnnnnnnnnnnnnnnnnnnnnnnnnnnnnnnnnnnnnnnnnnnnnnnnnnnnatcataggcatgagccaccgcacctggccattatgcccaaaaatcttttaaccccaaccttctaatgggcttctagggcccctggaggccccagtatctgtctgcctctctggaagctgagacttagttcctcctcccattctgtctctgtggacagcccctctcggcagattctctctctgggagatttacggcctgaatgtactatggggaacctggtgtggaggaggctgctgccctccccttccttcttggggcctctaaaaacaagcttcccaaggggcgtgtgtctcagcagatgctgtcactgttagggcctgaggtaccagcaaaagcaaagtctttgcctgctggtcatgggggaggaagccaggtagccccagattcagactccaggcttggggcagtggccaccggggagcctcagcccttcctctgttcctaagcccccaaggagagcagccagctaaaagtaaaaggtggccaaggttatcatctctgtctgcccagttacttttacctggaggtctggtctgctgggcttaactctttaagccacttgcccgcccctctctgctcctcaccacctcagaggagccctgcctgcccaggcggacaccacgtccgtgtaagccccaggaccacctgtgctgtgtgcatcccagtgtgcacagtgcctgcttcatgattcgctgcagagacggcgttggtgtgaacgggatcagggtctcgccctgcacccgcggctctcgctctcctgcaccctgggcggggctccctgtggcagcctccctcccgattatcctggcaggcccggcctatgtggttcttacgcgtgagggggatagtgagtcccagcaggcaggcaggcttgagccctgagtgttggaattgtctcagtctctgacttgtaacctccaggcacaggagacgatggactcactggccatggtggagggtgtcagcagctgccaggacctctaccgcaagcacattggtcccctcctggagcgggtgaccgcgtcgcaccttgactggaccgcacactcgccggagctcctgcagttcagtgtcatcgtcgcacagtcaggtgagccgtcccgacagctggcgtgccgtgcctggccccactcaggctacacacctgctcccccaggtgctcagcaggtaccagcgccgaccagctgagctgtggttcactgaagcgtgttgttaaaagtacccaatagtcactcttgcctggggagaagcagcattttaaggagcatcgcattgaagactgtgggacgcagctcttccacttggcccgggcacacgctttcatgtgaaaccttcaaagtgtgcttttccgtggcctgttttgtagcctggcttcttaaatacgtctggattttgttgcagaatctagatgtctagccgcatgggtgctgtgtgtgtgacatgggggccttagccccagcccctctgagaccagcatttctgtggttctctttgagcctgcggatcagccacttttcctgggatggacagtgtggcccagtggggcttcagcgcggggcaagatccactgcagaaccctaagggagacgtccgctcagcagccatagtgccttgggacacacgggcccgcgctgctccacgggccgtgaactcgctgcggtagctcttcctcgtttgcctcccccggccctcccgctcccacctgcagctccgagtgcccccgcctcctgttggatgtgtgcaccagggtggtcgtgctctgcatctgaggatgctaagatcgttcttacacaatctctgtgcctggtagggactcaccttttttttcctgagacttggaaaaatacccaaaattgttctttgtcagttgcattcaaaactgtttccaaattagaaaagaaaatactggctgggcgtggtggctcacgcctgtaatcccagcactttgggaggctgaagtgggaggatcacttgagctcaggagttcgagaccagcctggccaacacggcaagagctcatctctacaaaaagatgaaaaaaaccgcacgtgcacctctgaatctaaaatttaaaaataaataaaatacagttagccaggcgtggtggtgtgcgcctgtggccccagctactcaggaagctgaagcgggaggatccctggagcccaggagttcgaagcttcagtgagctgtgactgcactgctgcactccagcctgggcaacagagcaaggccctgtctctaaaaccaaacaaaaaacaaagctggcgattgctgacgtgcactcggggcattaaacactttatgccagacgctgctctgcaagccttagggccgtcagctcatctaccctcacagccggcctgtgtggtgggaactgtgaccccgtttcacagacaaggaggcagagcacagagaactcccgaggcagcgactccagagcctccctcagcccctctcccacgggcctcttggatgggggcccagggtgttgcatttcagatttttactgaatgttactcctaacaacctcttgcaccaaattactccagccttcacctcacagtccagaaaattgggcacacaaaccccgagagacgtggcttgcagtgaagccaggacttgcatttactgcagctctggtggcttctccaccatctgttcttcctctttgcagaagcatttcttatggtgttggcggaactgattggcagcttggaacacacatctctttgggcccacatctcctgtcattcactgaaaggcaggaagactgcagtatgccgttcagtgtcaagagctgggtataaaactgtatgggtttttttgttttttgttttttgagacggtctcacgctgtcacccaggctggagtgcagtggtacgatcacagctcactgtagcctcaaacttccgggatcaagtgatttttctgccttagcctcctgagtagatgggattgtaggcatacgccacctggctacttctgtatgtttttctagaatggggtcatatatgctgccaggctagtcttgaactcctggnnnnnnnnnnnnnnnnnnnnnnnnnnnnnnnnnnnnnnnnnnnnnnnnnnnnnnnnnnnnnnnnnnnnnnnnnnnnnnnnnnnnnnnnnnnnnnnnnnnnnnnnnnnnnnnnnnnnnnnnnnnnnnnnnnnnnnnnnnnnnnnnnnnnnnnnnnnnnnnnnnnnnnnnnnnnnnnnnnnnnnnnnnnnnnnnnnnnnnnnnnnnnnnnnnnnnnnnnnnnnnnnnnnnnnnnnnnnnnnnnnnnnnnnnnnnnnnnnnnnnnnnnnnnnnnnnnnnnnnnnnnnnnnnnnnnnnnnnnnnnnnnnnnnnnnnnnnnnnnnnnnnnnnnnnnnnnnnnnnnnnnnnnnnnnnnnnnnnnnnnnnnnnnnnnnnnnnnnnnnnnnnnnnnnnnnnnnnnnnnnnnnnnnnnnnnnnnnnnnnnnnnnnnnnnnnnnnnnnnnnnnnnnnnnnnnnnnnnnnnnnnnnnnnnnnnnnnnnnnnnnnnnnnnnnnnnnnnnnnnnnnnnnnnnnnnnnnnnnnnnnnnnnnnnnnnnnnnnnnnnnnnnnnnnnnnnnnnnnnnnnnnnnnnnnnnnnnnnnnnnnnnnnnnnnnnnnnnnnnnnnnnnnnnnnnnnnnnnnnnnnnnnnnnnnnnnnnnnnnnnnnnnnnnnnnnnnnnnnnnnnnnnnnnnnnnnnnnnnnnnnnnnnnnnnnnnnnnnnnnnnnnnnnnnnnnnnnnnnnnnnnnnnnnnnnnnnnnnnnnnnnnnnnnnnnnnnnnnnnnnnnnnnnnnnnnnnnnnnnnnnnnnnnnnnnnnnnnnnnnnnnnnnnnnnnnnnnnnnnnnnnnnnnnnnnnnnnnnnnnnnnnnnnnnnnnnnnnnnnnnnnnnnnnnnnnnnnnnnnnnnnnnnnnnnnnnnnnnnnnnnnnnnnnnnnnnnnnnnnnnnnnnnnnnnnnnnnnnnnnnnnnnnnnnnnnnnnnnnnnnnnnnnnnnnnnnnnnnnnnnnnnnnnnnnnnnnnnnnnnnnnnnnnnnnnnnnnnnnnnnnnnnnnnnnnnnnnnnnnnnnnnnnnnnnnnnnnnnnnnnnnnnnnnnnnnnnnnnnnnnnnnnnnnnnnnnnnnnnnnnnnnnnnnnnnnnnnnnnnnnnnnnnnnnnnnnnnnnnnnnnnnnnnnnnnnnnnnnnnnnnnnnnnnnnnnnnnnnnnnnnnnnnnnnnnnnnnnnnnnnnnnnnnnnnnnnnnnnnnnnnnnnnnnnnnnnnnnnnnnnnnnnnnnnnnnnnnnnnnnnnnnnnnnnnnnnnnnnnnnnnnnnnnnnnnnnnnnnnnnnnnnnnnnnnnnnnnnnnnnnnnnnnnnnnnnnnnnnnnnnnnnnnnnnnnnnnnnnnnnnnnnnnnnnnnnnnnnnnnnnnnnnnnnnnnnnnnnnnnnnnnnnnnnnnnnnnnnnnnnnnnnnnnnnnnnnnnnnnnnnnnnnnnnnnnnnnnnnnnnnnnnnnnnnnnnnnnnnnnnnnnnnnnnnnnnnnnnnnnnnnnnnnnnnnnnnnnnnnnnnnnnnnnnnnnnnnnnnnnnnnnnnnnnnnnnnnnnnnnnnnnnnnnnnnnnnnnnnnnnnnnnnnnnnnnnnnnnnnnnnnnnnnnnnnnnnnnnnnnnnnnnnnnnnnnnnnnnnnnnnnnnnnnnnnnnnnnnnnnnnnnnnnnnnnnnnnnnnnnnnnnnnnnnnnnnnnnnnnnnnnnnnnnnnnnnnnnnnnnnnnnnnnnnnnnnnnnnnnnnnnnnnnnnnnnnnnnnnnnnnnnnnnnnnnnnnnnnnnnnnnnnnnnnnnnnnnnnnnnnnnnnnnnnnnnnnnnnnnnnnnnnnnnnnnnnnnnnnnnnnnnnnnnnnnnnnnnnnnnnnnnnnnnnnnnnnnnnnnnnnnnnnnnnnnnnnnnnnnnnnnnnnnnnnnnnnnnnnnnnnnnnnnnnnnnnnnnnnnnnnnnnnnnnnnnnnnnnnnnnnnnnnnnnnnnnnnnnnnnnnnnnnnnnnnnnnnnnnnnnnnnnnnnnnnnnnnnnnnnnnnnnnnnnnnnnnnnnnnnnnnnnnnnnnnnnnnnnnnnnnnnnnnnnnnnnnnnnnnnnnnnnnnnnnnnnnnnnnnnnnnnnnnnnnnnnnnnnnnnnnnnnnnnnnnnnnnnnnnnnnnnnnnnnnnnnnnnnnnnnnnnnnnnnnnnnnnnnnnnnnnnnnnnnnnnnnnnnnnnnnnnnnnnnnnnnnnnnnnnnnnnnnnnnnnnnnnnnnnnnnnnnnnnnnnnnnnnnnnnnnnnnnnnnnnnnnnnnnnnnnnnnnnnnnnnnnnnnnnnnnnnnnnnnnnnnnnnnnnnnnnnnnnnnnnnnnnnnnnnnnnnnnnnnnnnnnnnnnnnnnnnnnnnnnnnnnnnnnnnnnnnnnnnnnnnnnnnnnnnnnnnnnnnnnnnnnnnnnnnnnnnnnnnnnnnnnnnnnnnnnnnnnnnnnnnnnnnnnnnnnnnnnnnnnnnnnnnnnnnnnnnnnnnnnnnnnnnnnnnnnnnnnnnnnnnnnnnnnnnnnnnnnnnaagtgtcccgtgctgcaagcaggagcgctagtgctgggagggcggacacgtggcccaggcggaagtgtccacgcctacctcgagcaggagcgctcatgctgggaaggcagatgggtggcccgggcagaagtgtctgtgctgcaagcaggagcgctcatgctgggaaggcagacacgtggcccaggcgtcaggtttgaacattcttgacagcaagtggctcacccgtcagcgtgctgctttttcccatcccaggagttggacttgacctgtggacatttggctgttttctttttgtttttaagccagaaacactgtcttgtttccagtttaagatgtagagagggtgaaacagtcagaaactgggtcagaagcagcgtggttctcgtggcagggcggcacttggcccaagactcgtgctttggcgggaggctcaagtcaggcgtcccagcagcttcggtgcaacgcctcctgcccggctgcgtggggaggccctccaagacaccagctggtctcaccgcgaggcctgacttcgagccagagcagcgagtacattgcgtctccgtgtggcaagggcaggtgcgggggtctcagtccactaccgagcagcctgctctgatgactggcggcgccagggagaagggtcacatcgcgaggtccccagcaacggctcaaggtgactcacagttgcttggataagccagtggacgctccctctacactggcccggggccagagcgcctccttctgcggccccaacccagtccccaccctgagccttcagctcctgggcctgcaggctgagcctggcaggagacgctgcagggactctcagagctgtccttgccctgtcattcatggagacttacagggaggcggggcggccctactgcagtggggaccccttggggcgtaggatgcacagtgcaggcgcccaagcctcgcgcccaccggagagcagccacggtgcaggagcttggccctgagtgtgggcggggtgagggctgcaacgctgagaagcagatattaaagaagttctttcactgaaacaattgattttggtcgttgtttcaactattgcttgactttaatttttcaaaaaaatttagaaaaggttaagaaaaatggaaggttgttttgtttttgagatggagttttgctcttggtgcccaggctggagtgcaatagtgcgatctcagctcaccgcaacttccgcctcacgggttcaagcagtcaagcagctgggattacaggcgcccaccaccacgcccagctaattttgtatttttagtagagatgggatttttctccatgttggtcaggctggtctcgaactcccgacctcaggtgacctcaggtcacccatcttggctttccaaagtgctggaattataggcgtgagccaccacgtccaggttttgtttttgtttttgtttttttgagacatagtctcactttgtcacccaggctggagtgcagtggcacgatctcggctcactgcaacctccacctcccaggttcaagtgattctcctgcctcagcctcccaagtagatgggactacaggtatatgccaccatgctagggtaatttttgtatttttagtggagatggggtttcaccatgttgaccaggctggtctcaaactctggacctcaggtgatcctccctccttggcctcccaaagtgctgggattataggcatgagccaccatgcctgaccaaataggttttcatatggaaaaacgtgatttcggggggttaaaattttctgctgcttttctgtgataatcaccttactgattgagaaagaggaagcggggaggtggtggccgatagtgccctctcccaggtgggagcgcctgagcctgggcctgtgctggatggggcctcctcccgtctcctgagggccgtgcacaggagcctctgttgtgtcttacaggccctgccctgggagaagccctgccacacgtcgtgcccacgctgagggcctgtctgcagccctcccaagacccgcagatgcgcctgaagctgttctccatcctgtccaccgcgctgctcagagccacggacaccatcaactcccaggggtaggtccgggctctgcctctgcacggcccccagctggggcctgggccaggggtccccatctccctccccaacagctcactgagcaagggggttcccacctccttccccaacactgcactgcgcaaggggttccccatctccctcccccacactgagtcaaaggtgggccgggggtccccacctccctcccccacgccgagtctaaggtgggctgggggtccccacctccctcccccacagcactctgggcgagggttccccacaccaagtctgaggtgggcgtgtgcagtgacccctgagcttaactggcctggaagcagctagtccatcctcactgggtaaacacaagctctcggcagggaacaagctctcggcagggaatgcacagagaagcactaagtcaaagtcatctccgtgtggtcattaaaattccagtgaatgaaaaagttttagggaacattaactgttaatggcttatgtattagctgttctctgttttaaaagcctttgggcacttttcaaacctaacaaacaactgattgaatttctattgatggtcaaagtggtaaaaatacctctttgttatctaagacaacttttaggtggcattaagaccccgagggtctagggcctccaggtgtacggctttgaagtaagggcaagaagcatgggtgccctctaggagcactgggagggacagtggaggaagaggccccgcccgggtgccactgctgaggcagctcttagggccctgccacttactttgctcagagcaaaaggtgccgtcagctgggtcctacccccgcctgtgcggctggatctgggctgcgtcagcaccgggacccgccccagcagcacatctgtcaaagcggaaagcagttcacacaccagagcctcatgtggaaagagtccaggcgctcagacttttctccttcatgaccctcatctctgctctcgggcctcagcccgcctgtcgtactgcaggaaattttgtttcctgcttgtcttcaaagacttcagggcttagaacggaccatagaaagatatgaaccgagagccgtggcagctgtccagcttgcaggctgatatttgtgtagatgccatgcagataacacagcagggtccaggcccttccctctggaactcacactcggctgtattttgggaggaaccgctgggcaggttctgcccaggaacagttaactctgcagagcacagtttccacatctgggctgagttcccaaagaaagtgcgcctaacaacgtcttgtggaaggcggttggcgtcaagagaagtaaagtgttcagatggcagtgattttaatgaacttactagctattttaataggaaagattttttttttatccgtttggtttttatttttagaatcatgaaatagcaagttggctctgctgaagtagaaatggtgggcggggagtcgccactgaccatcgtctgcgcagagcaccttcctgctgaccgcagctgtgagcgccggctgtacgcaggtccctgctgtgcgggtgcccaagagggctgagggctgcgtctgccatggtgtctccaccttggacaccatgaatcatgagaggttctcagggctgcctcccacaggctttctgtgtcttacctgggacactcgggactagttgtgtttaggttttcttaaaattctgtagtaattgcattgtagagcatccctaatccgaacttcagaaatccaaaatgctccagtgagtatttcatttgagcatcatgtcagtgctcagatatggtcagaccctggagcactttgcattcctgaagtgaaggatgctcagcctgcgtctgacagaagctgccagagaagtggctgcgagttcagggcaagannnnnnnnnnnnnnnnnnnnnnnnnnnnnnnnnnnnnnnnnnnnnnnnnnnnnnnnnnnnnnnnnnnnnnnnnnnnnnnnnnnnnnnnnnnnnnnnnnnnnnnnnnnnnnnnnnnnnnnnnnnnnnnnnnnnnnnnnnnnnnnnnnnctgaggcaggagaatcacttgaacctgggaggcagaggttgcagtgagcggagattgcgccatttcactccagcctgggcagcaagagcgagactttgtctcaaaaaaaagaacgtgcctcattcagtggttcgatggtggttctgatcaatgcccagaagttctgatggagcttctgtcagacacaggctgagtatccttcaccccaaaattaaaaaaaaaaaaaaaaaatttaaaaaaacctaagcactcctaggtggcgcccgtgtggcacgcctggcccacacttggaccccacaccctgaaggccaggacttccaggccatttcatgtggtcaccatggagcaggcgctgggttcgttcattccagagagccctcttgcaagtcacggtgccgaaaatggcagctctgcttaaaaacgaacccacgccagaaacctcgcggaatgcgtgtaaatcacaccacaccaacgtcactttccacatctgctcatctacctggctggtcccaacatggcccctgccaggagcaagccggtggcgcctccagaagaggaagggacgctgtgcaggcttcacggacgctggagggctgcgggctgtggagctggtcttggagaccagagccacctttgaaacataccgtggtgttgggatgtcactaatgagtgtgtcattttgctttgagtttgtcttggtggcactttgacctgactggtcaccatcaggacgaagtcgccgacagggtgggaactgcccgtctctctgagctgtggcccttgggtccccggaccgcgcctgtggccctcccatcccgcctctgtgaagccgcagcgactgtccttgctggacagagggttctgtggctggagagacttggcctttttctgggggagggatgcagatgggaaaggggctcactgggtgctgccgacaccaccgcacctgccctagcccaggcatcactcaggcctccttttgaagctaggagcggcgaggggctgaaagtgcaccctcggcccagggcctctggctcgcctctggagaacaggacctacgcgggccgcaggagaggccaggggcacaggcacccctgtctccccggtagggttgggcctggaggaacctcccaattcgcactgagaagcagctcctgagaggaggaggggcctcgtgttttggggtcgagttcgttttcctgtttggctcccccctcagccccattcatccccagtctgaaacgtttcttccgagcacctgtccagtctcctcatccaccctctccgttccggttccaggcagtttcccagctacctcgagacggtgacaaaggacatcctggcccccaatctgcagtggcatgcggggaggacagccgcggccatccgcacggctgccgtgtcctgcctctgggcgctcaccagcagcgaggtcctgtcggcagagcaggtacggggctccctgcgtgctcggtggacacgggccggggactgcgcaggcttcctggcgcccggcagagctcccgcagcaggaacttgggcaggcagcagctgcacctccacctggggcccgtaccccaagaggctctccccacactggcggcggaagggcaggagccggcggccgggctgcggttcagacagcaggcgggagagcgggagccaggccgcgggcccagccagcccggtcgtgctgcgggttttgcagccgctcatgagcgtgcggtttctcggtttccggcccaatgctggctgcaagaccaggagtcgaatcccaggatccaggccagaggacgggcctgagcccaggcccgtttctatgaacacctccggctggtaccaggtgtcagaaaacagacactgatgcccgcccgcgtcctggtcgccgcccggcgggaaggcgctgccctgggcgcccgtgcagcatcagcgccacctcctggtgcacgcggggtggtgcggtcggtgctccagccgaaagccccacgtccttggggcccaggcgagccattaccctggtttagggttagtgcctcacctaggagttgtgaacagtgtgcgtattttctaaaaatcaagtaagcaagttaaaaattgctcaaaatctaaattttacaatgaagattcaagcctactttttaggtaaagctttcaagccccctaagtccttccaggcaggagtgcacggatggtgagcacccccaccccaccccaggacagatgtaagtcacgtcgtatgtgtttgctgattgcagatacgggacgtgcaggaaacactgatgccccaggtcctgaccaccctggaggaggattcgaagatgacgcgactgatctcatgccgtattatcaacacgttcttaaaaacctcgggcggcatgacggatccagagaaactcatcaagatttatcctggtaggacatttctgttgttcacagcctgtgtatatgcagtcagccctccgtgtccctgggttccgtttgcatccatggagtcacccaaactcagatcaaaactatctcgggctgggtgtggtggttcacacctttaattccagcactttaggcaggagggttgcttgagcccaggaatttgagaccagcctgggcaacatagccataccccgatctcaacaaaaaatttaaaaattagccagggctggtggcacacacctgtagtcccagctactcaggaagctgaggcaggaggatcgcttgagcccagcctgggcaacagaccaaaaccttgtctttaaaagtaggggtgtgtgtgtgtgtgtgtgtgtgtgtatggctacatatatacatgtttgtgcatttatacatacaaatacaaatttgtacttacatttgcatatataaatatgtatgtattggggggcagaattccacagttccaaaaagcaaagcttgaatttgttgggcaccaagtacaacgttgaacccgcatgaagaaagcatcatgtacacattgcattcggccttaaaacaacattggaccctcgtgaaggaagcgtcgtgtggacgttgcgttctgccttaaaacaacgttgaacccacgtgaaggaagcgtcgtgtggatgttacatttagcgttaaacgtaatctagagacagtttaaggtgtgccggaagatgtgtgtgggtcatgtgcaaatactatgcctttttttatcagagacttgagcatttgaggattttggtatcctagaggaggaggattcctggaaccaaaccccacagataccaagggacgactgtatataagtttgatggtggcttgttttatagaaaaaaagcagaaaacgtggccgggcacggtggctcacgcctgtaatcccagcactttgggaggctgaggcaggtggatcacaaagtcaagagatagaaaccatcctggccaaaatggtgaccctgtctctactaaaaataaaaaaattagctggacatggtggtgcgcgcctgtagttccagctactcaggaggctgaggcaagagaatcgcttcaactcaggaggtggaggttgcagtgagccaagatcgcaccattgcactccagcctgggtgacagagccagactccatctcaaaaaaaaaagaaaatagaaaatgctcatctttgacttctgttcaagttggtactatgagaacaaacagcaatgacagatgaaataccacaaattaaacggcacagcaagaagcaaggcagaggtctccaaaccagcactgggtgggggtgacaaggctcagcttccacgcggccgggaagggggacctcagggtggggcggctggagctgcctgtggggagacggggccgggccaccctgcagcaggaccaggggcacagcctcagtgtcgccgcctcctggagcccaaaccccagaccaaccccaggtgagagcaagcactggggaggggaatggggtggttggcttgaagcccccgaaaagcagcagcactgaacagagtcatgaattcagagagcccctcactcagggcagcctgcacacaaacccctcaggacagggcccccgccacccaggccatgggccagtacctgtccgggtcctgttaggaaccagactgcacagcaggaggtgagaggtgggcgagcgaaacttcatctgtgtttacggctgctccccatcttttgcattaccacctgagctctgcctcctgtcagatcggcaacggcattagattctcataggagcacaaattctattgtgaactgtgcacgcgagggatccaggctgacgctccttatgaaactaatgcctgatgatccgtcactgtctcccatcgtccccacatgggaccgtctagttgcaggaaaacaagctcaggcccccactgattctacaggatgatgagttgtagaattatctcattatatgttacaatgtagtcatagaaataacgtgtacaataaacgtaacgcacgtgactcatcctgaagccatctcaccccctggtccatggaaaattgtcttccatgaaaccagcccctggtgccaaaaaggttggggactgctacctcagaacaccgaagacccggcgctaagggcagcctcgcacccagcccgggaaggaagtgccgataatagaaccacctcaaagttacctttattgaggcgtgtttaagatcctcaaaaagctaaaagaacaacatccactaaaaaacaagttgagaaacaagaagacaagcaggaataaagaacagatggaaacggaagcgatcgctgggaagtccggagtgacacggaatggtgtgctggcactactttgaggaaaggagttacccagcgagggaggaaggggatggggtgggcgggaagcggccactcaggcgttcctgattagctctacttaatgtgattatctatattttgtgtatttatgccagaaatgtttagcagtttttaaaagatggttcttgctaattcctggaaatgaatggagtcatcggaacttcacactctgtgtactgggtcaactctagactgaatgtggctgaaaacaaagttagtgacgtgaaagccaggaatgtggaattcctcaagatcacaagacagagaggggtgcaaggcctggagtgggcgaaggacacgggacggggagggacgcggggcctggagcgggcagaggacacgggatggagagaggtgccgagtgggccgagaggctcccgggcttttctgaatcccaggagaagagaatggaggagagatggtgcctcagaatcttccagaactggagacagacatgaattttcagattcacagtacacacggcgctgggcagaaaaaccgccgcctgctgaactctgaggtccgggggcctttgtcactcattctctcacctttgcttttctgtttttattctttagtaacaaacatcctgttcccactgactctggaacaagttcagtccatgcgattgttgggaattcactcactttttaaaacaggagctggcggaaaggctgcacgcgtttgggcatctgagcgcatttgggcatctgggccacggccccctgtttattttcactacaaaaggttccttgagaggccccttgcctattagtgccagctctgggcttcccagggtgaagtgttggatgaatcatggcctccttggtggggaaggaaggatgtcctgagttgggagcacagacatccaggcctcccaggacagacagacacaaacatgaacagcagacaggccagcgtgagccgattctgcctggcttagtcgtgcatgaaaggaaccctaaactggtacaaaagtggacctgcaggccatccagggagtgaccatcgtaaaaacacaatagccagtgccactctgtgtacttccatagtcgaccgcgccagcaggaggcctcggaggatcctgtccgggcccatagatgtttgctagcgggacaagcttgggtgagttgagcatctgactccgtccttcctcctgagacacgtgcagcgagggcacccactgtgcagcgagggctcccgccgtgcagtgagcataccccctgtgcagtgagggcacctgccgtgcagtgagcataccccccatgcagcaaaagcaccccccatgcagcgagggctcccgctgtgcagtgagcatacccgctgtgcagtgagggcacctgccgtgcagggctgcttcagggtttggcaccataatgcctggatgtgctccgtggcttcctccttggtgcctgtgtttggtggctggaaggcccagcaccctcagggcccagaaccctcagggaagtgcctgggcatctgccaggaattaacccactgggtcccacttgtctcaaagcctggcttggtaggatggcctgaactttggatgtttttcatgcctttcgttacataggatcctcttgctgagggtggatcatgccctccacattgcaaaagcatcagagacccagcccaccctcgcgtctgcagcgggaagatgggcctggtgccaggcgcgggcagccgcccctcccagcgtcgggaagatgggcctcatgccaggcatgggcagctgcccctcccagcgtcgggaagatgggcctccgggtggttttgcgactcagtcatctgcgaatttccggatgctgcacagaagggggtgccaaagtttttttaagatgatgtaaaaaaagcataaatttgataaaaattatgtccattaacctcataagtttctacccatcgggaaggatcatccttctgttttcagcagcagaaaactgaccacagtagggggttgtctgtcactgagtcctcagctctggtgggagggcagggtcagagctgggcagggtggccagcttggggatctgagcatctgggagcaggaggtggagggccaggtgagcacacagctgcgaggaggtggaggaccaggtgagcacacagctacagctacagggaggctctgcgcctgcaggacaggttattacaggggccgcagcagggcctgggccgcctccactctgttggctggggttcaggggtcccaggtcgccaggagcaccttgcatgtggctcgggatgcacggagtctcccgtgaggtgtgggtttcctaggaccccagggcaggtgtcccatgggagtatgaactaaatgcctttgtggacgtttagacgtgaaatgtctgctctagactcacacacctgtctcgctccctccttccagaactcttaaaacgcctagatgacgtgtccaacgatgtgaggatggcagccgcctccaccttggtcacctggctgcagtgtgtcaagggtgccaacgcaaaatcctactatcagagcagtgtccagtacctgtaccgagagttgctggttcaccttgacgatccagagagggccatccaggatgcaattttaggtgagactccgacggcttggccttcgttccgatgcctgctttcggcgcctgccacgggcatctgtagctgagccgtgtgaccggccacagggccctggggcacaggaggggcctcagctccggcctggcacactcttgagttcttggcaaaccctgagagcggctgtctttgtggtgatagctgctgacatttcctctaacagaaatcaaaactgagagtattctagaatacttgttagttgtttaaaataacaatagtaagcccagtatatattgacacagatggcttgtgtttttgaaaaatactttccaaaacaaaatcatctgcaagaacgatttttgcaaatgtcttaaatgtgtagcttgatggaagacactggactttcacatcttccatacagtcagtcatgatgtgtatggctctggctgaaatacgtggaaaataatctggcctcgcctgtggcttcaagtgtagttggacaaaagaagagtattttagtagccttttcagataggcgtgggacttcttcaataccacgccaacagcgacacaggccgtcccttgaaggtcactcacagcacagggcctgaggccacacaccacagagccttccacgctcagtgcattaaaatccgctggtccatctcacacttggaatgtaacgatttgcttttttttttcttttttttttttttgttttgttttgttgttggtgaatataatgacgttgttcttttttttaataaaatttgtatttttaatttttgtgggtacacataggtgtatataaggcatgtgtgatactgtgatacaggcatgcagtgtgtgtaaatcacattggggaaatggggtccccgtcacttcaaacacttacactttctttgtgttacaaataattcagtgatacttttcgttatgtttaaatgtgtgataaattattgttgaccatagtcaccctgttgtgctatcaaatactaaatcttactcattctgtttttgtactcattaaccatccccatctcttcccccggccccattcctcttccgagcctctgggagccatccttctgctctatctccatgagttgaattatttttatttttagttcccacaaatgagaatgtgcggaatttgcccttctgtgcctgacttatttcacttaacatagcgacctccacttccctccatgttgatccaatgactggatctcatttcttttgtggccggataatattccactgcgtgcgctccacgttttccttctcccttcatctgtccgtggacaccccggttgcttccacaccttggctgtcggaacagtggggcattcggcgtgcgcgtgcagctctcccccatagctgaattcctctcttttgggtatttgcccagaagtgggattgccgggctgtatggggctctatttttagttttggagggacctccagactgttctcccagcggtgctcatttacattcccaccagcagcgtgagggttcccttgtctccacatccgcgccgggacttgtttccgcagccattttaactggggtcagaggatgtctcacttgtttctatgtgcatttctctgaggagcggtgctggtgggcaccttttcagacgcctgtttgtcatttccatgctgtcttttgagagctgtctgttcaggtcttttacccatttttaattggattattagattgtctgctattgagcctgagctcctcatatattccagtgattaatccttgtcaggcggcggttctaagatacagtctcccatcccgtacccgcgggctgtccctgtggctgtactctgctcattcttccctttgctgtgtggaagctttgggcctggatgtgctgactttgccttttgcctcctttggaaaatacttagaccttccccgcgcagctgcgtccggtttcccggcgtggctacatccggttatgcgatgtcggatcttcctggtgtggccgcctcccgtcgcgcagcgtcagaaactcggatcttcgtggcgtggccgcctcccgacacgcggcgtcagaaactcggatcttcctggcgtggccgcctcccgtcgcgcagcgtcagaaactcggatcttcgtggcgtggccgcctcccgacacgcggcgtcagaaactcggatcttcctggcgtggccgcctcccgtcgcgcggcgtcagaaactcggatcttcgcggcgtggccacctcccgacacgcggcatcagaaactcggatcttcctggcgtggccgcctcccgtcacgcggcgtcagaaactcggctcttcgcggcgtggccgcctcccgtcacgcggcgtcagaaactcgcatcttcccggcgtggccgcctcccgtcacgcggcgtcagaaactcgcatcttcccggcgtggccgcctcccgtcacgcggcgtcagaaactcgcatcttcctggtgtggccgcctcccgtcacgcggcgtcagaaactcggatcttcccggcgtggccgcgtcccgtcacgcggcgtcagaaactcgcatcttcctggtgtggccgcctcccgtcacgcggcgtcagaaactcggatcttcccggcgtggccgcgtcccgttacgcagcgtcagaaactcgatattcctggcgtggccgcctcccgtcacgcagcgtcagaaactcgatcttcctggcgtggccgcctcccgtcacgcagcgtcagaaactcgatcttcctggcgtggccgcctcccgtcacgcagcgtcagaaactcggtcttcctgccatggccacctcccatccggcggcatcagaaactcggaccttcctggcgtggccgcgtcccctcacacagcgtcagaaactcgatcttcctggcgtggccacctcccctccggcggcatcagaaactcggatcgtcctggggtggctgctcttgttacgcaacgtcagaaactctcctgcgtgggcaccaggctcagaagagtccggcttgtggtggcagggccaagctttggctcattgtgattttttgtgtgagagcttgacttgtatcctcggccacaaaccctgtcggttgttctgggagtgagggacttgggccgttcactttcacgccgtgctctgccagatcccgcgtccgcacagccagggtgggtgcactgctcgtccgtccgccattcttcctgggaaaagcagctctgctgcacgaccctggtcctccgtgtgaagcggtgcacctggtgcccactcgcgggtgtaagccgtgtgcgtgagggtgagtgtggcgggtgaagccgtgtgctcgagggtgagtgtggcagggggcgtgggcctcagctgctcccgcatctgcgcaggtgtgagcacagtgacgggcaggccgggcatgctctgcctgcgaccacatgcctggctttgactcacagaccctctgaagggtcctggggaccccgagggccttggagcccatgtcgggagcccctgccttgagtcgtggaatcaggttgtcagccagtgagggagccccagagtccattgatccacggcggggcccgtggtctctccaggtcacggaaagaagctgcgaattggagaccaattggaaattgtttaaaaggaggacagcagctcacgtgcaggcctcgctgggacagcccatcctgccagatccacgcaacgcccccagctccccacactccctggcaaatcccagccctgcctgcgccctcccagctctcctgtcctgcactacacaccatcaacccgagttctgagcttctcctactctcagcctcagcctcactcgtcctcaggaccttgctctaggccgaggagaccagtgcccctgtgcaccagctcagcctgcagccccggccctctcgcctccccaggactgcacagggcatctcccttccccactgcacggtacaggccattctttctcctgtctttaaaaaaacaaaacacagatgccctgtacgccgcccccacctcccccaccgcacatccgcctggcagcaggctccctggaagcagcccgccttacccctcctcgaggccctgggcccatggcaggcatccgcagccgtccacctgcctgcacctctgagcagcgccaggcacagctggcggccacgcaccctcctctggctgtgggacgcccgtgctcagtctcttggtctttccctcgcccatgtgggcccctcactgctcctctgctgtgtctgcaccgctccctcagagctcttctcctggcctcagctccacacacaagtgcagctgcctggtgccgaaccctgggccgctacccccctccctgactgcctgccgggttccgccaccctcagtggctcagtggccatctgtcctcaagactgaaggcggagaccttgaggtcctcctggaccccctcttaactcccagcagaatctgatagactccccagccactgcagcaacctccccatcctcttcctgcctcagctagacacgcccaaccctttctggcccccacccctgcagctcccactgcccccatcacacacaccaccacgagcccctgacacgtttgccttcctgattttcatcatcggccactgcttcccgatgaaccctccgtaagcatgggttcatttccggctgtgtcggtgatgcctggcccgtgggaggtttgcagtcactgcggcaggtgaattggcatccgcaaattggataagaaagtcgcctgtttttctgagcctatttgctcctgtgaaacctgtttctaagcccaaaaatgccacctgaagactctgcaggacatcatttcatggtctgcccacaactgccaggaggcgattttcagttctttgaatgcacgttgtgactgccgtgcacccacccagcagcatcaggttcctcatattcacatagtgaccatgcagcatcaggtcacttgtccacgttgtgactcaggtcattcgtatccacattctgactgccgtccacccgtccagagtgtcagcttacttatatccacgttatgactactgtgcacccatccgctgcatcaggtcgctcgtgtccacactgggactgccgtgcacgtggccagcagcatcaggtcacttgtatccacattatgatcgctggacacccatccagcaggatcaggtcattcgtatccacattgtgactactgggtccccatccagcagcgtcaggtcattcgtccccagattgtgagtcgggtcactcgtattcacattgtgactactgtgtccccatccagcagcgtcaggtcattcgtccccacattgtgagtcggatcactcgtatccgcattgtgactactgtatgtccacccagcagcgtcaggttatttgcagatgcttttacagatgcttgaacttcactacaaagccaatttgcacgagaggtaagattggtttcatgcttgtttctggcatgttcaaggtgtttttctgttttacagaggtcctcaaagagggcagcgggctgttcccagatctcctggtgagggagacggaggccgtcatccacaagcaccgctcggccacctactgcgagcagctcctgcagcatgtgcaggccgtgccagccacacagtgaccacgnnnnnnnnnnnnnnnnnnnnnnnnnnnnnnnnnnnnnnnnnnnnnnnnnnnnnnnnnnnnnnnnnnnnnnnnnnnnnnnnnnnnnnnnnnnnnnnnnnnnnnnnnnnnnnnnnnnnnnnnnnnnnnnnnnnnnnnnnnnnnnnnnnnnnnnnnnnnnnnnnnnnnnnnnnnnnnnnnnnnnnnnnnnnnnnnnnnnnnnnnnnnnnnnnnnnnnnnnnnnnnnnnnnnnnnnnnnnnnnnnnnnnnnnnnnnnnnnnnnnnnnnnnnnnnnnnnnnnnnnnnnnnnnnnnnnnnnnnnnnnnnnnnnnnnnnnnnnnnnnnnnnnnnnnnnnnnnnnnnnnnnnnnnnnnnnnnnnnnnnnnnnnnnnnnnnnnnnnnnnnnnnnnnnnnnnnnnnnnnnnnnnnnnnnnnnnnnnnnnnnnnnnnnnnnnnnnnnnnnnnnnnnnnnnnnnnnnnnnnnnnnnnnnnnnnnnnnnnnnnnnnnnnnnnnnnnnnnnnnnnnnnnnnnnnnnnnnnnnnnnnnnnnnnnnnnnnnnnnnnnnnnnnnnnnnnnnnnnnnnnnnnnnnnnnnnnnnnnnnnnnnnnnnnnnnnnnnnnnnnnnnnnnnnnnnnnnnnnnnnnnnnnnnnnnnnnnnnnnnnnnnnnnnnnnnnnnnnnnnnnnnnnnnnnnnnnnnnnnnnnnnnnnnnnnnnnnnnnnnnnnnnnnnnnnnnnnnnnnnnnnnnnnnnnnnnnnnnnnnnnnnnnnnnnnnnnnnnnnnnnnnnnnnnnnnnnnnnnnnnnnnnnnnnnnnnnnnnnnnnnnnnnnnnnnnnnnnnnnnnnnnnnnnnnnnnnnnnnnnnnnnnnnnnnnnnnnnnnnnnnnnnnnnnnnnnnnnnnnnnnnnnnnnnnnnnnnnnnnnnnnnnnnnnnnnnnnnnnnnnnnnnnnnnnnnnnnnnnnnnnnnnnnnnnnnnnnnnnnnnnnnnnnnnnnnnnnnnnnnnnnnnnnnnnnnnnnnnnnnnnnnnnnnnnnnnnnnnnnnnnnnnnnnnnnnnnnnnnnnnnnnnnnnnnnnnnnnnnnnnnnnnnnnnnnnnnnnnnnnnnnnnnnnnnnnnnnnnnnnnnnnnnnnnnnnnnnnnnnnnnnnnnnnnnnnnnnnnnnnnnnnnnnnnnnnnnnnnnnnnnnnnnnnnnnnnnnnnnnnnnnnnnnnnnnnnnnnnnnnnnnnnnnnnnnnnnnnnnnnnnnnnnnnnnnnnnnnnnnnnnnnnnnnnnnnnnnnnnnnnnnnnnnnnnnnnnnnnnnnnnnnnnnnnnnnnnnnnnnnnnnnnnnnnnnnnnnnnnnnnnnnnnnnnnnnnnnnnnnnnnnnnnnnnnnnnnnnnnnnnnnnnnnnnnnnnnnnnnnnnnnnnnnnnnnnnnnnnnnnnnnnnnnnnnnnnnnnnnnnnnnnnnnnnnnnnnnnnnnnnnnnnnnnnnnnnnnnnnnnnnnnnnnnnnnnnnnnnnnnnnnnnnnnnnnnnnnnnnnnnnnnnnnnnnnnnnnnnnnnnnnnnnnnnnnnnnnnnnnnnnnnnnnnnnnnnnnnnnnnnnnnnnnnnnnnnnnnnnnnnnnnnnnnnngtgtcagggttgggggagtacagccttgggaatggctggagtgaccggattgggaggtcagcatgtatagctgagcctgccccatggactcacatcccctgccctagacaccctcgccaccctctggtccccttcagagttgcaccgtcatggctgttccctgcgccagcttctgtaactcgtggccacagggatttcgggggccctcaggggtggtcttccacctcttccttgtgtgccctttgacctctgtggcttctgccacgtccttgaagagccctcaagagcccctgggtcggtggtcctcggtggcgatggagccagtggcagcagcctcacctggaagcttgttagaaaggcacattgcagggcctcaggccagacctactgaggcagagacaggtgggccgcagtcagccctgcaggtgattctgaggctgcggactgggaggacccccacctgtgcaccaagcagttcccatccagctcccatccagcacgaggctccgtcgtctgtctctgtcacaagacccagaaatgaatggcagggagcttgcccgagaggacacacgtgtgaggggcccctcgacccctcggacgcaagtgcaccaacccctgggccgtccctcgccctgcatgctggggccacagcatgggaagagacatcagcgctgccgctccgtctctacacatctgtaaagggagctcccagggacctggcacgtccacaggtgcgtgtgttcagagaaagacggaaacccagcctacaagggttcacagacacccaagaggcattacgtccctctccacttaattctttgaaatgttgataggccgggtgtggtggttcatgcctgtaaaatccagcactttgggatgctgagtggagaggatcacttgagcccaggagttcgagaccagcctggggaacagagggagaccccatctctaccaaaaatttttaaaatgagccgggcgtgttggtggcccatgcctgtaatcccagcactttgggaggccaaggcgggcagatctcttgaggccaggaattcaagaccagcctggacagcattgggaaaccccgtctctacaaaaaaattttaaaaatgagtgggcatggtggcgcacacctgcagtctgagctactcaggagtctgagatggaagaatcacccgagcctgagaaatcgaagctgcagttacccaagattgcactcactttttttaaacaagtgagaccttgtttaaaaaaaaaattttgtaaatcataaatgagtgcattaatacaacatgtactttttttgtcttgcctctttcactcatcagttttgatgtccatctatgttggggtgtccatcaatagttcattcctttttgctgctgcgtaatattccattctatagataagccacagtgtgttcacccactcagcttttgacgtgtgtttgaggtctttccaggttttggctattacaaataaagcttcttccaacatttgtgtacatgtctttgtatggataggtactttcatttctcttggataaacatctagtagaatggcagtcatggtggatgtatactaaatttttaagaaactaccattctattttccagagtggcgggaccatttccaccagccctgtgcaagaattccagttcctcccatatttgccaacactagctaatcagtttttaattttagccattttaataggtacatagttgtatctcattatggttttagtttgcatttccctaatgtctaatgaggctgagcatcttttcatatgcttatttgccatctgtgtatcttttttggtgaagagtctttttaaatattgacatggtttggctgagtgtccccacccaaatctcatgttgaactataattcccagtgttgagggaaggacctggtgggaggtgattggatcatggggatggatttctcccttgctgttctcatgatagtgagttcttatgagatctggttgtttaaaagtgtgccttctctctcccgtcgccatgtgaagatgtgcctggttccccttcaccttctgccatgattggaagtttcctgaggcctccccacccatggagaactgtgagtcaattaaacctcttttcttcataaacaagccagtctcaggtagttctttatggcaatgtgagaacggactaatacaaatatcttgcccatttagacaaaactgggttgtgttcttcctgaatattgagaattcttcatatattctaggtacaagtcctttatcatatatctatgatttgcaaatattttctctcattccatagcttgtcttttcattattttaacaatgtcgtttgaagaagataagctttttattttgaatgaagtctaatttatcaatttcttttttaatggattgtgcttttggtgttgtatctaggaaatctttgcctaacccaaggacacaaagtcttcagttcctgaagctcaaaaagctgttgttgccaggcacagtggctcacgcctgtaatcccagcactttgggaggccaaggtgggagggtcgcttgagcccagcttgggaatcataaggagaccctgtctctccagaaaaaaaaaaaaaaaaaactaacctggcatgttggtgcatacctgtaattccagctactcgggaggcagaggcgggaggatctcctgggcctaggatgttgaggctgtagtgagctacgattgcaccactgcactccaacctgggcaatcgtgcgagaccccatctcaaacaaacaaacaaaaagctcttgtcataggccaggcacggttgcttatgcctgtaatcccagcactttgggaagccaaaggctggtggatcacttgaggtcaggagttcaagaccagcctggccaagatagtgaaacctcatctatactgaaaatacaaaaattagccggggctggtggtgggcgcttgtatcaaagctactcagtaagctgaggtgagagaattgcttgaacccaggagacggacgttacagtgagctgagatcacgccactgcactccagcctgggtgacagagtgagactctgtctcaaaaaaataaataaaaacaactcatctatttgttcttacctacactgtgattcaaaggcaatttctacttccctttgtaatcccctttctgtgacctaaatgaagagctgaggttactggagggtgggagctggttggttgaagaaaaaacactcacctttttgtagccaaagacagccttctatatcagtatgggatgatctccaaaacacattgttaattttaaaaaacaaggagcacaggctgggtgcggtggttcacgcctgaaatcccagcactttgtgaggccgaggcgggcagatcacgaggtcagcagttcgagaccagcctggccaacatagtgaaaccccgtctctactaaaactacaaaaattagctgggtgtggtggcgcatacctgtaatcccagctactcgggaggctgaggcaggagaattgcttgaacctgggaggtggaggttgtggtgagccgagatcttgccactgcactccagcctgggcgacaaagtgagactccgtctgaagaaaaaaaaaaaagggagctgcttcttttgcttaggcataaaaaatttctggaggggacaaaagaaaccagttgaacagtgaggcctctggagaagggacctgagtgccccagggactggagtgagagtccagtctttacctcttggtaccatggaatttactcctctcggttccatggaatttactcctctcggtaccatggaatttacttttagtgcacgtatttattacccagtcaaaaacaactctgctgagactaacctgtaatcgaagcctcactgacacctgatgctgttctcggctcacaagtcagcacacttgtttcttctgtatcacgaacccctgtcccagggaagggtgttcaggatgtcaaagcaaaagctttatcagaaagttgtcttgggcagggtgtggtggcccacggctgtaatcgcaacactttgggaggctgaggcaggaggattgcttgaacctgaaagtggaggctgcagtgggtcttgatggcatcatggcactccagcctgggtgacagaacaagaccccatctcaaagcaaacaaacaaaacttgtcttattgagaaatgaaaatgcagagacttgtagccaagtgctcatagcagctttattctagcctcaaattggaaaaaacccaaatgtccatcaacagtccatctgcagtataaacaaactacagactatccagacaacagaatacgattctgcagtcgaacgacagggcacactgcaacggagacagctcccacagacaccaggccagtgaggaaagactgtatttcatataatttatatggaactcgagaacaggcaaagctgttctatagtcctttcttttttcctctgagccagggtctcactctgtcacccaggctggagcacaagggtgccctcacagctcactgcagccccagcctcccaagctcaagcgatcctcccgcctcagcctccggagtaactgggactacagatgcacaccaccacccccagctaattttttatttttagtagagacgagttctcactatgttgcccagactggtctcgaactctccggctgaaacgaacctcctaactcagcctcccaaagtgctgggaggacaggcatgagccgctgtgcccagcctactcctttttaaatcaccgaatcaatgatgactatatggaggctctttatgtttattatattattctctctacttgtgtatgtgtgaattctgcatgagtttttataatgaaaaaatcacacttcaaaaacagtcacctggctaagcatggaagacacaggctcagcctgagtgctcttggaggctcttctccaggtgggagcaggccgggcggtgtcccttttactgagcacttgattttccactaccaggtgtctcctcactagcctgagaacttagttaaattttctttaaagataaatctttcatcctagccagagcaatcaggcaagagaaagaaataaaaggcatctaaattggaaaataagtcaaattatccccatttgctgatgatatgatcatatatctagaaaaccttccaaaaagctcttagatgggatgaatgcagttaagctgcagaatacaaaatcaacatacacagatcagtagtatttctgtccgttaataatgatctagttgacaaagaaatcaaggcaatcacacttataatagctacaaaaaaataaaacaccagctcgggcgcccagtggctcacgcctgtaatcccagcactttgggaggccgaggcgggcagatcacaaggtcaggagatagagaccatcctggctaacacggtgaaaccccgtctctactaaaaatacaaaaaaaaaattagccgggcgtggtggcgggcgcctgtagtcccagctacttgggaggctgaggcaggagaatggcgtgaacccgggaggcggagcttgcagtgagtggagatcgtgccactgcactccagcctgggtgacagagccagactccgtctcaaaaaaaagaacgagatcctgacttttgcagcaacatagatggaactggaggccatgatcttagtgaaacaagccaggtgcagaaagtcaaataccacatattttgactcatgagtgggtgctagaaaatgtgaacacgtggacatagagaatgatagacagtggagactcagaagggtgaagggagaaaagggagtggatgatgtaaaatgacttagtgggtacaacatatgatattcgggcgatggatccccaacagccctgacttgaccagtatccagaatgcaatctatgcatgtaacgaaactgcactgtaccccacgttcttacagcgatagaatatttctcctgacttctccccattttccagaattctattttttttcttttttttttttgagacagagtctcgctctgtcacccaagctggagtgcagtggtgcgatctcggctcaccgctacctccacctcctgggttcgagcaattctcctgcctcagcctcctgagtagctgggattacaggcgcatgccaccacacctggctaatttttgtattttttgtttgtttgtttagtagagatggagtttcaccatgttggtcaggctggtctcgaactcctgacctcgtgatccacccgccttggcctcccaacgtgctgggattacaggcatgagccaccgtgcccagcccagaattctataaatagcattgtccatctgatgtcagagagagaaacaatccctggatgttactcaggctggtgggctatgaataccatggtttgttgttgttttgagacggagtctcgctctgtcacccaggctggagggcagtgctgcaatctcagctcactgcaacctctccctcctgggttcaagtgattctcctgcctcagcctcccaagtagctagggctacaggcgcccaccaccatgcccaaatgatttttgtatttttagtagagatggggtttcaccacattggccaggctggtctcaaactcctgacctcaaatgattcacccacctgggcctcccaaaatgctggcattacaggcgtgagccaccgcgcccagccttttaaaagcattttaagaggtctcaggcagtgcctttcacagagaggaggctgcagcctccacgcaggcctcaccctctccgccttcttcctttgacctcggcatgtccttgatgttgtacccaagggtctgtgccgctctcctgtgactcttcttacaagcaaatgatggctccaggagctggcctggaccctgaggcctagaacctgccccaaggggaaaagcacctgctcatttgtgtttaggcatttactcaacgcttctcttaatgtcttggaaagtgtcacttaggagacaaggcagtgctcactcttggctgacaacaaggtaactgtagacagaagaatctattattaggcgtctccatgttctcttcctagctcattgctggcactgtcatccttacgttagtttccttatattttgttttcttttcttttttcttttccttttttttttttttctggagacgagagtcttgctctgttgcccagtctgcagtgcagggatccgggtccaggggatgtctctgagcccccaatcctttacggggccttttcctggggtccctgtgggctccatcccgggatgcaggacagagatgtgggatgcggaagggttccccgcagggatccaggtccgggggcaggaggagcccagagggtggcaccatcacgcaaaggcctccagaggcgtggcccgggacaagcacagcgccagccgcctgcgctgccagggcagggtccacacccacagactgtaacctggacccgggcagggcggggtccacacccacagactgtaacctggacccaggtggggtccacacccgcggactgtaacctggacctgggcagggcagggtccacacccgcggactgtaacctggacccgggcagggcggggtccacacccttggactgtaacctggacccgggcagggcggggtccgcacccgcggactgtaacctggacccgggcagggcggggtccgcacccgcggactctaacctggacccaggcagggcagggtccatccacacccacagaatctaacctggactggggcagggcctaaacccagggactctaacctggacccgggcaggggaagggtccacacccgcagactctaacctggaccagagcctgggagggtccacacccgcagaatctaacctggacctgggcagggcagggtccacacccacagagtctgtctaatctgcagaggacaagggtggggtctcccacagagccagcctgaggggtgggtgcacctgaggggtgggcgcacctgaggggtgggctcgtcgccctctgcctcatgctggcaggacccgagaggcctgggagtgctgggaactgagaaacagtcatcaccaattaaaagtcccgctgccttttattaacaccatgcgtcacccttctgtacaatatcagtgagaaaacactcgcctaaaaaaaaccttttgttgctctaaattctaagctgaacagttgctgcaatcgccagtgagttttaatacagcttccgattagcacattttaattaccctttataaacatgctctaagtgaaagtcaattcagacaatgtccagtgaggcagtgggatcccatcacacacggactcacagcgcacactactccaatatttaggtaaattcatggccgggcgcggtggctcacgcctgtaatcccagcactttgggaggccgaggcgggtggat

SEQ ID NO: 209 - DNA, 1784 bp, Homo sapiens
ggcggtggcctccgtggtgggcggctggctgctgtgtctgcgtgaccgttactccttcttccacaagctcatccctctgctgctcagtagcctcaacgacgaggtgcctgaggtcaggcagctggctgccagcctctgggaggacgttggcctgcagtggcagaaggagaatgaggaggacctgaaggacaagctggactttgcccctcccaccccaccccattaccctccacatgagcgccgccctgtgctgggctgccgggagctcgtcttcaggaacctctccaagatcctccctgccctgtgccacgacatcaccgactgggtggtggggacccgagtgaagtcggcacagctgctcccagtgctgctgctgcatgccgaggaccacgccacgcagcacctggaggtcgtcctccggaccctgttccaggcctgcaccgacgaggaggcagccgtggtccaaagttgtaccagatccgcagagctcgtcgggacgtttgtcagccctgaggtgtttctgaagctgatcttatcgacgctgaagaagacgccctctgcctccggcctcctggtgctggcctccgccatgcggggttgcccccgagaagccctccagccgcacctggcagccatcgccacagagctggcacaggcccacatctgccaggcatctgaaaacgacctctacctggagcgcctgctgctgtgtgtgcaggctctggtgtctgtgtgtcatgaggactgtggcgtggccagcctgcagctcttggacgtgctgctgacaatagtggccctcgcaggtgctaccggcctgagggacaaggcacaggagacgatggactcactggccatggtggagggtgtcagcagctgccaggacctctaccgcaagcacattggtcccctcctggagcgggtgaccgcgtcgcaccttgactggaccgcacactcgccggagctcctgcagttcagtgtcatcgtcgcacagtcaggccctgccctgggagaagccctgccacacgtcgtgcccacgctgagggcctgtctgcagccctcccaagacccgcagatgcgcctgaagctgttctccatcctgtccaccgcgctgctcagagccacggacaccatcaactcccaggggcagtttcccagctacctcgagacggtgacaaaggacatcctggcccccaatctgcagtggcatgcggggaggacagccgcggccatccgcacggctgccgtgtcctgcctctgggcgctcaccagcagcgaggtcctgtcggcagagcagatacgggacgtgcaggaaacactgatgccccaggtcctgaccaccctggaggaggattcgaagatgacgcgactgatctcatgccgtattatcaacacgttcttaaaaacctcgggcggcatgacggatccagagaaactcatcaagatttatcctgaactcttaaaacgcctagatgacgtgtccaacgatgtgaggatggcagccgcctccaccttggtcacctggctgcagtgtgtcaagggtgccaacgcaaaatcctactatcagagcagtgtccagtacctgtaccgagagttgctggttcaccttgacgatccagagagggccatccaggatgcaattttagaggtcctcaaagagggcagcgggctgttcccagatctcctggtgagggagacggaggccgtcatccacaagcaccgctcggccacctactgcgagcagctcctgcagcatgtgcaggccgtgccagccacacagtgaccac

SEQ ID NO: 210 - protein, 233 aa, Homo sapiens
MRLKLFSILSTALLRATDTINSQGQFPSYLETVTKDILAPNLQWHAGRTAAAIRTAAVSCLWALTSSEVLSAEQIRDVQETLMPQVLTTLEEDSKMTRLISCRIINTFLKTSGGMTDPEKLIKIYPELLKRLDDVSNDVRMAAASTLVTWLQCVKGANAKSYYQSSVQYLYRELLVHLDDPERAIQDAIVLKEGSGLFPDLLVRETEAVIHKHRSATYCEQLLQHVQAVPATQ

SEQ ID NO: 211 - DNA, 96289 bp, Mus musculus
  misc_feature (1)...(96289): n = A,T,C or G
aaagtcagtgagaatagtggtgggcgggtggtgcttcaagagatcagtacaaaggggagttttgaacctgctgcttctgggcatgcctccccagggcagcagaacattgtaacttttgaaactaacatagatggatcacaaccaacttgctgagctggtgactttatgcacaattaagccttgttgggattttatttttaatagtgccattacagcgtgggatgcttttcagctctgagaaacattccatttaataactaggcattagttcacacactaaatcaggccagcactaactgataagcatcacttcccccaccctcttcagccttattgttccctgcccacaaagcaaagcccttgggaagagaaggttagagggagctttgcctaagaaatgataattccatttagtcacagaaaggaaactttgctacgagccttttcttttcttatatgaatcagtctatttcacaatcaacattttaaggaacactgaaataaaaaaatataacaattctggttttaattgttatcaccccatctccaacacatactccaaaaggaaaataagcaaacactaccactaactacatctttgggagaaaaaagtagaaattgaaaataaattaaaatgtatataatagaaggccatgcaaaaagcatgtaccaaagacataaaaacaaatgctaaaagcagcagtttgtagtaaataaataaataaatataaaaaacaataaaactgctagatgtttatgaagaataggtcaatcagtgttctgtttgtttgtttgtttgtttgtttgttttacatacgagtaactcaagaaaccaccactacacttcacatgaattgtccttaccaacctgatgctgaaagaaaccatatcaaataaaatggataatgtatatgattccatccaccttaaggtcaaaagttgacaacactaatctgatagaagtcaggataggactggagagatgggtgagcagttaagagcacttgctcttttaaagaggacccaggctcagcttctagcatgcacatgctgactaacaatcatctgtaactccagttctaggaatcccgacaggctctattgatttccactggcattgggaatgcatgtgatacacacacattcatgcaggcaaacactcctttttttttttttttgaaataaatttttatgggatattttctttatttacatttcaaatattatcccctttcccagtttccctccctcccagaaacaccctatcacatcctccctccccctgcttctatgagggtgttcctccacccacccactcccacctctctgccctctattcctctactttggggcatctattgagccttcataggaccaaggacctcttcttccattgatgcctgacaagggcatcctctgctacatatgcagctggaaccatatgtactcctttgttgatggtttagtccctgggagttctggaagatctggttggttgatattgttgttcttcctatggggttgcaaaccccttcaactccttcagttctttctgtaactcctttactggggactctgcactcagtccaatgataggctgtgagcatccgtctctgaatttgtaaggctctggcagggcctctcaggagacaaccattgtgaggagcaggtgtggcagcagtcccaagatggcgcccaggactgcaggcaagtcttatgacttgcacctgacttcctcattcacctgaaaataagccatgaccatcgtgagaactgtgcaggtgcaccatgatgcaagatcagaccatatgacgaatgatgattctggccaatggactgctgttatgtggactgggctgatggggcatagttgaggggttatataagggattgcgattgggggcaggtggttgttttttgctggagagattgatttctgcattcatgttgaaaggttcctgaataaactgctttgagaagaacttagtgtcgtagttcctttctgctggtcagaatcggaggcaacaaatggtggcccgtacagggatgttcagaattcattgcagtcagggcagctagctggtaaagttcccaggtaagtgggacaatttaagttctcagattgagatgataaggttcccggttttgggacaagttgcaccaagcaccatggggaattcaacctcaggtcaaacagtgcgccaagcccttaaggacttgctgaaagtgaaaggaatcaggctgaaaaaggagatcctggagaactttttaaaagcagtggatcagatcgctccttggttctccgtatcaggacatcttacagggctcagttgggagaagttagggaagaacttgaagcttgcagaagaacagggagtccttgctaaaggggttctgccagtgtggaagctaatacggaattgtattgaggataaggaaagatgtggagttgaactccaaaagggcaatgaggcactgaatcaggtagagaggagcgatcccaaaagtcagaggcagaaggaagttctaatgatagggatatgtctgaggacgatctggagagcatagccgacagtctagagaaagtgaaaatgaaggtagaaccgtcggggccagggctgccacagccgcctccgtattcccctgacccctgacaaagcatggggcatagtctgcatccagaaacctggagggaactgcgagcccagtgctttcctgtatttcaggatgcacaaggaggtcattaaagccagcacccccagcgccagagagtctcatttgagcaggtgaagcagataatggggctgctggagtagtagtggccccagaaaaggtgcaaaaggatgttatagtgaattatttaggaacaaaaattacggcaaaatctgtgtccccctcaaaagattcagtttcgcacagatggattatgcaccctgaatgattttccaaagttattgggagatattcaatgggtccaaccctatctctctttgactaataaacaattacagccattatatgataccttaccaggcaatacagatttaaattctcccaaatatcttactgatgctgccaggaaggctttgttgttagtagaacagtgtattcagagtgctgccttgaaacaccgagatgagtccaaacagtttatcttgtgcgtactgcaaacagagtcgcaacccactggggttttatggcagggagctcccctgttaaggacacacccaaaaatctccccagccaagacacttgtttattatcctgcctcagtggctcagctggctctgattggcatacagcaaggcatgcagttttttggagttgcacctgaaagtctaatagtaccctataatgctaagcaaattgaagtgttaagagccacggaggataattggtctattttgaggtgtagttttcaaggcctcatagataatcattatccccaaggattcaatattccagttggttaaagtgcatccagtaatctttcctcgtattactgctagagatccattgccagatgcgcctcttgtttttacagatggttctaaaacaggacaaggagcctatttaataacaggatcatccccagttaccattcagtttccccctgcatctccacaagtcattgaattgcaaattgtgattaaagtatttgaattaattccaggtccctttaatttaatttctgacagccagtatgttgtaaatatgctacagtgtttggagatagtaggcaaaataaatttgagatctaccattggagaattagttattaaattgcaaagaattattttgaattggcattcactcttttttattcggcatgttcatgctcatactggattgccaggaccccttgcagaacggaatgatatagttgataaagcttccagaaaaatgcatggcctttttaatggcctcatctattgatttggcacgtgatttttcatgcacaatttcatgttaattcaaatactttatcatcatgatttaaaatttctcaagcagaggtgagagagatcgtgaaggtgtgaaaaacctgtgcccctttattgcctcaagtcagtgtgggggttaacccccagggattgcgccccctacatttgtggcaaatggatgttacccattttcttgagtttggaaagttaaaatatattcatggttccatatatacagcctctggcattatttttgcctccttacagacaggcgagaaggcacgccaggtcattgcacattgttttgaggcttggggtgcctggggacagcctaaagaactaaagactgataatggaccagcctatacttcagcctcttttgttccttttgcaagatgatgggtgtccgtctggtgcatgggttgccatacaaccctcagggccaaggcattattgaacgagcccatcgtactttaaaagaatgtttaattaaacaaaagggggaaattgtccctgctgggtccacactaagagagagattagccattgccgtatttactttaaattttttgaatgaagataaacaagggcatgttgtagctgagccacacgttaatcctgatatttctccaaaaggcatggtcatgtggaaggatatcttgactgactgttggaagggccctgacccagtgttggtttgggagagagggtctgtttgtgtgtttccccaggatcaccgacaaccgctgtgggtcccagaacagctgaccagagcaattcagggcaagcagaacgatgaggacctggatgttcctgtggctgggaatgctcctgctagtgagaactgaagagctaagttgaggaattatgtctgtgttcccgaaacccatgccattgacacatttggcgccagtgtttcctcaattctttacatttaatgctttgctacaattgcctttttttttttttttaccatgggatggagagatagctctagtgtaggaatctatgctgctgtagctaaagggattgttgtgttttcagatgattcagaatatttcacagatgagtgattgtgttcagctgtatctactaaagctaatgctacctggatttgaggggtgtggcctgccaggatatccaagggtgatggcattataccctcctaacctagatgggccccctcttttttgtaggagtgttcctgattcccttctaccttgggcagtgaagaattatttttccttttccccttatataggtacagtccataatagttccttttcaggatataattggacatatcaaaatccagctcaagtaggagctagtaatccttttaatgtatggttgttatgtggggtgaatggtaattgcactgatctttcccccttaagcatggtggcgggaggggcctggggcaatgcaaatttttattggaatgattacaatgtgtttgaaacttctgtatttcaatttgctagaggaaggaatgtttctttttaggctatgcctgtttgtgtgtggcctccttttgtgtttattgtttataatggtagttatgagaataatgttgttagttgtagtagtgatatttgttattatagtatgtgctggaatgcatctgaatatcatttggctgctgtgactaggatgccttgctttgtacctttgcctgttcaagctactttgtttaaactaaaactgccgtgactgtgaataatttttctgcgggtgttgcagaagctttggattgcttacagctgtctcccgcttgaaagagtgggccggaattgatggacttgccctgtgtctgatattaatcagcatcctggccttctggtgcacctgccacatgcagagtcatcagcgcagatcccaagtcttgatgatgcaggcttttgcggcaatggaaacaggacaatctcctcaagtgtggcttggcatgctagagaagtagtcaatgacaggtaagactccctgggcgtgtcaccaacctaagacagggatcaaaccaatgctgtttgtctcccaaggatgggtaaggctcattgccgcagggggtaacctaagacaggcattctctctgccaataagaagggcgagatgtgaggaggggtgtggcagcagtccttagatggcgcccgggactgcagctaagtcttatgacttgcacctgacttcctcatacacctgaaaataagccacgaccatcgtgagaactgtgcaggtgcaccatgatgcaagatcagaccatatgacaagtgatgattctggccaatggactgctgttatgtggactgggctgatggggcatggttgaggggttatataagggattgcgattgagggcaggtggttgttgttttttgctggagagattgatttctgcatgcatgttgaaaggttcctgaataaactgctttgagaagaacttagtgtcgtcgttcctttctgctggtcagaatcagaggcgacaaaccatatcaggctcctttcagcatgcatttcttggcatccacagtagtgtctgggtttggtaactgtatgtgggatgagtccccatgggatagtttctgggtggcctttcctttagtctctgctctacactttatctccatatttgctccttgaatattttgttctccttctaagaaggacggaatcacccacactttggtcttccttcttgttgagcttcatgtggtctgtgaattgtattctgggtatttggagctttggggctaatattcacttattagtgagtgcatactatgcatgttcttttgagattggattacctcattcgggatgatattttctagttccatcaatttgcctaagaatttcattaattcattgtttttaatagctgagtagtattccattgtgtaaatgtaccacattttttgtatctattcctctgttgagggacatctgggttctttccatcttctggctattataaataagactgctatgaacacagtggaacatgtatccttattacatgttggagcatcttctgggtatatgctcaggagtggtatagctgaatcttccagtagtactatgtccacttttctagggaacagccagactgatttccagagtggttgtaccagcttgcaattccaccagcagtggaaaagtgttcctctttctcttcatctttgccagcatctgctgtcacttgagtttttgatcttagtcattttgactgctgtaaggtggaatctcagggttgttttgagcaaacactcttttttaaaaagtcagaataatgctaactttggggacagggcaatgggaaaagatcagaaggacatatggggacttctcaccagtaattatccagtttttatctgaggactgattgtgtgagtgtgtacctatttttatccaactgtacagttatttttgtgtcagtttcttttttccctttcccgttcctctctatatttttcctttttgaagacaaagtctaactcatttattgcaggaaggcactgactttgctgtgtaactgagactttcctcgaattcctggtccttctacctgtctcccaagtgctcggattaccgatggacatccactacatccagcttttgtgtccttttctgaatatgctttacgtttcagttagaaaccatacttcaacttggggcccatcccatgggtgagcaccaaccgttgatacttaatgatattctgttatgcttgtagacaggagcatgttgtcctctgagagtctccacccagcagctgactcagacagatgcagacacccacagccaaacagtggatggagcttggagactcttatggaagaaagggaggaaggattgcagccctgaaggggataggaactccacaggaagaccaacagagtcaactaaccaggacacttgaggttctcagagtctgaactaccaaccaaagaagatacacaggctggacctaggccttcccacacacatgtagcagatttacagcttgtcttcatgtgtgtcctaaccaactagagcggatgctatccccaaagctattgcccgtctgtgggatattttctagctgggctgccttatctggcttcaattggagagggagtgattagcctcgcagaagtgccagggttgggaaatacctagagggcctctaccctctcagaggagaaggggaggaagggatgggagaaggattgtgggaggggataaccaagagtggggcaatcagcaggatgtaaagtgaataagtaaaaaaaaaaaaattaaattaaaaaaaataaatatagtgaagaaagaagtgtggagagtgaataaaagactaaatgaaggtctttgcttaaaaacacacacttcattttagaatgagtaacttctgtagtttaaatggagtttgagttctttatacgcattaactgaagtcttatcagaaaatataaaagggtcaggttttttatttttaataaattagcatgatttaaacacagattttattttagaataaatattcagatttacaaaaactctgtgatgaacagattgagatgacagacaagctgacctcacagctgcccttggtgttaaagagatggaatgctcttcctgctggccttgaactcactgacatctgcctgcctctgccccccaatggctgggattaaagacatgctccaccacacccagttctaaccctctccttttagaacctagctcaccagatagtgtcacagttaagaatggaagatggaaattgagtttgaagtttttgattaaaatttcacttttgtgtagattacacagcatagcataattgtttcacttcatgtggtggtctggatgagatacttttatatgctggggcctttcaatatgtggttcctagttggtctgtttggggaggtggaggaggtatggctttgctgatggaagtcagtcattgggcctggctttgacagatcaaagacttacctgtttcgagttggttctttgtacttcgttgtttgcagttggagatgtgagctcttagttgtttgtgccaccatacctggtgcttgctgcagtgctccgggtatgtaagtgattcttaaccatctggaatcccaagtctcattgttttggctgtgatgttttgttacagcgatggaaaagaaagtaacataaaattaacaagtattctttctattttgcttcttcaagagaaaattggaaatcatgagtggttcagcatattattgagtttcccataaatagggctggagagacagctctttcagagaccctgtttggttcccagaatccacttctgacagctcacaaatgcctgtaatttcagctccaggatatctgatctcttctgccttcaatggcacctgaacacatgtgtgcgcatgaacagcacacacacacacacacacacacacacacagattaataaaaaattaaaataaatcttaaagtttttttttattaatggaaaccttgtggaaagacagatgtaaggacaactgaagaaaggttcatttgaaaagaaatggagacttaagggagacccgtgacagcatcttcatcacaggtggtcaggtgaatatgcgcctgcagggaaggtttgtttctgagggctgaagaatttgtatattaattggtggattgtgcctgctgagaacttttactgctctagaagttctctttctagtgctcctgtgctgaagtgcttttttgcataatacttgggttgagtcaccaagtccgaagaagctccagcagaactacattacttctggagggctatctttggcaggatgagtagcgtaaaggttctgcaacccgctgccagtccccgagcaaacaggccatttctaaagcaccactggcctggctaatcagctcaaacaaccagggcaatccggcagcagccagcccgaccctggccccgcccttcgccaggccccgccccgcctccggccccgccccgcctcccggcctcggtcttccttccgggtcgcgctgggccgggcccgccgccgcggcagcagcacgggatactgggagccgtctcctgctgcccacgctgcgggcttgcggcgaagctctgttcgcccagttccggaccctgcagggtacggcgctttcttccttcctccctcttcaaggtctcgacgttcccccctcggcgtgggcggggccgggcgcgcgccactctggggagcgcggggcggaggctctgggcccacgcgtgcctatggtgctgcgccgctgtgctggcggagaccggacgtgggtgccgccgcctcctgtcgcggctctcttgggcctggcacgctcacggcgagctgcggacgctgggcctgcaggctgcgcagccctgacttccctctcacgcgggaaggtttctgtccaggcaggctcgagccaggagatgccaggctgcagccttctttccatcgtctggggtgggcccagccacttgtcaactatgtttggcgatggggttggttctgcatttcatcggcttcccaagtgctcttagtcccagagctgtcagcagtcagttctacttgtaatccacaaagggtcaggaagttagctggctgtggcccactggtctgctctgttgggagccacctgctccctctgcttcctgcgcacactctgaggagatcctaaggcaggcacactgcttatcttgcccactctctcgtcctacacgattaatgagtacagggtccctcgcactcctctgtcttggagtaagtcttgggtggaagtgaagtctcatctagtggcgctaagaattagacagtcttgagtagtcattgaattccattatttccagacttgcgtaccaatttgaaaaattcctgtcccacgttttggctcttttgaaccctattccgtctttgttttcaaagtcagagaggtcagggcctaagacctggttgtttgtggtcctgttgctgctgtcttacagtgttgtttacagctgatgttttgctttcaaatatggtcgtcgaatctttaccaagccactgcccagtcttctcagcttggaagcgttactatttgccgtcttcgctgttctaagtttggagtcctcttgggtctttcataatatggattgtgactaacccccacccccctccgtgcacgtgccccatggtttgttgtcttactcaactttggtgtgagataaataatgctgtgccttcttggttattactggccaatgacttcatcccaatttgtcgagttctgttctttttcttcctgtcaagtgctggtatatggtgaacacttggcgcccgtgtattcttgagaccttctgaactgctagcagtgacctacttcctgtggtaatgccatgctgctcttgtttctccagctttacagtgtgtggcgattcaaaccttgtctgacatatcatgaacatcagtggatatttttgtaatgaacatttagttgagggcaggttggattccttttgtgtttgagtgttgaggtagagctctcaatgtagccttggctgggctctcttagaggtcttgttggccctggcccctgagagatggggctaaaggtatgaagaactgcactgagttgaattcccttgtgtctcgcccctccctctaaaatgccttgccagtttttgaaatttgtaaatttgcctttcctttggtcaggtgaattaatggccaaattcttaaataagctgtctttttgctcaccccgtttaccctgtcgagttgttccacatagaaactgattcccagtcgcacgtctgttgacttgggatcttctcttcgtgtgtgcagtgtcctgttggccgttatcagtgataacataacaacattctatacctgctttcagcccaggcaagctcaatgctcaagctctcagatatccctttgagtttcaccattccaacaaggtatcacaaacagaatcaaattcctgtgctgatgtagtagatgtgtaaataataatcactgcttagtactttgctctttccagatagaaatgtgtatacgtgtgtttcatatagtgtgtggtatagctttctgcagcttctacttagtagtcatcactggtgaatgtgtctttacatagatgcacatgccatcttacctttcaaaggcttttttggctcattattttaggagcaacctaatactgagccaattctctcttagtatttagaacactacacatttatttctattgtatgtgaaattactaggccatttctgcatgtgaatagctgtttcttatttcttatgtctctttgcttggtgtcagttagtcttagtttgaagatattaagtggaaaattccaagggtaaatagtttgtaagtttttaaatcctgtgctattctgagtagtgtgatgaaagtgcatcccttcctgatctgtgaactctatctttttctactccagctacatatgtccatgtatacgtatgtctagtccatatgcccattacatagtaagtaacagacctggctgtcagatcaactgtgttcaagcaactttttttttttttaatttaatgttgccaaatttggatcaagagtactgacttcagaagtccaagcacgccaaagagaagccagccattaagtacttcccttatgagtacgtatgtatgtatgggagtgcatatgtctagaaagaatcataatctacctagcattctctgctctccatggaccacagtgggatttcaaaacatctcctggtgattgagggccattattgtatatatttgcatatttgtttcttttcttggtgcaaatgattacattgttgggtgaaagggtttatgacttttaaattttcagagattcttccacagtaccctttaatacagctgctgatacggagactagggaggtgggtgggtgcttaagactctttgttgcttttgtaggagacctgagtttgggtcccagcactcacagctacctgtatctccagttccatgagatccagtgccctcctctaacctctgtagacaccagacaagcacatgggacacatacatacatgcagtcaaaatactcatacacacaaaataaaacatgtaaatctaaaacagtaaatctcaaaaagagatcgctagcacccgatgtatgcaatttataatgctgatttatatgatttttgtcataccgttgtcaagaatggttacaagtttgtgattacttcctcttggaagccaagagtctgtggataattttggaaggcgtgaggctcctagatcagagacaaagtactgtcagactgtggcattttgtgctgtcttcagggtgctctgacaatggccacatgacactagcacctgtagtcagctgtgttaaaaggagagagtcctgactctttcatagtgagctgtaagcaaacctgcccatcttttggctgaagaggaaacatgacgcttgttctcccggatagttaacaaaactgtgtgttgtggtcctagggaggtttctttatctaccaaggccatttgctgtaaacgccagtacacctttgcttgagacatgcacaaatacaccttaatgccatgtggagggaatggtcacattttacatttggtagtttggggatgaaaagggatatcttactattgttttaatattgcatttctttgcctattgatagggttgagtaactatttctttactcatcatgtaaatttttgctatgtatcatagcattggcttattttttatgtgctcctcttttattgatgtgttatacctttttgtatattggcccattaagatttgacaatctattcattgatattttttctcagcattgtttcctttaattttcatttgtgtttatgtgtattgctccatgtatgaaacctgtgtgggggtacctgcagaggcaagaagaggatgctctaatcttcccctggagctagtgttataggcagttgcgagctgcctggaggaggtactgggagctgacatcaggtccttgggagatcaggaagcatgctagccactgagccacctcttcaatccttactgcttcttcaaatgctggttctcagagcttttgctacataaatttcttgaaacttacataattttaatataatttaatataattttatatattttcttgggatacgtattttcttggaatgcaagttatgacccagagtgaatttaaaagagttatgccatttagttagtagagatctggtatactgaacatgaatttttgctggacaaaatatttgtaaatctaaaaaaataaagtgaatgtactctgctgtacaaaaatggatagatagtatttggttgaagtaaatgcatatagttagtatggttttagcaattggggattctgttttcaacctcacatccctggattttaatgtctctctctctctctctctctctctctctgtgtgtgtgtgtgtgtgtgtgtgtgtgtgtgcacacgcgcgttaaaaattcagggttcttgccccatcttgggattcatcccatgtgtgaacactaaaccctggcacgattgctgatgctaagatgtgcttgcagacaagagcctggcatggctggcctcggacagtctctgccagcacctgactgagacagatgcagacgctcacagccaaccattagactgagcttgagaacccagtggaagagttaggggagggactgaaggagctgaagggcattgcatagaaagaacaacattatcacctaagtggacccctcagagctcccagggtctaagacactgaccaaagggcatacatgagccagtctgtggctcctgctacacattggcagaggactgctttatctggcctctgtgtgaggggatgtgtttgatactgtggaggcttgatgcctcagagaaggaggatgctagagtagtgaggtgggagtgggttggtgagtacccttttagaggaaaagggggggtgaggtagagggttcatgggggggccaggaaggggagaacatttgaaatgtaaatttataaaaataataaaagattaaaaagttaataccaattatctactaattacttatttttgcagccaaagaaacatactaaatatgacttaggaaagatgtaggaaactgcaaaaataaacattttcttactaaagccttaaaaattcactgtccttctaaatttagtctttcctatttaatctttcttgtccatgatgagacagtgaagaaaatggttgggtgtagataccatacatctgtaagatactctgtttggtagcctgtggttgcaaacaccttccctgtaccagatagcatggtgggcaggaacaggctttccatatctgttccccagaaaaccattcaactcgtccttcagctctgctttaaaaagccctcttttgctattcttttaactaaagtaaacaagcttggtgaaatgttttagaagtttcgatatacttgttaaagaaacctgggggaagaaggatgagatctgattctgcaaactagccattagtattcttcatttagttaatccagtctcttgtgtgcctcactttctcacaagacacctgacctctggagatccagacttacatccttactgtctttaggggatacttggaaaactggaagcgagttcctcaattcctttaatttctatcatgtggcttccctgctttcaaacctggatgggagtcatttttctccattggtatgaagaattctgctctatattctgtattggagcctgtgtttatcaggctctgtcactataacaaatacccgaggattgattcaagaagaggaagggtttattttggatcaggattttgaggttctagtcatggtcagtgtccctattgctctaggtcagtggtggcatagaacattataacagagcatgtgaggaaggcctgttgacctcgtggaagttgggaggcatggaggagccagggtccccatattctcttcaagtccttgtctccagtgacctcttttcagtagatctcgcctcttaaaggatcagatatctcctatggtacttagaggctggcatctaagccttcgacacagccttgttgcagtagggtcaggggcattgagccacagccttggtggaatttttaaagaaaatctttttgttcttaagacattttaaaaaattctgctttgaattctgtatgtgtgtgtttccgtatgtggatttgtgtacagtagtgtggtgctcttgaaggacatagagggcagctggagattccctggagctgaggttttaggggttgtgagcctcctgagataagtactaggaacttaacttcagtccagcgcaggagcggtatgcactcctaatggccaagtcatctcttcaccattgccagctacctacaaacaaacataaaataaaataagatgcttacttaattggagtattcacttagaggaagagaggcactggaaggtttacaatactttcttcatatctttttttttttaagatttacttatttgtattttgtatatgtatacattgtagctgtcttcagatacactgtcaaaagagtgcatcagatcctattattacagatggttgtgagccaccatgtggtaattgaactcaggacatctggaagaacagtcagtgctcttaaccactgagccatctcaccaccctactcatatctttttactgtgctgtgtgttttcccataggttttaagcatctagtattgacttgtgatgacagaagagaggctttgctaacttacgttttgctactcagtagcatacctggttccggggatagcattttccttgctgggtactctatagtctgtcttagctcttaggttcgttctctctctctctctctctctctctctctctctctctctctctcactgtctatatgtctgtctcagaactttcacatttccgtttcttctggttctccataagcagctcatgtccttagcacagatttggagtgccaaagctgtttcatatttgagaaaatagctgtcttttacttctctaatcatatctttcatgactctttctttaatttcaatcagagttcctttgtggccagagtcaagtctcttttatgtattcaggggctgcttttgtactaacagaagttgcccctttttgacattctctttgaacagtaaaatttcaatatgtatactattcctccttggaaggcttcagggaagttcatgcatttgattctggcctattgtgtttcaggttttattatccattttcctcctttttcttcatatcaagatatgggccttttttttttttatgaactttgtcttgaggaatcaccaatttcatttctatgtttattttaaggttgtttattattctttttgtggtaaatttatataaatcaggaaatgtttattgagctcatattggtatattctttatcaggcatatttcaagtaggatatgttctctggattagagggactcataatctgttgtaaaggaaacatctttgcagctgagaaatagggctaagagagcgaagcaaacatggatggtcaacacattttcaaacggaccttggctgagatgaaggagtcatgaggactcagcagaggacttcacgacatcaggcatggatactcactgtgagggtgggcaggaccatgggtctcgggaagagtaggggacatagaggaaactgtggaaaagaagggagtagaagacaggtgctaatggggttgaactttgttgtacctgtcgtacccaaactcttccttgaacattttctttctctgtgtacctgagaaggaggaagaggaagagaacataggagggagactaaaaagttctcagagacgcagagaggatataaggatgtgtgttattgtgcatggctagaggagacagggataaatgttgaaattaatttaaatacaactagttgagtgcagtatgaatcatattcaaatataattccactctcatggccttttgttaacctttggattgaacccctttctttgacccctttcttgatgcgtttcagtcagattcaacgagacaggcatcgtttcatgactggttcccgcagcatacctgcggctgccattggtactgctagggactgctctccacccttcttcctgtcacttagggcctcaactctgggaggcttttgaagtggtttgtgcgccctgctttttccaatgcctgtgcttttctgcctgcatcttctgtcttcccgggtcttttcactttcctataagttgcgagtctacttttgagttttaaacttgttttccaggttcttgtattctggatgaggatcattctgtctccgctttttgtttattgttgcgaagtcccttttctctctcctagaccagcttcctagatgtcttacctgccgtccagcatcccttggctctcctgactcccacctcacttccattttccatggtaaatgtgtatctcccaccctcttgtctatctctcttgacttctcttttccactgttcatgctttgtatgtaattgtattatttaagttggtcaagcattttataatatgcaagatgtgattgaaaacaagctgtactagatagaataaaaccttattttataacaaggtgtttcccaaggagtatgatagtctcaagatacaacttaaaatggtagttatttgtgttccttggttgtagttgtgtgaagtttgctgtgtcctgggagttcttgtagagggcataggtttttatgctcacaaataagcaccagggaaaccaggaatgttcagcacagcggcttgtttcttcagtagaagggatgtgtatacctgtttcccacccagaagtgagagtggatacagctggtagcttggtgatctgtgctatgtctaggaccaggccacatctaacccccccagactactgtttatctcagaattccccttcctagcctttacctttagctttgtttcttagtcagtagaactcatccgtaagggaggtgtcacgtgtacagtgcagctccacacaatctgtgacaaatcacaccagatcctagggccttaagctgtagaactcatctttatggaagaggttacctttgcaagagactcgatgtagttatgccctgagctttattgtgcacatggatttgagatagttgttgccaggaaactttacccagcattgtactgtatttaaatatctctaaagcaaactgctcagtgtcagactctagaagttcgaaccaactaagggagttatgctgaatggcagttccttcttgactcatgatcattgatgctctgatggccatttgtggagacctcaaagtttctcacctcataaccacgatcgataaggaactgaattaagtaataactaaacctgaaggccactgtcttgccaactttgacttattaactgcaaagtcatattttttatgctatgagagtcttcacaatagctttttgtgtgaacttgaaaatttctccctaaaggtacattttataattcattccctaaaggtacatttataatcattcttttgtagtactatagtattttatattagtttttaagcttacttttataaaaattaactaaagattctctttaattcagaattaagaaaaaatagcatttccattttatattttcaatctgaagaaacttgaccatataacatatatttacactatatgactcaggttttacatgtgttcccttaatgcaaattttacttagcttttacacagctcaaaaatactatttcctgtatgacaggctcgctggattttgcattatgtgtaatctgcagtggtaagaactcgccggcatccttttgtgaagaatgattgtgagggctgacattactgaagatccctaccctgcgctgtagatgtttcctgggtctcattacactgatggttttctgaggagtaagcaggagcttagtgtgagggagaggcagtgtctgatgtgctgcctcttgtggcaggattttcaccaactgccctgctgtagcacatggcttttctccctgcttgcctcacggcctttccccaaggtctctctctggttgttctaactttccttgtcctggagggtgcaaatccctctctgctgccttcagcagctgaccccttggtgattcattttggagtggctgagttttcaccggcatgcatcttcagaaagggtccccccctcccctgtgtggaaacaatgttacatatttgtgcctacaatgtccataatgttcccagtttgaaactattttggttttccagttctttcactctggtcagtggaatcccaaatctaaggtggtgcaaactcaggccgagtgcaaggcatggcctgatggtgacactgtgcatggggttttctggcgagggagggagccagtttcttagctctggttccatggacaggattccttctgatttgggctttatgaagttccttccaaacattgcccgtgtttgtagggatcagtaattctctttctggttgttagtgtgttctgttgtagccagtttggctaataaagtagccggtgagtcaggttagctccagggcttgtcctctgctctggaccttcctgcttctcacaagtgtgcattctctacacctgttttacacataatactttattattgcactggttagcattttatacagcacctcagtgtgtttagaccaggctggcacagagaggcagaagatgctggtgcgcattcttagatgattctgagctcttttggttttgttccatatcatctttctatcaaaacgctaaaatacggagtatgcatcaagctacggattaagaaatgaagaccttcctttgcctgcgcttagtacttcacaaaaatgtattactaaatataaaccctgctaaacatatttctgagacaaatgcaggacgatttggtgttagagagcaagcttgctgctgccaggcaacttgggtggaaaagaagtgagtgttgagacatgaagtaaaatataaaataaaatatgagttttctaagttagcaaagaagtgctgcctggctcgtgggacacctcagtataaggaatgtacattgaatcttgtatttcagaaacagccattggaggtttggaataatacaggttctacattgtaatcatagtgctcacattttataggctgcaacattgctctacttaaattttaaaaagggggtagggaagggagttttgtgttctttttctacatagaagaagttggagccaggatattacaagttcagattcccttttcatattgacaggtagtgggctttttactaacttaacaagagtaagttagtagagatggcttgaaacaagagaggcctcctggtgtcttcttgactatggaaggttacaaactagtccagaatttaaaaaaaaattttttttattggatatattctttatttacattcctttttttccattttgctatttctttttttccttttcttttcttcttcttttttaaaaaagatattttctttatttacatttcaaatgttatctcctttcctggtttcccctctgaaaaccccctaatctccccccccccccatcaatccacccattcctgcttccaggcccttctacatgggggcatagagccttcacaacaccaagggcgtgtctcccattgattgcagacaaggccatcctttgctacatatgcagctagagccatgggtccctccatttgtactctttggttgattgtttagtccctgagggctctgggggtactggttagatcatattgttgtccctcctatggggctgcaaaccccttcagcttcttgggtcctttctctagctccttcattggggaccctgtgttgttagtccagtggttggctgagagcatccgcttctgtatttgtcaggcactgatagaacctctcaggagactgctatatcaggcttctgtcagcaagcacttgttggcatccacaaaagagtataggtttggtgattgtatatgggatggattcccacgtgggacagtctctggatggtcattccttcagtctctgctccacactttgtctctgtaactccttccatgggtattttgttcccccttctaagaaagaccaaagtatccacactttggtctcccttcttgagtgtcatatgtcctgtgaattgtatcttgggtattctgagcttctgggctaatatccactgatcagtgggtgcatatcatgtgcgttcatttgcaattgggttacctcactcaggatgatatttctagttccacccatttggctaagaatttcatgaattcatcacttttaatagctgagtagtactccattgtgtaaatctaccacattttctgtacccattcctttgttgaaggacatttgggttctttccagctcctggctattataaataaagctgctatggacatattggagcctgtgtccttattacctgttggagtgtcctctgggtatatgcccaggaatggtattgctgggtcctcagcaattggaatattactatgtccaatattctgaggaaccaccagactgatttccagagtggttgtaccagcttacaatcctaacaatggcggagtctttctctacatcttcaccagcatctgctgtcacttgagtttttgatcttagccattctgactggtgtgaggtggaatctcagggttgttttgatttgcatttctctgatgactaaggatgttgaacatttctttaggtgcttctcagccatttggtattcctcagttgagaattccttgtttagctctatatcccatttttatttatttttttatattttttattttgttttttattaggtatttatttcatttacatttccagtgctatcccaaaagtcccacacctgctcccccacccacccactcccacttcttggccctggcattccccagtactgaggcagataaagtttgcacgaccaatgggcctctctttccactgatggccaactaggccatcttctgatacatatgcagctagagacagctctggggggtactgggtagttcatattgttgttccacctatagggttgcagatccctttagctccttgggtactttctctagctcccccattaggggccctgtgatgcatccaatagctgactatgagcatccacttctgtgtttgctaggacccggaatagtctcacaagagacagctatatctgggtcctttcagcaaaatcttgctagtgtatgcaatggtgtcagcgtttggaggctgcttatgggatggatccccggatatggcagtctctagatggtccatcctttcgtctcagctccaaactgtgtctctgtacctccttccatgggtgttttgttcaacctaagatagcaaaaactcttctcaaggataaaagaacctctggtggaatcaccatgcctgacctacagctgcactacagagcaattgtgataaaaactatatggtactggtgtaacaacagacaagaagaccaatggaatagaattgaagacccagaaatgaacccacacacctatatcccatttttaactagggttatttagttctctggagtctaacttcttgagttctttgtatatattgaatattcgccctctcgcagttgtaggattggtaaagatctcttcccaatctgttggttgttgttttgttctattgaaagtgtcttttgtcttacagaaggcttgccatttttatgaggttccatatgtcagttctttttttttttttttttttttacttttttattaggtattttcctcatttacatttccaatgctacccaaaaagtccccaatacactcccctccccccccactcccactttttggccctggcgttcccctgtactggggcatataaagtttgcaagtccaatgggcctctctttccactgatggccgactaggccatcttttgatatatatgcagctagagtcaagagctctggggtactggttagttcataatgttccacctataggtttgcagatnnnnnnnnnnnnnnnnnnnnnnnnnnnnnnnnnnnnnnnnnnnnnnnnnnnnnnnnnnnnnnnnnnnnnnnnnnnnnnnnnnnnnnnnnnnnnnnnnnnnnnnnnnnnnnnnnnnnnnnnnnnnnnnnnnnnnnnnnnnnnnnnnnnnnnnnnnnnnnnnnnnnnnnnnnnnnnnnnnnnnnnnnnnnnnnnnnnnnnnnnnnnnnnnnnnnnnnnnnnnnnnnnnnnnnnnnnnnnnnnnnnnnnnnnnnnnnnnnnnnnnnnnnnnnnnnnnnnnnnnnnnnnnnnnnnnnnnnnnnnnnnnnnnnnnnnnnnnnnnnnnnnnnnnnnnnnnnnnnnnnnnnnnnnnnnnnnnnnnnnnnnnnnnnnnnnnnnnnnnnnnnnnnnnnnnnnnnnnnnnnnnnnnnnnnnnnnnnnnnnnnnnnnnnnnnnnnnnnnnnnnnnnnnnnnnnnnnnnnnnnnnnnnnnnnnnnnnnnnnnnnnnnnnnnnnnnnnnnnnnnnnnnnnnnnnnnnnnnnnnnnnnnnnnnnnnnnnnnnnnnnnnnnnnnnnnnnnnnnnnnnnnnnnnnnnnnnnnnnnnnnnnnnnnnnnnnnnnnnnnnnnnnnnnnnnnnnnnnnnnnnnnnnnnnnnnnnnnnnnnnnnnnnnnnnnnnnnnnnnnnnnnnnnnnnnnnnnnnnnnnnnnnnnnnnnnnnnnnnnnnnnnnnnnnnnnnnnnnnnnnnnnnnnnnnnnnnnnnnnnnnnnnnnnnnnnnnnnnnnnnnnnnnnnnnnnnnnnnnnnnnnnnnnnnnnnnnnnnnnnnnnnnnnnnnnnnnnnnnnnnnnnnnnnnnnnnnnnnnnnnnnnnnnnnnnnnnnnnnnnnnnnnnnnnnnnnnnnnnnnnnnnnnnnnnnnnnnnnnnnnnnnnnnnnnnnnnnnnnnnnnnnnnnnnnnnnnnnnnnnnnncccaccccctgcccacccactccccctttttggccctggtattcccctgtactggggcatataaagtttgcaagtccaatgggcctctctttccagtgatggccgactaggccatcttttgatatatatgcagctaagagtcaagagctccggggttcagttcattttttaatggggttatttgattttctgaagtccaccttcttgagttctttatatatgttggatattagtcccctatctgatttaggataggtaaagatcctttcccaatctgttggtggtctttttgtcttattgacggtgtcttttgccttgcagaagctttgcaactttatgaggtcctatttattgattcttgatcttacagcacaagccattgctgttctattcaggaatttttcccctgtacctatatcttcgaggcttttccctactttctcctctataagtttcagtgtctctggttttatgtgaagttccttaatccacttagatttgaccttagtacaaggagatagaaatggatcaattagcatttttctacatgataaccgccagttgtgccagcaccatttgttgaaaatgctgtcttttttccactggatggtttttgctcccttgtcaaagatcaagtgaccataggtgtgtgggttcatctcagggtcttcaattctgttccattggtctacttgtctgtcactataccagtaccatgcagttttgatcacaattgctctgtagtacagctttaggtcaggcatggtgattccaccagaggtccatatgtcaattcttgatcttagagcataagctattggtattctgttcaggaaaatttcccctgtgcccatgtgcttcatgctctttcccactttctttttttattagtttcagtgtatctggttttatgtggaggcccttgatccacttggatttgagctttgtacaaggagataagaatggatggctttgcattcttctacatgctaattgccagttgaaccagtaccatttgttgaaaatgctctcatttttctactggatggttttagctcctttttcaaagatcaagtgatcataggtgtatgggttcatttctggatcttcaactttattccattgacctaccttcctgtcactgtaccaataacatgtagtgtttgtttgtttgtttgtttgtttgtttgtttgttttttatctcagttgctctgtagtacagcttgaggtcagggatggttattctaccacaagttcttttattgttgagaatagttttctctatcctaggctttttgttattccagaagaatttgcaaattgctctttctaactctatgaagaattgagttggaattttggtggggatttcattgaatctgtagattgcttttgccaagatggccatttttactatattaatcctgccaatccatccataagcatgggagatctttctatcatctgagatcttcttcgatatctttctttagtgacttgaagttcttgtcatacagatatttcacttgcttagttagagtcacaccaaggtattttatattttttgtgactattgtgaaaggtgttgtttccctaatttctttgaatagaggaaggccactgatttgtctcagttaattttatatagagctactttgctgaagttgtttatcaggtttaggagttctcttgtggaatttttggggtcacttaagtatgctatcatatcctctgcaaatagtgatattttgacttctttctttccaattcgtatccctttgacctccttttgttgtccaattgccctggctaggacttcaagcactatattgaaaaggtagggagagagtgggcagcctcgtctagtcctttattttagtggatttgctttaagtttctctctatttagtttgatattggctactggtttgttgtatattgcttttattatgtttaggtatgggccttgaattcctgatctttccaagatttttatcatgaagaggcattggattttgtcaaatgactgctcagcatctaatgaaatgatcatatgggttttttttctttgagtttatttatgtagtggattacattggtgggtttctgcatattgaacaatccctgaatcccagggatgaagcctacttgatcatgatggatgattgttttcatgtgttcttggacttggtgtatgagaattttattgagtatttttccatcgatattcataagggaaattggtctgaagttctctttctttgttgggtctttttgtggtttaggtatgagagtaattgtggcttcatagaatgaattgatgatagacaaggccatcttctgctacatataagctggagccatgggtccctccatgtgtgctctttggttggtagtttagttcctgggagctctagggggtctgattggttaatattattgttcttcctatgggttgcaaaccccttcagctctgtcagtcctttctctaactcctccattggggaccctgtgctcagtccaatggttgcctaagagcatccacctctatatttgtcaggctctggcagagactctcaggagacagctgtatcaggcttctttcagaaatttaatttaaaaacagtgtttggctctcctaaatatttcttcaggaatagattgaagcaaaacaataggtttgaaacctccagaaaagtatggtttattatatttttatcagattctgataaacaaaaatttaaaaattattagttcagaattgtcgacaaatgctaagaaatatagcctagtaggaaaattattttatgctttttattttatggcttttctatcagtatgccaaactttggtcaatgtacttctctttagctattttgaattcttaacttaaaactaaaactgtttgtttaaactttgtttcaggctgtctcatctcagcatctgtaggtgaaagcagcatgcatgtttcagacacgtggatgggcaccaactcctgtgcttcccgtgtgtgtcaggtgacctgtcaagccagggtgagcgattcctaagagtgtgtggcaacaaattagttgccaggtagctgagaactgccctaacaaataatgctaagggtatagattaaatgccatctgttgatctgtgatatgtaaggcagttaatttccttggtctaattaactgtcatctcgaaaaactgtatttccatgatgtggaatctgtacatagcatgtttgggagaatcaaataattaatcacagggaatcataggaccctggtgttggttcagtaggtaaaggtgcttgctgtgcctaacaatagaggattgttccttagaatgtgaaagtatgtcagtgcctgagatgagctgaggtaaaagtaatgtttgtagtctacgatatattttaaataacattaattttaaaagttcaagtagttgatatttcttgagtgatggttattttatataaaatatgacttcgagattcatatgtcttccattgccatcagcaatttgttccccctttagcataaagttatatatgtcagtttcttacaaattatattaggtacattgtttatggcagagatcatatttatagttgacaacttacattttcagattttattttgggaaatgacactggggataatgcctctttgttgctatatccatgcatttctttctttcttttcttttcttctttttttttctttgcttatttaaattattttacttcaccaagccattcattttgtagaccatccttcagagttcatgcatctcaccgaggacacctgaccttttgaagcttcataattcacgactagatgtcaccagtctttcccatgttaacagttctgaccatgttttattatatgtgccttcggcgtcgagccaggacagctacaagaggagatatgatgaacagccataggactatagtgtcaaacagccggacttcccctctcaatgcagaggtggtccagtatgctaaagaagtggtggatttcagttcccattacggcagtgagaacagtatgtcctataccatgtggaatttggcaggtgtaccaaatgtcttcccaagttctggtgacttcacgcagacggctgtgtttcgaacttatgggacgtggtgggatcagtgtcctagtgcttccttgccattcagaaggacaccgtccagtttccagagccaggactatgtggaactgacttttgagcagcaagtgtaccccacggctgtccatgtgctggagacttaccatcctggagcagtcatcagaattctggcctgctcagcaaatccctactccccaaatcctccagctgaagtaaggtaagactcattctctcattcttagtgacccaggtcgtgtggatagaaggctgagctggtcagcactggagtgttttggtttgatttggttttttgtttatcttttttctttttggcagcatcctcttaagtcacttagatacctctggttttgagatttcttttcttaatgtcctgatgaagaagagagatcacgcacatgaaaatttaatgtatattttcttcctaaaacaccacacattatactcatagattgtgttgtttgcttatcatggagtttactgtacatgaaaggcatagtttgaggtaatgggaatatggtgcaatctgcagtgtcactaagtattagaacttctaaacttactttaaagccaacatcatgctgctgttttaaaatacttttaagtacaactcaagatactcctatagcgtgaagctgtcgagaggtctttaggagattagcattgatgttaggtgaatgctttcatagtcaacacgatcatttaaaaatacatgctaagtttgactgaattgctgagttccccctggaagtctgtttccatcattaacctgtagagcagccccatgactcttgctttgtagagttctttgtgtgtgtgtgtgtgtgtgtgtgtgtgtatgtgagatgatcatgtaggccacttgtctaaaggtatggaatgcagccatgcatacatgtcctttccatgtgcctgtgacctatcctttctacccagagaaaaaccacttggtattatttccatgtctctgtagatacaagtgaataaatataatattcttcttcatccatacaataattagtgctcaggttgttttgtagccgacttgtttcactatgtagcagtgaagcagaccacgcgttgcttttttcctgtagctgcatgtaaagtgtcccatctgtgtgccctgttaatttactactccttagctgatgggtgcttagcttttgccactcttctgctatcgtaaacattaatgcagagaagaaagtttccattcatcacttcacttctctgtaagtctttgtgtgagatagatgcccccagaagaattgcttggccaaagagacatgtatttgtatggagccagatttccctctaaagggtctatgcctgtttatattaccacaagaaatgtaaatgtgggcaagctttgctgaaatgctcacagtgttaatacctttcatagttttgtaattaatttggtgaaaatgtttttgttatttttattaagattctttgtctctgaggttgaatagcttttcctatatcaaggcaccatttatgtatcctttcctttgattatctgatcatttgtgtattcttttgttacttgttgatctctccattttagatcttcatgttaatattaggagacgccgtcattgaacattttagtgtctatcatgtgctgtgtggttttgtgcctgttgaggatgcatcaacaatgtacataataaaaacctttgccctgtgagctcgttctagctgacagtgcttcacaggcacccttcacaggtaccagtgaattgtggggccccagcaggtagtgtaggagaggtgaagcacagggcagcccccccacccccaacacacacacactgctggctggcctctctgtcctgagtgccaaggaacatgtttcaaccctgccaagaaacaaatacagaggtcagctcaactattgctggaaattgctttgataatttattgtgtatagtgttgttaataaattattaaaaacacaaaaccatcatcttatatacagacttctttcctgaaaggaaaaaactaactgcaggaatttggacagaatcttttctcatgtgggaattatttataatattctgtcattctttatcatccttataaagttacccacattttaaacactgtgaacagatctgagatttatgacacagacgaggccttttctctcatcccaggtactgctgcatagctgatttcattgtgtaatattaaaacttaatttgtagatgcctctgatttgctttattgattttagctttatttctcagaaaacaccattaaagtttaggagaaaaggcatcagatgagtgtgtgttcctgcaaaacaaaacctctgttttgttttggtttttggagacagtttcagccccacgctgtcctggaactcacagcagtccccctcctccttcctctcagtgctgggattacttagctccaagaaggcatttttaagtgttactgattgtgagcttaagagatgcttcatcatctaaaaggaagatgaaaaggttcttacagattcagtaactgttaatgttttggtgagtttctttagacagtgggaaacattcattgggcatcctttctctgctgggaacaaaacaaagaaccacacaaagatggcttttgttctgagctacaaaccaccctggaagtggactgtgacatttaagggacatgtcctggctaggggaagccaatgtgcctgtggctctcggaacgtcaatagagtggtttcctcaaggaagtgaattcactcaggttgagggtggctcagctggagggctaggaaaagtggagaaggatgacaccttccaagcttagatcagagttgaagaagtgagagaagcccaagctccattaggggcagcaaaataagatggattgaagacgtaaactaggggtttctggaattagagatctcagagctgacttggcactggctttctagaagctacagtgagactcatgtgtagtcatttactgtggaagataccaacaaggagaggggacattcagaagagaagggtacaattctgtgtggtttcatctcctattccagcctgactacctgtcagtcctagcatgggctgtaggaatagaacgaggaccgacaaacctggctacatgctgctcaggagcccaggatagttttcttaacaggctggcagatgaatgttccagggagcaaaccagaactgtctggaggataaatacaagacaccagggtctgcgagtgggagaaaggagtcagctactgccaactatattatatggtaattgacagagcattcactttgcttaatacacaggcattagaagacaaatgaaggagcaataccatttatcaccaaattactaccacttatatccaattaacatgagtcttgaatgaagaacaattttacagtaatgtgtgtatctttgtgtatatgtaagaaggtacagtttctttccttgtagttgggagagctctggactgttgccgtatatttaactgaatacttttgtggcatttaggagttgaaacgagttcgagagtgttggagagttcaggaattttatgtaggaaatgagcttcctattgtcttaaacattcaaagatataaaagccatgctttcatagtttttgtgactttgttagccaacagtataggaaatcacaggcagttctactgattttggtgtctttttggctttttgcttagtgcttcttaaaggaaaaggaaagaggtagaacaaagtgatctgtggctgaggattggagaataggctggctcagggtcacactttagaagagagagaaagaaggtgaggaggaaggcagaaaatgacaaattgatgtcgtactaacgcaaccaggataatgttatttggggagtaatgtttactgatttgcttctttgtttttccagcgctcaaaacactttgataaatcagtgacattaggaaagccgagcagcagtggctgccatggaagaatttcctgccaaaggaagttgcttaagcagtggtttcatgaattgccgaatcctggttcccttaaccttgtagacctgggatggtgattttatcaagaagtcagaattgaaagaccaggcctttcacacagaatggcagcgtgttactttctagttagtgatgggctggactgttgtctcttaagaacaaaggcaagcccttttatttgatgggttttgtttttagtcttcagaagagaatcttcaaaagatatcagataagggggtggtatttatggttatagaagctgtacgagtccccctgttaatgtggcttgttttgtggtttatggcgtccttggggatgaggttactagaattcccgtgggggaatctacttctgagtgtatccaaagggaaggaaatcacctccccaaagcggctgtactcccgtgtcctccgcagcactgtccacaatagctcaatatagattcagcctcagtgcccatcagcagaggaattgataaagtaaatgcagcatgtctgctcaatggatattagccaacagtaaagaagtatacaatttttgtcatttgcagcaaaatgggtgggcattacgcgttcttcagttaagtggaataagcctgacatagagagaccagcatcccatgttctttctcatgttggagtagttcaggaattgtatgtaggaaatgagcttcctaagtcttaaacagtcaaagatttaaaagccatgctttcgtagttcttgtgactttgttagccaacagcataggaagtcacaaaataagaacaacctaaaaggagactagcgactgttagagattgagattactattatgggggtaaggggtagattaggaagcctatgtttcatcactgtatattgcatacaaatttgaaatatcacatcaaattccctgaaaagaaaaaaaatttaaaagaattctcactgaacttatgctttgattcttgatggtaggaatggaccatagattccttctcttttctctcagggttggggctgtatgttcttcttagttcctttttggcatatgtaaagactatcagaatgcatatcagtggcttcctcttttagatttcttcttgagttttataaaattgtgtctattgcagtttctatacgccttactctagttatttttacttagggtcaaggaactaaatagtctgttatataatggaaacagtattattagatactatgccaaaaatttaagtattaaccagtgaattataaattccatcatcaggagatatggctcactttgacattagagattacagtaaacagttgtgatcctttcagtggtcattcttttattctgcatgctataagctctttgggaagcaatttttaaaatattatatattgagagttaaaatatactttcttccccttttattaaaatagattcttttctcatacaatacactctgatttcagtttcctctccctctgtgcctcccagttcttccccacctccctgttatctggatccactccttttgtttccaatcatcaaaagaataggcttctaggagataattataaaagtataacaaaataaaatatagtacaataagatggaactatcttatcaaagtttgagaagaaaaatcaacagaaggcaaagagcctagaagaaggtacaggaatcagagatctacttgtttgcacactcaggaatcctataaaaacactaaactggaagtcataatatatatgctgaggacccagtgccaactcgtgcaagcctggtgcatgctgccccagtctgtgttagttcatatgagttttgttcatgtgaattcagagagatttttttcttggtgttctccatctcctgtggctcttgcattctttctatatcctcttctcagtgttctctgagttctgaggggagagatttgatggaaaatcccatttatggatgagtgttacaaggtgtctgtctgtctgtctgtctgtctgtctgtctctctccctctatctctcatttctggctgtgggtctttgtatttgttcccatctagtttagcaggaagcttgtctgatggtggctgaacaaggcactgatctatgcgtataattggagctcttttatcactaccttttattttagaccagtagtatatagttctaccctaggtttttgggctatctagtctcacgttcttccaacttctaagcagtgttgggtatggattctattatgtggagtggaccttaaatcaaatcagttattggttaatcacttccacaagctttgtgccatcattgccttagcaaatcttataggctgaacagcattgtacatcaaaggggttatggataacttggtttatcttttgatagcatgaagagttatttcctgtaccaaagatgttagaacataggggtgaaggctgtatgtaggcgccagctcaacttctccatgttcaatgagttgtgtaggttctgcaatgggacctggctgtcaaagcaaaattttgtcttggaagcagcctgggttatttggggttcctgtggagcccttttggccaacagcacaatttgatgtaacctaattcctttggtaacaagagttagccagttaattctctgtctccccattatttggtgatattatttagattgacttccgttttagggttttactgctgtgaagagacaccatgaccaaatcaactcttatcaaggacagcatttaattggagctggcttttggtttcagaggttcagtccattattaccatgacaggaggcatggcagcatccaggcagagacagtgctggagaaggaagtgagagttctgtatcttgatctaagggcaggcagcccgaaggggactatcttccacaggcagccaggaggagggcctcttccacagaagtgaagcttgaacataggacctcaacatccacccccacagttatgcatttcctccaacaaagttgcacctattccaacaaggacacacctcctaatagtattacttcttgtaggccaagcattcaaacatatgagtctatggaggccaaatgtattcaaggcataacaccttcatatatgtatatattttaggaaatcactgctgtactagtttttccatactactcctcaaatgacagttgtagttgtctttccctgtattctctcctttgtttccccataggtcaccatgtcatgcactctttcagttccccattattcataattatcagttctatttccttgtactatttgtacactctagtcccttacactatacttattctctgagtatctgtggactgtagcttgcttatcactaactaaaccataatattcacatgtggtttgaataggaaaggtccccaaagtctcatctattttaatttttggtcattagggagcagaagtactttaaatagactaggagatgtagccatggataggtatggtcttgttggaggaagtgtgtcactgggggtgggggggggggcaggatttgggatttcagaagctcaaaccaggcccagtggctctctctcttcctgctgcctgccaatctagatgtagaactctcggctccttctcctgaaccatgactgcctacagactgccatgcttcctgccttgatgataatgatctaaacctctgaaactgaggacaaccccccaattaaactctttctaagagttggcatgggtatgatatccctccacagcgttagaacattggctaagataccacatgatctgaggaagagataaagatctgcaggagtcagaatataatatttttaatttttaaagctaagttgaaatattggacaggagaaaatgacattctgttgttatatgttagatacttgttaaattttatggatataggtgtgactaaaagaataaaatatggcaattcaggataagggcatataagacaatttcctgaatatctagactgcattttaaaaataggaaaacattgcttgtaggctgagagatggctgagtccgtaaagtgcttgaggacatgagtttcattcccaggtcccatatgaaacagtaggacattgtctttattagggttcccattgctgtgaagcaacaccataaccaaggcaactcttataaaggacagcagttaattggggctggcttacaggttcagtggttcaatatcatcatggcagaaagtatagcagcatccaggcaggcatggtgtgggaggagctgagagttctacatcttgatacaaaggcatacagaactggcttccatgcagctagagaaaggtctcaaagcccacctgcaatgtgacttcctccaacaaggcgacatctattccaataagaccatacctcctagtagtgccactcccagcaccaagcatattgaaattgtaataggcatggtggtgtacacttgtaagctcagtgtgggcagaggtagagacagacttaacaacaacaaaaccacaacccaaagcaaaccaaggtaaatggtgcacgaggaatgtccctcctggttgtcctcctctggtcttcatgcaagtgctcctgcacacgtcctccccacacggaaggaacatgggattttgagctttcatggggccaataacggaaataaaaatgctgaagaggagatacctgtggagtaagaagatcagctttgcttctgagttagctgagaatctgctttattatgtgtgctttttttcctttttatagtcagggtttattattctgtaaaactgaatttgattcttaagacatcttttgtaactattgattctagtctttagccaatgtgaaatctttggaaaaacatagaacttttagatggcttgtagaaatatttttaagagagatatatgacattgaggttttttcagtttaaaaaataatattctggaagtgagtctggtgtttggttcttttcaccttatttggtcactttatttcacactgttctagtggggtagaggagtgttccctaagtggtagctcttattctaaactgtggggacgtttctttctttggcagatgggagattctttggtcagagagacctatgaaggtgaatgcttcccaggctcgtcagtttaaaccttgtattaagcaaataaatttccctacaaacctcatacgactggaagtcaatagttctcttctggattattacaccgaactagatgcagttgtgctgcatggtacgaaggacaagccactgctctctctcaagactgctcttgtagacatgaatgatctagaagatgacgactatgaagagaaggatggctgtgagatggatgctcttaacaaaaagtttagcagtgctgcccttggggatgggccacataatgggtattttgacaaactaccatatgaggtaagccaaattagttgcagtattaaatataacattcctggggtttaatgctttgccaaccttagtctatattctatctgtaagttttggcctaggctgcccagtatccctaagaaactcatttgatacctggtgtgaaatcttattttcagtgtgtctgtcttcttagggagcccttctggggttatttaaccttcctagctccagacatcaaatgcgagaactcggtagctatgtgatgtcaaaatctctccccacttgtttctaacaccctggggtcgggtagaccaggtatttatgcctccctttgaaaacaattgtgtgatgttaaaaacaatatggttagtttttaaatgaaaattttagacctggataacccctctagatattattcttataaattgatgggtgttttactttccagtataatgatataagtagctaatctcaaatggaatgattaggcagccttgagtgccagagtaataacaactgtatctgtcgaacgttttacacataagatgctgtggcgcatctgtaaagtagctaaagctgttaggtatagaaaaatataagggtccaaagtattcagtcaatgggcacagacctagggctttacacaggcctttattgggcaggggacatcacagattgtgcaagaccatccataccttaaaggggaagggatgctccatgggaaggctgagttgggagagaggggcatgagatggtgatagtgtcattccttggggctccaatatctgtgtgacagcagttcacctctagaaagtgagccagctttcacttttgcccacttctaaaaactattaagataggaatttagatttaatatattcaaatgacttcaaattttagcaaaacctgataaaaatgcctagcttttagcactaaaaggaatgatggaggctgagaggagagaagagaatattcagagatgcaaacaacatctgtggcttgctaggaacaccagcgtttctgtatgccagcgacattagatctgtcacggaaagaacaggacatgtaactggatggagatgccacatgcatagctgcattcacacagacagtagctgcaggatcacctttgccttgctgaactgtcatctctactgtatcaaagagcattgaatttaccgtgagctttgcaggtttttcatccagccagtggtcttcatgatgctgcctttttttcgatgcttagtaaaactggttgagacggggtcaaagataatttagaattagtaaataatttgctaaaaacctagagtagatacatgattatagtatgctttatggtttttgtataacattttgaatgggagagaagaatatggaataatagctattattccagaaattgcccatattaatcaggtagctttatatatgtgctttattctacaatgaagagcatataaatgaaagaatgtgtttgtaaatttgttgtacttatggcctgccccaaccataggaaacaggagggtccaatagagtaggaaggtctctatgatatggattatgaaattttagcttgtttatatggtgaaaggaaagagcctatagatgatttcaaatatgtaccaaaggtttagtcagtacaacacactctacactttggtcttccctcttctttagcttcatgtagtctatgaattgtatctagggtgttccagggttttgggctaatatccactcatcagtgagtgcatatcatgtgtgttcttttgtgactgggttacctcattcaggatattttctaattccacctatttccctgactttgcacctctcagaatggtaaaattttaacaccagtattggcaagtatttaagtggatggagacttacatactctatgagtatataaattggtatgaacattcagaagggcaacttttaaatgtatgtctcttatcctaaagatatattgccagtttaccaagatgaacacacatacataacacatacaatgatattgcagtattatttgcaataagaaagaaagtagcaggaaataaatcagtaaacctctgttgttgttatggtgtcacatgtgtaaaatggaatagggtggctctgcttatatagataaagatgtacaggatagatcattaaataagaaaagcaagatgctgagcagtgaatatactttggttcttttagtgcatacccaagaaaggaagtgcatctaatctggaagagatcagaaaacaaagcaaagcaaaaccaaaccaaaacaaaaaaatccaactgctaatagtgctgatctctggtgtgtgtgtggttacctcattttccatctttcttctgtagaaaagtaattttataggggtttctgtccccaggctagcccgtataactcctgaataaaagacacggagttgctgtttttatgaactagctgtgcggtactgtgctgggcaggttctgagctgttctaacctacatcccagccaaaggcgccacgtgtatcctcaggatgggcctcatgctcatggttcgtcttcatggtccatccacctcatgatcacctccttcttcctctacctttgtgctcctcatggtccctaccttagatcccaccactggatctcaagctctgcttccccctccccctgccctgtcgcaggctttagccttttattatgcaatcagagatctttgaggagcattcattacaaaacattggtcaatacagtgcccatgtccagactgcaatctgatcctggggcacacactcagcacctgaacacacacgcacaagaccaaccccaacacttttgtgtttgcttttataaatttttacctctatatttttgtttgtgtaataatgctcatgtcaacagggctgtatgaacagtgaaaattcattgtcatatttgtttatgatagagactcttcagtggtacttcagtggagagagattgggttcttattgaatacatcatggattcttaaagccagtaagcaggtttaggatcagggggtggaaaattgctaagaagcattgtaaagagaagggggcatttaagctgacctgaaataatggggtttgtactcagagacaagtgatctaactgtacctacatcatagagggtgatgcgaaatcttgctaacttactgatatagcattttttagtttgttttggtaaaagctgtgttttataaagcaacataagataggccttggagaaagtctagaaaaaagtttcagtcagagcttttatactaataattttctatatccatgtttttctaataaatacatacacaggcatacaaacatccttaagtcattttacagcttacttcaaatgctaaaaagaaatagcaaatgtacctcagcctcactagatacgtgttaatcagcaactgctcatgttttataaataatttttaaactgatcttaaagattatattgttgttcacttaaatgttagaatattccactcaaaacagtgaaatctgatctaacattaatacagaaactgaagaaaatcatttatattaaaaggtataattacaaaaacagaaaattcaggtaaatacatttatgttaaaaaaaaacttaacccctctcatctaaataaggtttttgtcattaaacagatatgaatttttaaattctgattcctggttcagtttgggcacttaagatacttctttgaaaactagtttagaaagctccaactggaaaacaaatcttggattagctcaaatggataattgtaattaaagttatctttttgtttctagtttgttaataacatgctatcccacagttgctgggagctgcagtcagtggggtctgtcttttccctgctttcctggacttctgtatccgcttgcttcctgcttcatggagagcccctgtgtttgaaaacacaaagcatactgtgtcactgtaatttgaatcctcattcctttcagggaatccaagtgatgctccagtaaccccatcctcaccactagactctccacccctgctttgcccctcgcgtataagtggcacttgcctggaaggcgtgtacttgcatgtctgcagtgaagctgtgcttagcttatcctacttactcatgatgcctctagaactcagagttctggcgtgtataaaatctcgtctatgaaaatttttattatttcaacaattaccagtgcgtatatctttgtgctatataaaaatgagaaattgagcaattcttaaatgaaatgcgatctaatgtatgtgttggataatgtggtaaatgttgatttatctactttgtaaagataatgtttgaagcagttttactgccctttattagcccacattctgtgtgtgtgtgtgtgtgtgtgtgtgtgtgtgtgtgtgtttaagcgatactgtccttcactgttgatgatcttggctttctgttttatatagctcattcaactgattctgaatcatctttcactaccagacctgtgtagattagcccagacttgcaggcttctccaccagcattgctgtgatcctctgcaatatatccacctcaacctgcagccatactgggcccggctggacgacacgtcactggagttcctacaggctcgctgtgtgcttgtccagtggcttaatctgtcttggactggcaacagagggttcatctctgtatcaggatttagcaggtaggtacaaaaccttgttgcagctttttaatcaagagtctagacttgtatataagaatgttcacagtacaaattttaaactgtatttgtatatttaataagaataaaaagactgatatttataaaaatgaattagtgctatccatcctcagctaaacttcatagtgatgtaagggccagctgtattctttacttcttatttaaatcccaagtgactttcaaccgaactgctttttttctttctcatattttcagcacagatgattaacacatttaaaaaactatttccaaatcaaaatctacctctctaatgtgatttgtcagaaatggaaaacaatttattacagaacatttttaattaaatcttaattacatgtgcaatacatcacccaaatttagaagctcatttaagctaattatgttgaaaatgaaattgcattctaaatagaggacgatgcttgcagacctgcccaggtgtttctgctcctttctatttaagcatttagtttccttactattaaatgtcacctgttaaacatttgaaagctagcaaaagtgcatattcatttagtaatgccatagtaatttttcttaggatacaaacaggtgcttttctcttaacttggatgattgttcttgtatgtgttatatgactctatcatttttataaagttaaacatggagtggaaactttggagacaatatctgttattttaaatgaataaatgctcctttatcttgcatggatctgtacaatcccagctctttttattactattgtttgcaaaagatcttgctaagtaaccctggtggccctgaaattgttttgtagcccaagtagaattctgtcttgggattttctgcttcagattcctaaacagctgggattgcagggatgtgttgcaagggccagctacagaactttctatggcaggagggcagcataggcaaggaaaaggtagcatagtaggattaggctttgtgggttaaattgtgttgggcaagaggaatactgcttcctgtgactcagtccatgtgagaaagagggaagagagaaagcgagataggctttgcttctgaggtcacctctgagaccctccagcacctttccaattacttggcagcctaggtttttgtattgggatgcttaaattctagtgaggccttagtccaatgctagttctctctacttcaaaaacattccacctgcaaattgttctcactactaagaccagtaagaactgaaactgcccatggctgttttgagcatgtattgttgaccataaactaagggagacagtatgagacagacaagtggtgtcagtaaacgttgctttatgttataaaggtctagttcttgtgtcactgatttgcactagagaaattaattttctgtttttaaaattaggaatttagggtttggcaagatggcttagaggataaaggcactcgctgcctaagctgacaactctcgcagatccctgggatccacaagagagaagttgtcaacttgtcctctgatcttcacgggtgccagggtgtgtatgcacccacatacgtgtaaatacgtgtaagaaaaacaacattaagtggggcctgttttcaccctatgaatcaaggcatggtagcagaagttgtcaaccatgtagaaggttatttgtgatgtctaagttaaccctttgttctatggagaagaaaaacatgaagataaacacgttgctgactttcataaaaagtgacaggtggcagcttgtgagacaatggtggtgaggtctgactttggcacagtgatgtctgtgaccataacagcagtgagtgtactgtaacggttctattaaacaagttcttcaaaactctgtagcttgactaggaaagagaagaggcggttgtgaggagaaatcccagcagtcctgttcagtgggactggcagtgggtaaggtcttgtgtgtcagtcagagctccagctttgtccctagcagctctgcttctggcttctagttcacctggattccttgctctgccgccatctgcgatgacagacttatccgttgtcgttacccagattgtactgtggtggtttagcccgtcaaaccacacattttttgctagcatccctttcagccgcagccactgttcacatttagaagtgtgtttaaacacaaagagaaagggttcttaagggcatgctggaactttgtctgctgattgctttgggttctttgacttgactgaagtgacagtcattatgactcggaggcagccttctcaaaataaacaataaatatgcatgacttgattattaatgaatcatctatgaagaagtggtggtctatttatacacattagtctgaggatttctttatatactatttcaaagcagcagagcacatgacagtagcggccgctggtgagctgtgcgggggaggctgggaagaagctgtgctgctcctgtggcctgaaacctcatctggggaagtgagagctcggtgcgttttaaacagccttctagggactttggtcatgagaacagaaaagctgcttaaattgaaataaagaaagaatttaatcagttattaaaacctacttctagtgtcaaatttatgagtactgcccatgtgtaccaccacttgttaaaatcaattctctctaattctcctttgcttacacatccctgtctcttaggtcttgtgcattcactcgcctccctgcctgtctgtgttttaaattgtatcatattatgctgtttaaaagcctagctccattttagcagtgctgtctttctttcagtgggtgctgcgtctctctgatgctcctccctctatgcaggattttacccctcagactcattttgtcaggaagcatttggggtgctttttagattcgaggaccttgtcatttattgccttgtttgatttcttgttgctaagataaaaggcccttttgagggaaggggcttattttgttttacattttcagaggggcacagtctgtctgtggcagtagatggggaaggcatggtagcaggggcagaggctggctgtatatccacaccgaggaagtagagagagtacaaactagagacagaaagctctatccccttgctctgcagcacaacgccagtggttcacgacctccagtgaagttccatgctctaaaggttatacagccttccacaacagcaccgccagcgcatctaatagcagcagacctagctcaggcgtctttatctgaatgtaggctcataaaactcttagagagaccttggaaggaatgatgggatgtctccttcagctcccagcacctcagaatttagggaaccccatagaaaaggagtgtaagcactgtcgggaatggacagggccttcagggttcttcactggttctctgcgcatatttttcgcttctgtttctgtttttatggcattcctgagtttgtgaatgagtgtgtctttgattcttgtatcttctcttgcactcttatccttttattggatttgccttgtcctacctttcatatgatggcttttgtttttgttttatcttattatatactcttttgttatgttttgttgttacctcttagaaattggttcttttctaatgagagacagaaagagagtagatgaggttgggagggaagctggggaaagacttggaggagtagagagggtaaaatgtcatcaggatatattatatgagaaaataatctatttttaataaagggaaaaaattaaaatgaagttctaaaaaggaagtaagtaaacccctcaatatcaagtaacagtagataaggattcacgatgtagaacaagcaggctggataagttattctccttccaagtgacccatctcatgattgaaatgagtaactagttgatcaatgaaaaatagccatgtaactgcatgaaataaaacttccatgaggcgcattaagaaatgattcatgtatggtcagttgaggctgttgctactgcctttatgaaatcaatatattatgtaaagttgggaagagagaatgtgaacatattgattaggtagcctgctcagagtgaaaatatgcatatctgagccttggagggaagaaaatcaaaagcaaagtggcagtgtaaggggtcatgtctttgttgtgctttctgactatcatcaggtcactcgaagtcttcctgtttgttagtgacgaggtttcgggtgactagtttgacactcctctataaattctttggaggaaaaagtttttttatgatggcagcaaagaaagaaaaatgcccagttattttaactcatatatgaaaaggaaatctagataaaagtgctttgccccttagcaaagatctcaaggaagtaagaccaaagcttctagttctaagacttcatttatttctgtgaagtcacttttctaatctgtaaaacattttaaaattattaaatcaataaataggatttttgatccattgaaagccagcattcatttttagattgctaacttataaatgaatgactcaccataacagcttgtatactcaaaatgaagtagcagtgttaatttgtccagtttgggggaaatagtttgatcccatgcacagaaacatacctttactcactaaagcttacttttagaatgggtctgcatagatagggctccggcactaagaagggaagtgaacacagctgccatgcctagcccagaagctatctccagatgacagctgctggcaaaggagaagctagttttctcactggagtttccctgggtataaagaccacacctagggacgggctccacatccagcagtagatgaccaacacaaaaatgaactcaagactattgtttttaaccttacaggtcttttgtttagatatcatggtttctaattttgtgcttttatgggatttgtgtgtgaatgaaagtgtgtctgtggctatatatgcatcttaggctctttgtttgactttttttttttcctgtttgtttttttatgagaaagtaaaggtctggatttgggtgggtggagagtggaggctctgggaggagttgagggaggggaaatagatcagaatatattatatgaaaaagtctatcttcaataaaaaggtgattaaacaccacatgcatttcttaccgtttttgctgctatggcagaataccctgctaaaagccacttccacaaggaagagtttgtttttgcctcatagttccaggggacagtgtgtcatggcaaggaaggcatggcaacagggcatgaagcaggtggtgacattgttgctgcagtcaggtagcccaggagagattgctggtttgcagtgaactttctcttttgtgttcagaccaggaccccagcccatagaacagtggtatcatcagtgaacgttgagtctttctacctctactgacctaatctagataattctccacacaactgccagaggctaatgtaatctgttaatcctcacagacattcccagaaactaaaatattctagataatctctcatggacatacctaggtgattctagatctataaagttaatagataatacaaaccatcattctatatgtaatgctaaggactgtatgtgccaaggatctgtttcagttgctgaagaatatgaagaagcatacagaattcattataaaatgttagtaaatacctgctcctagaggcatttgtagatatggctgctatgtcacatgtgggtcagtggatgactgagaggggagaagccatgtctatgctcagcgctctgacctttgaacatctgaataattagtaacctaacattccctgaaaaaaagcaagcctgagcctaccatcagtctggtgtcaggaggcctggacaggaagctagcctgagatgaccaccagtctggcatcagacacacctggacaggctccaaggatggagagcaagttggagactagaagatttctgcctgggtccaaaggctccccctgggggtgagcttaagacacatgacccttgcaaggggccactcaggcatgccttaccacttctctctgaagtggtggtgtggacaaggaagaaactccttccctcttaccccctcatcaccttctgtaggtgcgagtcctggccctggggtcatgaaagaaggaaaattcaccctgcatctagcctggaaagcatagtagagctgaccccagatgcggtggttgcaggtgagccagcaccaaggatgtgagcgtgcaagagctggccctgcctcttttctgtagcactgtagtgtcaggtagggagagagcccctcccttcccttttgccttcaccactggtcaaggtgggagagctgatatggaacaggagagcagactttgtccctcacctgctggagcacttgaacgagcagactctgtctcacttgggcagcacggtagagctggctctggatgtgggggttgcagatatgctggcattaagggcctgagtccaggagatccatccctgctgggtggtagagtggacagggagagacagccttctcccctcctcatccctctctatggcatgtaagagaactggtcctggggtcatgggatgggaaagtggccatgtcccttaccatctgcaacactctggaaagtgggccctgcacctctccggggcacagagtagggctagccctggttgtgggggttgctggttagatagccccaagggtgtgagagtgtgagaacgtgagagccagcacactaaccagctcagatagctctcaggcctagatctggggttttgaattagcctaccccaacatctaccccacagatgaactgatggtatgcatgaagcgtctggccctacagatccaaaagtacaggatccccatgacacagggcaacaagaggatatccaagaggagtcccagtgagcatccagtcttgatagggtagcagaagccagaggccttgaaccagaccagtgagttgttgctgtgaacatgtgcaagcaaagaggtgtagacagagcatataccgtagggcacactgtgacatgctacagcttctacaatgagattctttttttctctgtttggggggagattgcaagagtggagggtaggtacaaagggaggggaaggtgagtggaattgggatgcatggtgtgaaattcacaaagaaccaatgcaaaattttaaaatgctaataaataaataaattgtatttagaaaaccagtgggaaacagattatgtgagaattgcatgtgagttattggaagtttgtcaccactcagcaatgccacctttgaagtggaactagaacctagctgtcaccatgtttagtactaccctgggaattcagtgggcagtccactgttccctaagaattggagggtgtcctggtggtgctctgttttttcccttgttcctctcagttcaattatagagaaaccagtgcagtcttggtgtgacataggtgtgatatcactcctctgctcaaagctcctggaaatagggaatcattctcttccaaaatgaaagccagagccttttgtgacacaggaagtgttacatgttctctgacttactgattgcccctcgtcctgtgcctcctgcatcagtttctgcccctgccagttcccttgcccgtctctttaattggaatgtcccttcctttgatgcctgctttagttacctcctcgaggaaggttcgaaccttccctacccacttgctgagacttctgaccatgctttggttgtcctgctttgcttctatctcaccctcaacatttccccactcgctgacatactgttcattttacttgtttctagtcccatctcactaaaatgtaagtcagctttatgaaagtgaggactgtgttttatccctggtgactcccagtgtcccctcatgccatagtggaaattcaataagtatttactgaatgaatcaatgtactggatgaatactgaagaattcaagtaatataattagcagaagaaatagaactgtaggagatccagatcagggagtcacgggagaagcatctgagtcttaagaactgtgcctgttgtgaaacaccacagacaatgacactaataagataggctatttgaatttagagtttaaaaggaatgggtgcctttaagaagagctgaaaacgattacaggagacaagcaagtcatgcggaaatgtgtgggctactgggactttttcagtatttaaagcaaatcaggaacaaccaaatttttttgtttaaaggggagaggtactggcaagatggttcaatcagataaaagttctagctgcattatcctaattacttgatttccatccccagagccagcaaaaaggcagaaagaaaactgactccacaaaatcactttctgaatacacacacatgcacatgaatttttcaaagactaaaactttgctcaccaaagtttaacttatatttttaatgtttgaggggtgcttccatctttctgaactgttttcatatcgtcggtgttcaaaaccatgaggcaatatggtgggtactgttcaagtctgcctttgatagcagagaaaatgctgaggtgtgggtatggtggtttgaataaaaatggcacccatagactcctatatttgaatgcttggtcattagggagtgccactacttgacaggattaggaagtatggccttgttggaggaagtgtgtgtggtggtttgaatatgtttggcccatggaaaatggacctattaggaggtgtggccttgttggaataggattggctttgttggaggaagtgagtccttgtgtaggcaggctttgatgtctcctagtgctcaagctcctcccagtggggaaaagaacctcctcctggatgcattcagattaagatactgaactctccagcaccacatctgcctgcacaattccatgcttctcaccatgatgacaatggactgaacctctgaaactgtaagccagccccaattaaatgtttgtctttataagagttgacctggtcatggtgtctcttcactgcactaaacccaaaggaagacagaagttggtaccagggaccaggttattgctatgataggccgggcaatgcttttgtttagagaaatgtggattttggaaagcaatggaatgctttaaatgccatcctaatttgaatatggaagacattggtgctgaggttgatatgaactctgggagcctggcttaagaggtttcagaggaaaagaattttagtagattgcttagaaatcatttttgtgataatttggtgaagactacacacgcctctttttatcattgtcctaagagtctatttatattaattgcattcagaaaggaaggctcaaaaaagcctagtttagactttgtcctgtggttcactcttacaaggaacattttgaccaactgtagcaactgtagcttagaaaggaaaaaatacaaaatgtacagttcaaagaggaagtaggatggagcttagtcctgtgttaaaggatattaaatggaatgaagaaagtcataatctctgggcaagatccaacccagctaagcttattgtttatgcatttacagttaaaaagggggatagttggctgggtgtggtggcgcacgcctttaatcccagcactcgggaggcagaggcaggcggatttctgagtttgaggccagcctggtctacaaagtgagttccaggacagccagggctacacagagaaaccctgtctcaaaaaaaaaagcgggcgggggggagggtagttatatcatgttaggctttattatgacctggttattattttcatttggacataaggagatatgactatgtgtcaaattgacaagggatagattatgatggctattgtcagttgtcaacttgattatacctggaatgaactacaacccagatcttgtggaaatctcgtggaaaggtaaagaaaagctcatgtgtccaggtgaagtagtacatgcctctaatcccagcactcagaagacagacacatgtaaatctctgaattcaaggtcaggctgcagagcaagttccaggacagacaagcttaggcagtgaaggagctggcaaacagaaaccttgtgacgatatcaaggagggcagcggttccagtcccagcaaggagcagaacttggcagcttcaggcatgtggctgttgctttagagtcaagaatagaaggtgttactgggacagttgatgctggttagctggagctaagaaattagcagtgattcagaagagaccagcaatactcaggtgaaatctgagaagtattttctgagaacacaaaaaagctgggttccagagacagaccttttgctggcagctaatcttggtaatgtttaagagtcacctaagtagtactggttgtgaaggcatgaaagggtcatggataggcttggcactgtgagaggccagggaaggcccttggtgaaggtgtagcctcatttgcaggttgaagggctcatgcaaagaagttgaggcttggcaccatgaagagagcctctgagaggctattgatgaagcctagttgcaatggaagaccaaaatgtacttgagatgccagtaccacagcattaccacgaggaacagcagcagcaatggagtggagtcaacgagagcctagggtgctacagagggagatgtgactggagccctttggaggatcccagaagatcatgtagagatcccagatattggaacaagaatctgtgaggttgccttggagaccccaagatgttagagatattagagccatggactatctgccaaggaaaactgctaacaaggaatggaaccagcccaagagaaataagtgtgttgcagtcatcaaagctgaaaggagtcatcagacatggagattcagagttttgagtttgctctgataatcttgctttggtctagtatttcctcactatgacattttggaacagtaatgtatatgtgccatgatatgttagaagtatgtgatttggtttttgctttgaattttacaagcgattacagttaagtgactgcctgaatctcagaagagactttgaactttggacttttaacattcttgagactattgggatgtttgaagttaaactcaatgtatttttcattaagctatggctaggtattatccccatagactcgtgtgttggaacaagcctctggggactagggagtggaaagtggtggtttgaatatgctttgcccatgggatatggccttgttggaatagaggtgctcttgttggaaggagtgtgctactgtgtaggccggctttgaggtctcttagacttaagctccacccagtggagaagagagcttcctcctgactgtattcagatcaagatgcagaattctcagttcctcttccagtaccacatctgcttgtacaatgccatgcttcttaccatgatgataacagaccgaacctctgaacctataagccattcccaattaaatatttgcatttataagagttcacttggtcatggtgtcttttcacagcaataaaaccctaaccaaccttgtaactatgttactaggaggtgggctttaaggtttcagaagtcaaatctaatcctcatggtttgttctcttcctgctgcctattgatctagatgtaaaactttcacctacctctttcaccatcacgtctgcctgcatcccaccatgcttcctgtcatgttaatggacttgactaaacaaatggacttggcttacaaattcagtccaattactaagtgacaacagtacagttgttatgtatgtatgcatatatatatatatatatgtcgcatgtcatctccactccagcggacgacagggccaccacttgaggccttccttgacgcccgctgagacatgaacgacatggacaccaagttgggttcacacaacagcttcttgttctctttcttgcagcttttcttacaacagcttctctaactacaactagcttctacttagggcaagggctaaacaacaactcctattctccagccgactgacctcatctagctccaccctacctcatccaatcagaattcacacatgctacaggaacgagctccggtcggtcaccataggctgacaggtccggatcatgaggaacagtctagcctggcaggcagcccccccaccccaatgcagcctcactgcgcatgctcgggcaaggcagtaaacatcttggcccatgcggccgcacctgcttcctctttcaggatttcttaataaacctgtcattactgtagataaagtatattaccccattctgaatgggcattgttaagagagtgatatatactgagagactagggttttagggtgtagattttccaacttggatatgagttgcgggtaagcagaactatctccgctgtcatcttaatttcaacttagtattacctgactttgtaccatgttaatccatgtggattcatttttcttctcagcttgatttatttgagttagccatgatcatttcagcatgcagtaagaacccagtgaatcgagttatgtatttcctttagtagaaatctgttctcttaactgtgtctgttaggaggtgatacaatttcaaagtttttacaaaggtatcatttgattgtataaaatttccatggattattgtttccacaggtttctaaaggtgtgtgggtctgagttagtacgccttgagttatcctgcagccactttcttaatgacacttgcttggaggttatttctgaaatgtgcccaaatctacaagacttaaatctctcatcctgcgataaactcccacctcaggcttttggccatattgccaagttatgcagcctcaagaggcttgttctctatcggacaaaagtagaggtaagaataactcatatgtgtttttcttaataaaatatctggctgaatagttaattgctttcaaatattattgtgatttctcattttaaaacagaggttgtgacatcatgtgtacactccaaaataattaaagcatctttagtcacttcagagtaataaacttttaaatgatgttcctgatccctgggaaagaaatgtgtagggtgggacagtgagccaagtgctggcagagagagacgtagaggaaggagtgggagctgctgacatgcaggaggattttcacttgaagtaggaggaagcaacgtgcatggtattagaagtggacatcgagctgggcgtgatggcgcacgcctttaatcccagcactcgggaggcagaggcaggcggatttctgagttcgaggccagcctggtctacaaagtgagctccaggacagccagggctacacagagaaatcctgtctcgaaaaaccaaaaaaaaaaaaaaaaaaaaacagaagtggacatcgaagtaaaataattagtggtaccatagtacccaggtttcatgttcacaaagtgggatctgtcgtgtgtgcttacttttctcacatatatctgtaggacatatttcaatgctaatatgtgttagtacccaacttttcattaactgtatactgtgtgttacactacagtctactcgccattccctaaacaatcattatagtgggatttcttggacctgccagcagaagaataatgacatagaggcttattaatatttatatagcttaggcctagcttagactacctcttagctagctcattgaacttaattaaccaatctgttctagtccatgtctgccatgtggccccttacctctctttcacccaaggcctgcagtagccctcctaccaacccaagctgcatagcctggaaggggagatcacacttgcacacacgtaccacactctgcctcctgctagtgtcggagcctatctgagagaccgaggttgctaggaagccacttctagctctgggaagcgcctgttccttgccttccttacagaactgttctctaggcctaagcttagatttactgccccacattgggggccaatatatctggctttctacaaacgtgtcagctatattaataaagacacagagtctcctgtatatttaaaaagtgtaggcctctagcttgagctacagcttctctaacctgcgagctgccatagcctggtctacatctctgctcatgtctaggcccatccacctctgcgcctccttgctgatccctgcctttgactttcctcccattgtacctttctctcagccaagaagtacaccttccaattctggtccatctatttcccagctctttaatacagccaaccagagaaggccttaggcagatgagaaataacagagacaccttaacagtcactccagcagatcatgattttattttctgtgttcattttataaaatgtctgactcatgacagtcttctgtagagagtttccacttgcataatcttgttactgtgagacaatgatacttcagggtgcaaagaagggatgcaaagatccagtttcttcattctttctcttccagacacgtaggcctgcttttggttagttcaacattcttacttaattccaactcggagctctgtccatcttcttgtctgcactgttttcccagcatatttcatttcttaataattaacagtggtattgttcattttaaattttaaaagatggctccttgaatagtggttaaaatgaagtctctcctgatttgcaccttttacttgcacacagttttattgtcttttaaacattcctaccaagctctagcatgatcactattttcctttttgtattctgtttcttcatattaggctatacaactttatatatagtggtgaataatgcccttctttttcattgccctgtttctaggttctagaatagaatctggtcaggatatgacatgagtaaatattttctaagtgaatgaattcaataaaagaactgagttacatttcttaaaatgctgtaccaatgactttctcactatgatggacctttacggatcttaaatgttttttggttcagggtgttcagcatcttagtatttcagtttctccctctaagataaaaatacaggtctcattgggtcattatggtgactaaattatatgtattgtatttaggcagttcctagagcagtataagcaaatgataaaggttgtaatgacattgttacaactgttttgtgggataatatttttactgtgaagggaaagaacttcctcactattgtattcaaatacttttggtggatctatatacttattctacttgaccgttcatttctcatcgggagtttcctttagaagttattacattccattttgcactctgataaaacttctgatctgctcatgtaggtcttcttttatgtcttgatacatgttatagttttcttaacttagatcctaagtaattctgaccacgtttatatgttacacattatgctttcaggtgctgtttttctcttttgtttaatatttactgtttattattaatatatagggaaacgggtttttaaacatatttatgtcacatttgttccccttaatgaatgcttacaattgttctagtcattttgggtctgtggagtgtagcatgggtagcgtctattttatggctaatatccacttataagtgagtacattccatgcatattagtttgggtctgggttacctcacttaggatgatattctcaatttcaattcatttacctacaaaatttatgatatctttgttttgagtagctaaaatgtacttcattatatagatagaatactttctttttccattctttagttgagggacatctaggttgctttcactgatttcatttatttacaaataagactactatgaaaatagttaaacaagtgctcttgtagtatagtggggtgtctttggggtatataccaggaatggtatagctgggtcttgaggtagcactattcctagttttctgagaaagcatgaatggatttccaacgtgattgtataagtttgtactcccaccagcaatgaaggactgttctccttagctccacattctcaccagcgtctgctcttgtttgagtttgcgatcttagagattctgacttgggtaagatgcaatctgagcatcatttgttatgcatttccccgatgactaaggactttgtttgttgttgttgttgttttttggtttttggtttttttgttttttgttttttcttttttgtctcaacaggcttaggctgctttattggaacagggaggagccccaacttcccaggggaaaaggttgagtgcatttaagggggctggggaactacacacacacacacacacacacacacacacacacacacacacacacacacacagagctacctggaagtgacagctatatttttgtggcttgattggaaacagggtaggttcttttctttctttttttttttttttaagatttatttgtttcctttttttaaaatatttttattaggtattttccttatttacatttccaatgctatcccaaaagtcccccataccctccccccactcccctacccacccactcccactttttggccctggcgttcccctgtactggggcatataaagtttgcatgaccaatgggcctctctttccagtgacggccaactaggccatcttctgatacatatgcagctagagtcaagagctccggggtactggttagttcatattgttgttccacctatagggttgcagttccctttagctccttgggtactttctctagaacttgagctttctgggagaggttgtttcatttttaaagggtcattatattgcacgctgcaatacttaattgtttaagttaacattctcactgcgatgtccaggctgtcactgaacttctagacttgaggaggctttttgtccccatctcctgagtaactgggattacagatatgcaccactgtgccacctcaaccttcaccctgcaaactagaaaataggcaaaaatcagtattagagtactgactatgtttcatgtcaaattatgataacagaaagttatattttatgtttcaatataatccatattaataggtataatatgtttgtgtaattttgcaaaacttaagtctgtctgtatatcaaatatttagagggctttggagacatattttagttctaaagtttggtaaattttgtgatgtgttctgtttgctttgccagacactctattaatatttagctctctgaccattccagtcagagtaggtgatgtttccatttcccagatgttgaaattgaagttttagaagatatggcccaaaacaatattttcattcagacttgaactcaggtctgctagctaggctaatatagataattttgtaaaaatatgtaagatcttagaaaaaattactctaaaagcttggctgcttctgttgaaaatactgaaatctttttaccacgtactcttgttctgatctgtccatgaggggtgtcctacggataagtcctctgcatttcctagagcagtctgggttactgttaacagtttgagcatgtttacctttttttttttttttttttttgaaaaaaaaaatgtctggagtgggaaatgagaatggaatgacagatatctcagtaaggatgccgtcctgttgcttagcagcaggcaagaaagccaagagtgttttttaaaagttggacttataaatggaacacctgcatccagttttgattgcctcacttcaagaatgatagagcataaattgaaagaatctgaagaagtgaaaaaactgattataggttttgtggggaactagtatatgtcagtaatccacaagtatagttcagcagctgtttactggcatagtggctgtgtcaacagtttcaaggacacctttgcctacatcttgatgaactagcatgcaagaaaagtagttgatcttcacttgtgttggagaagagagtgcctattttctttttcatgtgtcattttagtctgcaaagtaaaacctcataccagcctactgataaaagtgctttgattttttttttccacaaaagacatgtgaattgtctttcagacacactgtagtttgatttggtgccataattttttttctggcatacagatatggtggtcccctaactgcttttttttttaacctacttttaaaacataatgtgtgctgacagacacagttcagctaacaaacggccacagactataaaaccaggtaagggaatggcctttctcttagcagagcagttgatattagtaggaagaaataattttgtctgcctatgtcaaataatgcaggctgcgttagctgtcatctaaaatgttgtctatttcagtaggttagtttagctggtgaacatgaggcagagggatattatgatttgatgcccatttggtggcattctttggagaaggtttaagtggtataaacttgctggaggaagtaagtcactagggctggggtttgagagcttaaatcttcgttccacttccagtgctctccattgctgtgctaaacatcataatcaaaagtaacttgcttagcatatatatcccattcacagtaggtctccgagagaagttgaggcaggacctgaacctggaacccggcaggaggaactgccacagaagccatggaggaaagttttttactggtttgttgtcatggctcactcagcctgcttttttatactacacaggaccacctgcctagagttggcacaacccatagtcatctgggcactctcacatcaatcattagtcaagaaatacctcacaaactcattcataggctaatttagctgaagcattttctcaattttgattccctcttctcagatgactatgacttttgtcgagtgaggaaaaacttaggcagtatatctgacatgataaactatgagtactgtgattaggaataaaccccttctcccttaagttgcttttattgaagtaacagaaaaagaaattaagaaattattacctattctgtcattggtgagtcttaaggacaaacaaatgaaaagacgtgtctggtgaggatggaagggcacttaaagttatgtgaattagagttcttaagacatcaacctaaaagaggctagtgcctttttattgagagcatatcgatggtttaaaacaatggattatgacattctcatacatgtatgaacatacatatatgtactttgttaaaaaatgctccattgccttcttttgtccctatctcccctttctgctggtcccctttctcatagttcatatatgcttttacgtgtatttttaaaaatctagattataaatatgagagaacaggtctttctgaatctgtctagtatattttatatgttattattttatttatttacatcccaaatgttgccccctcccagttcccacttgcagagttctccccccccccccaccagccctctccccttagcccctcagagtttgctcctcccaggcatctcccctccctggggcatcaagtctctactaatttattaccatgctttctggttccatctatttacctgcaaattacttaatgccactttttttaaatgggcaaataatactacattgtacacatatgccacatttcctttttctattcataatagttcataattatcctgaataatttaataacatggctcttgtgtccattgtgtgccttaccacttattaattaccttcattttagctctttatcttaagtgttggggcttgttagactcctctccaacatggatcacctgtcaattggtggtgtcattatgtaggtcttatttaggtgaccatatcattgagatttcatgggggaagctttttctactatatattgaagatagtgtgtcacagcagatagcatggttctctggatctacaatctctctgtcccctcttctatgatattcagtgaaccatagatataggtatgttgcagatgtatcagttgggttgggtacccctaagattagttattctttgcattttgaccagttattgatttctataatagatccaatctgctgcagaagaaaacatatttgatgagggataagagctactactatttgtgaatataaggataagtatttaaaatgcacttagaaaatatactggcttaagagaatggcactataaagttcttctccacaatccgggacctcatcagccatgggcacttggctaggtaaataataatattttgtgatatctcaataaaaaggaaagaaatgctttcagaagaagatatagtcttttgaccagagtatcttagctgggcatcacttagattagtggttctcaacttgtgggccccacaaaagaggaaggcagccgtggactgaggctgagaaggagccttcacatgttgttgctagaatatggtattctatcttgagtccttcgcagtcaggtaccttgggtccaggagaataatgcacgttgtggtttttgcctgattgcattttgtttttctctctgttcacgactcttttcactacattgtcatttactcctttacttttattgtaccaatagtcatgtgatctacatgaatatttaattatatatttataatttggcgctgcgttttgaaacctataggggccaatactgggccatttgattctgaagctgctgattttatgtaagttttaggtagaatgtagaagaactctttcttttctgaacatatattatactagataacattttctcagagtacagtttgatcattatgcatggttccagtcactccttaacttactgtttctcataataatttgactagagtttgaaaattataaactcatttaaaagagaacatgatgccttgcatttttaaagctactacttaaattattttaagttatatgtgcatccattaagtaggttttacagaagcatccagtagaatttatggacttagagtcctaaaggatacttagagccttaaagtgagttttagaaaacatttactggacagatgttatacagacactaagagaacacaaatgccagcccaggctaatatacccggccaaactctcaattaccatagatggagaaaccaaagtattccacgacaaatccaaattcacacaatatctttccatgaatccagcccttcaaaggataataacagaaaagaagcaatacaaggactgaaatcacgccctagaacaagcaagaaagtaatccctcaacaaaccaaaaagaagacagccacaagaacagaatgccaactctaacaacaaaaataaaaggaagcaacaattacttttccttaatatctctcaatatcaatggactcaattccccaataaaaagacatagactaacagactggctgcacaaacaggacccaacattctgctgcttacaggaaacccatctcagggaaaaagacagacactacctcagagtgaaaggctagaaaacaattttccaagcaaatggtctgaagaaacaagctggggtagccattctaatatcggataaaatcgatttccaacccaaagttatcaaaaaagacaaggagggacacttcatactcatcaaaggtaaaatcctccaagaggaactctcaattctgaatatctacgctccaaatgcaatggcagccacattcatgaaagacactttagtaaagctcaaagcacacattgcacctcacacaataatagtgggagacttcaacacaccactttcatcaatggacagatcgtggaaacagaaactaaacagggacacagtgaaactaacagaagttatgaaacaaatggacctgacagatatctacagaacattttatcctaaaacaaaagtatataccttcttctcagcacctcacgggaccctctccaaaattgaccatatagttggtcacaaaacaggcctcaacagatacaaaaatattgaaattgtcccatgtatcctatcagaccaccatggcctaagactgatcttcaataacaacataaataatggaaagccaacattcacatggaaactgaacaagactcttctcaatgataccttgatcaaggaaggaataaagaaagaaattaaagactttttagagtttaatgaaaatgaagccacaacgtacccaaacctatgggacacaatgaaagcatttctaagagggaaactcatagctctgagtgcctccaagaagaaactagagagagcacatactagcagcttgacaacacatctaaaagctctagaaaaaaaggaagcaaattcacccaagaggagtagacggcaggaaataatcaaactcaggggtgaaatcaaccaagtggaaacaagaagaactattcaaagaattaaccaaacgaggagttggttctttgagaaaatcaacaagatagataaacccttagctagactcactaaagggcacagggacaaaatcctaattaataaaatcagaaatgaaaagggagacatagcaacagatcctgaagaaatccaaaacaccatcagatccttctacaaaatttatactcaacaaaactggaaaacctggacgaaatggacaaatttctggacagataccaggtaccaaagttgagtcaggatcaagttgaccatctaaacagtcccatatcacctaaagaaatagaagcagttattaacagtctccccagccaaaaaaagcccaggaacagacgggtttagtgcagagttctatcagaccttcaaagaagatctaattccagttctgcacaaactgtttcacaaaatagaagtagaaggtactctacccaactcattttatgaagccacaattactctgatacctaaaccacagaaagacccaaaaaagatagagaacttcagaccaatttctcttatgaatatcaatgcaaaaatcctcaataaaattcttgctaaccaaatccaagaacacagtaaagcaatcatccatcctgaccaagtaggttttattccagggatgcagggatggtttaatatacgaaaatccatcaatgtaatccattatataaacaaactcaaagacaaaaaccacatgatcatctcgttagatgcagaaaaagcatttgacaagattcaacaccctttcatgataaaagttttggaaagatcaggaattcaaggtccatacctaaacatgataaaagcaatctacagcaaaccagtagccaacatcaaagtaaatggtgagaagctggaagcaatcccactaaaatcagggactagacaaggctgcccactttctccctaccttttcaacatagtacttgaagtattagccagagcaattcgacaacaaaaggagatcaaggggatacaaattggaaaataggaagtcaaaatatcactttttgcagatgatatgatagtatatataagtgaccctaaaaattctaccagagaactcctaaacctgataaacagcttcggtgaagtagctggatataaaataaactcaaacaagtcaatggcctttctctatacaaggaataaacaggctgagaaagaaattagggaaacaacacccttctcaatagtcacaaataatataaaatatcttggcgtgactctaactaaggaagtgaaagatctgtatgataaaaacttcaaatctctgaagaaagaaattaaagaagatctcagaagatggaaagatctcccatgctcctggattggcaggatcaacattgtaaaaatggctatcttgccaaaagcaatctacagattcaatgcaatccccatcaaaattccaactcaattcttcaacgaattagaaggagcaattagcaaattcatctggaataacaaaaaacctaggattgcaaaaagtcttctcaaggataaaagaacctctggtggaatcaccatgcctgacctaaagctttactacagagcaattgtgataaaaactgcatggtactggtatagagacagacaagtagaccaatggaatagaattgaagacccagaaatgaacccacacacctatggtcacttgatcttccacaagggagctaaaaccatccagtggaagaaagacagcattttcaacaattggtgctggcacaactggttgttatcatgtagaagaatgcaaatcgatccatacttatctccttgtactaaggtcaaatctaagtggatcaaggaacttcacataaaaccagagacactgaaacttatagaggagaaagtggggaaaagccttgaagatatgggcacaggggaaaaattcctgaacagaacagcaatggcttgtgctgtaagatcgagaattgacaaatgggacctaatgaaactccaaagtttctgcaagggaaaagacaccgtcaataagacaaaaagaccaccaacagattgggaaaggatctttacctatcctaaaacagataggggactaatatccaacatatataaagaactcaagaaggtggacttcagaaaatcaaataaccccattaaaaaatggggctcagaactgaacaaagaattctcacctgaggaataccgaatggcagagaagcacctgaaaaaatgttcaacatccttaatcatcagggaaatgcaaatcaaaacaaccctgagattccacctcacaccagtcagaatggctaagatcaaaaattcaggtgacaggagatgctggcgaggatgtggagaaagaggaacactcctccattgttggtggggttgcaggcttgtacaaccactctggaaatcagtctggtggttcctcagtaaattggacatagtactaccggaggatccagcaatacctctcctgggcatatatccagaagatgccccaactggtaagaaggacacatgctccactatgttcatagcagccttatttataatagccagaagctggaaagaacccagatgcccctcaacagaggaatggatacagaaaatgtggtacatctacacaatggagtactactcagctattaaaaacaatgaatttatgaaattcctagccaaatggatggacctggagggcatcatcctgagtgaggtaacacaatcacaaaggaactcacacaatatgtactcactgacaagtggatattagccccaaacctaggattcccaagatataagatacaatttgctaaacccatgaaactcaagaagaatgaagactgaagtgtggacactatgtccctccttagaatggggaacaaaacacccatggaaggagttacagagacaaagtttggagctgagatgaaaggatggaccatgtagagactgccatatccaggaatccaccccataatcagcatccaaatgctgacaccattgcatacactagcaagattttattgaaaggacccagatgtagctgtctcttgtgagactctgccggggcctagcaaacacagaagtggatgctcacagtcagctaatggatggatcacagggctcccaatggaggagctagagaaagaacccaaggagctaaagggatctgcaaccctataggtggaacaacattatgaactaaccagtaccccggagctcttgactctagctgcatatgcatcaaaagatggcctagtcggccatcactggaaagagaggcccattggacacgcaaactttatatgccccagtacaggggaacgccagggccaaaaagggggagtgggtgggtagtggagtgggggtgggtgggtatgggggacttttgatatagcattggaaatgtaaatgagctaaatacctaataaaaaatggaaaaaaaaagaaaacatttcacctttgactgttgaatgtctttttttattagtactctttatgtactttgattcacctgttggtatactgtagatatacagaaatgttgcatgcagtcactagtgtagaattatttccagagggtaaatattttagatcagtggttctcatccttccagatgctgagaaccatgaatatagttcctcatgatgtagtgacctgcaacacagaattattttcattgctactttataactgtaattttgctagtgttatgagtaataatgcaagtatctgtgttttccaatagtcttaggtgacccctttgaaatggttgtttaacttcccaaagggctcacaccccacaagctgagaatcgttgtattagatactgtaggtcatgtgttctccagcacagacaattaactctattgctgaaatgcaataacatctataaacaatgctgaaatgactcctgtagaattttatttacaaaaacatctagcaagatagagttttcctgttagttgtagctaaccaatgtctaccctacatgattgagtctcccaaaatctgatcatcttctatatgaacagtgagtttcctttccttgtttcgacattagtccaagttctttcattctaactatatagacaaagactgttctgcaatcattgttgatgtgtttactagatgtagagagattgtaaactgataccatagatatagtcccttaacctagacctggcttgtcaccacttagctgtgaggggtgggggaaacattgaaaattgggtcttttccatttgcactttgctgttgtattccagcctttggtttatctgctttgggtccttgttagtcccttacaacatctccttctttgtcatcattcctgtccttctacattgcaatcctttgatctcacatctctctttcagcaaagatgaatgaggtccttaaacaggaagcttcttttgttctgatagttcctttttaaagtcaggataaaaatgatagttttctcaattattcataacttttataatttccaatttaatgtgaacactggttaaatttttgtaaaatatttgccaaagtacatatatattcagacatgttttttctatattttaaagttacttcagacactcagtcctaaatgggatgtctccatcaaattcctcccctcagagttcagggaacctctaggaagaagtggaaagagtgtaagaaccagagggggtagagagcaccaagcaaacaaggccctctgagtcagcatgggcaacggccctatgacctcaccaagactgaagcagcattcacacggcctgtaccgagactttgcatgtgtatcatggtctccagtctagtgcttttataggacttctgagtgtgcaagcgagtgagtctctgattcttgtaccttctcttaggttctctttgttgttgatgatgatttatcctgtccttccttgatgtggtagtttttgttttatcttattttattttattttttaaatgaatgaataagtgaaaactacccagcagagtaaaacaggttaacaattgaactgtcatttatccctgctgtgagctgtgaagtggcactgggcacatcatcacatcatcggtccccccagggcaggcctcatgttcaggagtacttggccagcaaacagtggaccacacaggtggtttttttttttctttcttttttttttttttctgtgtggttttatttggttacagtttagtgggttttgatggttttgttttggtttggttttttttgaatatagttttattttcttggttagtttgggggtttgtttgtcttttgagaaagaaagttcatgggtagggagagggaggggatctggattggggaagggaaagaatatgatcaaaatatatttaaacttaaagtttgttttatataataaaaatataatttaaaaggaggggaaattttgttgagataaagaatgtattaagatgtttctagattaaactcttggttcaaaagtaagttgggccaggtgaagggttgtctggctaaaagcatttaacttaaggggcaaagagcacttgctgatcttgcagagagcctaggattcgatggctcccaaccctctgtaaacacagtttcagggcagccaatgccctcttctggcttccacaaacaccaggcacagttgtagtgtacatccatacattcacatcagcattcatacacataaaataaaataaattagcataaactaagtgataaattgttattttaatgagttaggaagatgtactattaggcttgtacgttaaagttacagtctcttcatggagcatcaccaccaacaaaggatggaaagcttgtaagagccagaggttgtggaagactgctataaatcagtatcttctggtcacacagaacctttgtattcatgaactcagtcaatatgcttcccgccagaacctgcccaagagcaagaaatagtaaatcagtatagatgaaaaagggactcaaaagtctcacttctaactgaggtactagtcacagctggtggctgctgtgggagggccagttttgagaatatggccctattttgtagccattttccagtggatggtctgcacacatatcatataggcaggtaatttgatttaatgaattcacctcagagttcatctcaaacaattccaacagaacattgctgtccatcctaggtttagatactccaatctgagtgatggtgggtcctcaggctgttgaacgagagtcttggagaaaggattcacgcccatacagataaacccaaaaggactatattctgttatggtcagaacggagctaaggttcctgctggctctgcagtgggatcttcacgcctttattagaagtcctggtcctaggaaaagatttctggtcttagagaggagctgtccaagagggcccccaacggaggagctagagaaagcacccaaggagctgaaggggtctgcaaccctataggtggaacaacattctgaactaaccagtacccccagagcttgtgtctctagctgcatatgtatcagaagatggcctaatcggccatcattgggaagagaggacccttggtcttgcaaactttatatgctccagtacaggggaacaccagggccaagaaatgggagttggtgggtaggggagccggggcgggggtggggggtggggagggcggtccgtctgtataggggacttttgggatagcatttgaaatgtaaatgaagaaaatatctaataaaaatttgaaaaaaaaaagaaataaaatgtaggagtaaggagtgaggttccaagaagtaaatgtaaacagctgttaaaaacaagctggagctgggtatggtggtgcacaactccagcactggggaggcagagacaggcggagctctttgaggttagccaggtctgcatagcaagttctaggagagccagtactacatggtgagatcctgtctcaaacaaaacctagaaattaacagaatgtaagcaacaagactaaacaacagaacttgtggaaatgaactgatttgaagtctaggagataaatgataactttttgtgattttaaaatgaataaatgagacaaattctaaattgtatacaaagaataaattgctgaattagcaccatttgaagagtctgttcatttatagacactgaacatcaggtactgctataaattcatgtttttaatcctcaaagggaaccctgtacatttaataaatgtcatactctatcaatcgctgtattatatacatcattatatatcagttgttccaaaacaaactacatttattatctcactcaggtctatgactcatgtgtccctcatggtagttttggctctaagggaacccaaaaaaggcctcaagagagactacagcaggttgtcaactggggttctgttcatctcaaagctgcccgtgtctggagaaccatcttccaggctcactccctgggaacctgcagaattctttttcagaccgtgggtctctctcttccttttattctgttcaagccttaaactgatttgatggcacattagggagggcagtctgcttcatccacttatttaagtgttagcctaagtgtgtaatatttgatcaaatatctgtgaaccctgtgactcagtcatatcccatcaccagtcacctccactgcacacagtttattaatgagtcactctgaaaacaaagtcagctctgtgcctggaaggctgctgtctgtgataaatgtggacgtatttttcaaaccactacaaacactggtacttgggagagtctagtgtttattgaacagaagttacagaagaaaggaagtaggagtgtcagggaaataggattgaaagtgaaaattagtatagacagtacgatcttgttaaaaaagaagcaatacatagtgaagacaagtgtgatgtcatcgcactgctagttgggtaatagagtgaagcacttcaaagaccctttaagttaacttgatgtggcctatctagtgttcacatgctaaaaattacataagagtgtcttacaagtattatgttatattagaaacaaggtataaaaccaagataaactttcgcttagctttaaaaaatactcagtggggtaatagactgaaatctagtattttctaatgctttctgtaattcgtattttatttggctttaagtgattttgctttgcaggaagtacttcattaccacagtgctattgagaattatctggggtttagtcagacctcctctcctccctcagcgatccttttccctttctgaatacatataaaatttaataatttgttaatagcttaatttgttacaaaaacaatttaagtgtataaaaagaaagtttgctctgcacatcacatttgaatagcttttttcctaagaagagaaactggaatgcctttttctttttctttttttttttttttttttttttacatttgttgaggacaggcatgtcatgagatgaattggcacgttaaatgtatttgtaggagcttacaatatggttccatggctaagagcacttgatgcacaagtataaggacttaagttcaaacctctatacctatgtaaacagcagagaatggcctcatatacctggaaacgcagcactggggtagagcaaggagaatacaggcagatcccaggagctccctggccggccactctatgtgaagtgacaagcttccgttcagtgacagaccctgactcaaagcagtaaggtggagatagagagagaggaagaaagtagaaatccttctctggcctctttgtgtacatttgtgtacacacacacacctctttgtgtacatttgtgtacacacacacgcgcacaagcacgcaactgaaaatggtattttagttcttgtgattatacatctgtctagcatacctttggatgtttagtggtcagacatttttattgcagaggatagatgggattaaatggcagaaacatgactagaaagtgcatgtgagatatggttccgtcagcatctgctactgacaggtgctcaatggttgttggtatctttgtcagcaaagagaatcctttgacattaaagtcaccagcccagccctgatttggggtgactctattggcagttccatcagactgcagctgatcagtgaatgtcagagctgctgctgctcttcagaagtgtcaccagccccctggggttgctcccccctccctgtcactcttgcttgtacactctctctctagttctagctctcgatctctcccccattgctcttaagcagactccaaatgcttacctgagaaataaactgataggccgtggggaatacagatgtctttagactatgtaaaaccgtactaagtgatgacttacatggagactgctaatgattaccttgaaaccaagccagtcaatggtgggagcacctggggactcattaaatggcatttgtggactctgtaacctaggttttcagctgtatttcaggaaaagcagtgacagcctttaatgtctaattgaccccttctctttgtttctcgttcattcacttgccgcctttgcctctgatgtgctccctgatggcagcaaacagcactactgagcattttgaacttctgtgcagagcttcagcacctcagcctgggcagctgtgtgatggtaagcacttgaaaagtcttcacactcaatggcttgcttctctttgtccccatgggtgagctttacccgacccaccccaccacattcatatccgtatacttttgcccaacattcaaacatttttttcccttaaattggagggtgtctttgaaggacttacctttaccataaaacaagggagcaccgtgtctccagctggtttgctgttgggcagatatcacacccagatatcagtggtttagtgagatattcacaaaactccatttcagtcctgagattaattctcagaaatatggtagaacgtaggtgtgtgattactgtgggtttttttactcctttgtcaggcacaatagaaagatcaatgccctgtattgggactcagctgtgttttatttgttctttttaaagttttactattctgtgaagtccagatgctggattcttaggttagaaaacatctctaagccttaaacttctatatgtctatagaagaggtaatgagaagagtaaaacgtgtttcatctaaactaaataattccatggtctatgggttattctaagacttaaggacagttgaactgttgggacctgtgtgtgcacacctacacatgcacagaagtgagtcttcctatggagcaatccattattatatcctccggtacctacaaccaaagcacatgtaagagatttccagacctgtccaacattgcaaccacttagtagtgggccctaaatgagaacagtcagagaaatctggtattctagttttagatcctaattggacatctttatagtttaccatttggttcaaatatgtccagaaatttacagtatagcctagagaaaccttttataggggatgtatgtaaggtatttccacctcttgtgttctgtagtcccagtgcttaggtcctataaagtgcaagcatggacccaaacagttccagtttcctgggtcagtcttgggaacctactagattcatgtacttcaagtccaattcctacgtttgtaagcaaccttgtagtcttctttggagccctctagtagctcttctaaaggatcccagtggccctcgatggcagtttctatgacaacagaccagctgcttgactacatattgcttgcctgccccactaaggttagtaagtgccctatttaattttactcaaaatattctattgtttgttattaccaccctactcttaaattgcaacatctttttctgggaaatcaggcctctggccacagcttgagttggaatttgtgtgtgtgtgtatacgtacacacatacatacatacatacatacatacatacatacatacatactcatagttaaaattacatgtatttttttccattgtttattaggtatttagctcatttacatttccaatgctataccaaaagtcccccatacccacccacccccactcccctacccacctactccccctttttggccctggcgttcccctgtactggggcatataaagtttgcatgtccaatgggcctctctttccagtgatggccgactaggccatcttttgatacataattacatgtattttaattcagtgtttccaaagttgatctgtggaaaattagccctgaagaattttcaattacaaaagagtttacatatgagaatagagcagggattcctaatcaaaatgacactagtgtcctccctataaagaaattatttgcctttgcttaactcttgcttcccagtcttccttaacagtgaagtcacattcctgtattacagctattaaaatgtagctcactatgggaaacagagctgtcagtaaagtgttttaaagtgaagtgtgtggctaccagtaagttgctactacactgatctgcacgactaatgcacctaggacctcttccaggtgctagcattctttgtaaattgttttattcctttaattggtgaagagaataaaacagttatttttgaatggatggatggttctttaatttaaacttttggggggttgttttgtttttagaacacaagtctgcttttgcttaaaagtttagtttaaatctcagccattacagtatcacatgaactcatgtccagcagccttggcaggaaaattgtttctgaatttggcagcagcaactgtacccatttcctgactactttggttttgcttggtttgccaccaggcttttctgctgttgctgctgttcctgtacatgagcgcaccccttccccaaggagtgttcagctccatttcaagcataagccacattagctctaagaagagttgtatgcctcctttccctttggaagtgtgcctatagccagcaccacacatgaccctgccttgtagacgccatgttccctccagaggttctgggacaccatccatattcatccaacttaaagtgttgttatctatcataatcggaaatggcagccatgtaggtagtaaagccccagagtaatatgaagcttgctttgataattcattaataatttaataattcagtcttttgtcttgaaaatattatcaagtttgtaagcaaacataccaattaaaattaagttaaaacctaccagtgactatttctacaaggttgtttatttctctaatctataaatggactgtaggaggtgaacaatccaggctggtttgtgaatgggactccacattccgctgagaggtctagactctgctcttgaagactgtatgttcacacattggagctcaaggttaggactagagctctggtcatctcgttcccatgtcaaactgtagactgggcaaaggcacagtacccttcctcccttcaggattctttctagaagtatcggtcctttgcagacttatttcctaactatccagaacttagtcatatggctcactttgtagcatgggaaggtaagaaatatagtctatattcggagtcatcatgggagccatttaaattaggagtaaaagtaaaaacctgaatgagtgtagttctgcctttactctctacctagtcaggcccatgatgaggaacaagtgtgtaggaagagaacatatgtaatgccctgaacactctacattcataactagcttctactgctatgctgtcaagtctggtagctgatggccagttggaaatatactagtttctattttgtatgatgtaaatacaacatacaagccaacttttgaaagcttagtatgaaaaatgtaaaatattgtaataacttgatattggtaacatgttgaaatggtagtgttgttacaactagagaagatattttgttaacattgattttgtttctttatgcaatttaatgggtaagtaagcagagtccatgagttctttgcactatttggtgtttcttgaagtaatttaaagttgtctggaacccgcttgcatttccttaggtgttcggttaattgttagcctctagtcaagctctcttctttatggtaggtccttggttactaagtgcttatctgtatcatgaagtaagtcctggagactttagtccttaacactggttagcatatgatagtctaaagtccttttgtattgtatgtttagtctataaattcatacttaaccccaaactattatcctaactagtagttacagcatttccacacagttttagagactaccaaaacatatatctttgccagggaaagataaaataaccagctaagtacattaatcatacaaaagaaactggacgctgccaacaggtagctgtggcagtgttaaaacagtaggcagaagtactcatcagattgttcttgaggggctcagggtggctttggaatttaattcattaatattctatccagttctattacatggatcttatgtgatttttttgctttgtgtgtataagtgtgcatttgtatgtgaaaatgtacatgcacatacatgtgtagacagaggtcattgtcacccagatgttaatgtggatatcttcaatagcacttttctgtatttttgaggcagggtttctcactgaacccaaaattcaccaatttggctaaactctctggccatggagccccagttgtagccctgtatctctcagtgctctgatcacaggtgcttgtgaccaccccgggttctccatgggtgctggggatgatactcaggtcctcccatgcacacgacaagctccccactagatgagtgatctgcttagctctttactctcaccttttatgaagcaccgagagctttgggatgggtaagcaaatgtgcattaaccaggacatgggtgtgtctctttgaaagcagcaataagaaatgattaagaatgttctaggcaatttatctttctgtctgtgacatgtagaacttggaactatttgctttccagattgaagattatgatgtgatagccagcatgataggagccaagtgtaaaaacctgcggactttggatctgtggagatgcaagaatatcaccgagaatgggatagcagagttggcttctggctgtgttcttcttgaggaacttgaccttggctggtgccccacccttcagagcagcactgggtgctttgtcagactggcacgccagctcccaaacttgcagaaactctttcttacagctaacaggtctgtgtgtgacacagacatagaagaactggcatctaattgtaccagattacagcaactggacatattaggtaagagtagaatatataaatagttttgtaagagtagaatatataaagatttttaagtttgcatacaaaatgatggcgttttaatgggatttttatatctaaatatcattttactttattcttactcatccccctttcttttcttccactacaccagagccaccttcctgggctctactttctcccaagtaagacctgcttttgctttcatgtcaaatgtattccattactcttcccgctctatactcccgtaatgtttcttctcctctccccacagtctcctttctactatcagaggaatccttaattaagcatgcacacatatgtatgaatgtaaatcaagaatacacatgtgagagagaacctgtggtatttgcctcttgtagtctggtttattttacttagcataattatcttgagagggtttgtgcaaatgtgtatgcattttcatgcaaatgtgatggtttcatactttcttcatagctgcataaaattgcattcatatatttaccaggattttcatttcttcatgccttggtccattgctggacatctaggctggttgctgtcactgctgtgaacagtgcatcaataaacatggatatgaacatatctctgttgcgtgttgacctaagtccttcaggagtagtgtggtggagtcttttcagagcctcagtggctgtaccagtttatgctctcatccatacagtataagggctcctctttcctcataaccaacattggctggcacgtgttgtcatttgtttgcttgctgaaagccattcttcccgagtcaggggttgggtgggtaagcttaaagtagttgtcttctgtgtttccttggtggttaaagatgttgaacaccttttcagataattgtacttcttcttttgagactatctgcttagtgcattagccaactagatggcttcttctggtgttgattatttccttatataggttccagcctcctttccaatgtacagttggcaaagatttttatcttcccattctgtaagctgtctctattctagtgattatttcctctgttacgctgaagtttttaaatttcatgtaatcctatctggaatagatatcttagaatccaaatatatcttggggttgttttctgtattggatattggagtctttttcaaaaagtccttgcctatacctacattttaaagtgttttccctgtgttttcttctggcacgctcagaagtcttcctttaaggtctttgatccattttgaattgattattgtggaggaaaagagatggggatctagtttcatttcttctataggtgagcagcgagttttcctagaaccatttattgaagagggttctttctaatatgtgttattggcaattgttgcaactgtgttcatcagaaaaattgttctgtagggcttttgttgttgctgtgaccttatccagtttaaataacagggtaacagtggctgtatatagtgagtctgatagctttcctttcttttccatgttgtagagcatttggaggagtgtttgtctttatcatttccttaagggtttggttgaatttagtggtgaatccatctggtattggcctgcctttctgggaagactttttttcttcttattaatgtctcaattgtatttcttgttatggatctaagttgcttacacactcttgatttaattctgctacatcacctacacattcttctagatctttcttttctcaaacattttctaggcatttcctagtgttattggttttcactggaattactcctacctctgttttcatctttgatttcatgtattgttattttagtttccattaatttgtatcttgatctcccctcttttttgctacctagtgtttttgaatgaatcttccaaggcatcaataggtaaattgtttgagggattttttttaatgtaaaaaaaaatatttaagctttcctcttagaactacctgaactgtttttctagattctggtatgttgtgctttaaatttcatttgattataggaattttaaaaaatcgactctatttatcactcaaaaatgttcagtccccaagaatttctatagtttttcttcgtgttgattctagttttattccactgtgatgaaatggaaagttatttcaagtcctatgtgtttgttaatattttctttgtggtccaaaatgtgactacctctagattgttccataggcggatgagaagactgtgttccattggaacagtgtagataaactgcttaatcaaattttcaagtagtttaagtctgaaactgcattgttgatttttactttgtcctaactaagatgacaagagatatgaaagtctcctagtattattttattgtacccaccatacttatgctccttagtgctcagtttctgaaatcacagcttccaaaatttagtgtatatatacatacatacatacatacatacatacatacatacatacatacatacatatacattttattggtattaattttcatagtttctaatatgtattggccttcattatctattctgcctagctttggtttaaagtctactttattagatattagaacatttaagccagcttggttttggattctttttgcttgatagattgacttctgtactttgactcttggtctgtgggtgtctttaccagtgaggtatgtgtcttgaatacaacagaaaaaggaagctaatgttttagtgtggtcatctagccagtctcttcattggtgagttaagacaggttacccttaaggttatttgtgagagatgcttactaattcttgattgcttacttattatttgtagtaagtaattagtaatttaatacattaattttactacttaattttattagttgtcttctgcattgttgggttactatttcttcttttctctctattagtattaaggttgttgttgttcctgttggatatgatggatttcttccatacatttgttaaaaagccttgacttaaaacctaattgtagaccttttgcaaagaagccaagtcaatttgcagtaaatatttgtcctgataatactgcttggtagaaagtataagatacattgacagagagagagagagagacagagagacagagagaaatggtgagtttctcagtgcagcaacataatctcataattgaactttccaaaagctttatgtactctaaataattaacaagtttttgtacagtcagatttgtacgactcatgttatccatttttattaaagatagaaaataaatacatttgtaaaatgaattcaacttggatttttaaattttttattgttaaactctgaatttaaaaaaacaaaaacaaaaaaaccttaaatcactgcccctggcaattctagattttaggagttgttcttccacaaggcagcactgttgagaattgttcagaatcctggaattccatttaccttcactgcatttgttcacaaggaatccatgccagaggcaccagcagtgtggccactggtattattttgcccacacatcatgatagagtatatgaactcagcacttgaactgtcttttgcaatatgtcagtgctgataaaaatgagtctccaaagtgcttgcatatacttttctctgtatttaatattcatcaagggaaaacctgaagcttttcagcatctgggtttggttttggttcaaatttctccgtgtccaggtttatgatacattcatagatgatgcttatattgttgtacatgactgattgtgaataaccttaagcaggcagtcatacaaaatttatacactttggaccaactgcttaatttgtgaaatattttgcctgatcttcacagctaagggagttatagcattgtcttttcatagatgaaacccagcatttcctaagagatagaaccaagccgcaggcctgagatgttggtcctgtagtcagtctctgtgcttctgtgcgagtctcattttcttatttcttttccttctgacctgtcttctgcttaacttatcttagctcttttataatattttaaaagttccaggatatgtagaaatattttgaaaacttccaaaaaccatcatggttcccaagaatgataaaagtcagccacagccttttactgtgatgcaaggttcgctttactggatagcgctttgttatttaaaacccatttcacagctctttcctaaaaacaatacaagctgtaaagtaactatgaacaatactcatagtctgaaagagatattatagaaccacaaaggagtcagtcacactaactgagcaatggacatctgatctcacttaattgaagcccatttgatataaaatattatgaagatacagttttatccctcaaatcccatgcttagaaggtacagtcagacctcagcagggatcagctatcaaaaggcattgagccattttcttcccttctcctttaaaaaaaaataataattctttgatcatgtttttcttcctccgctattccaaaattcttcccaggttcccacccacccagctttatgtgttctctttctcgcgcaccaaaaataaaacaaaaatccccacaaaaacaaaaatcaaaagaaataaacaaaacaccagacaaaaaagaatgccaaaatgaagccaaaagtccaccaaagtaacatggagtctgttctgtattgacccactactcctaggcatgggccctgctctcaagtgtggttgatacatgcagtgggcactgaattcgaggaaactgatttcactctgccactaggtatcagttgaagtctcttagcttacgggtgtgagcctgtgtattctcctctctctcagtgctggactcccaataggtttgcacttgtgaaggtcttgtgtgtgctgccccaggctctccctttcctgtcctacatgttcctcctgccccgtcctctgcagcacattagtgtgtatttgaaaagatagctgcttccctcctgtttatgcctggtctctcctcataaaagccatccctgctgccctgggtgcacagccaaacacagcagtgccatcccagctttctatgtccttgggcattggtatttatggacagtgatggctttgccaaatcccaattccagggggagtctggacaggtttagcttgaaacctggtgcagacaggtggcaggaagttccttatcattgccgctctggatactgtgagagtaatgggtgtggaaagtacttccacagaatgaggtttgtgttattgtggtctgggggtgtggattagtatagagctcttgcttagcgtacacaaggttacaggtctggaccccgcatggtagaaacagaatggtccaatcctaatgcctttgtcagtgtatatgcatatgttatgatggtgattctttcctccagaaaagctgtaattaaaccagggtgtattttataaagagcatctcttagactcatgtaacacttggtattttttaagtgtctatcgtgtgttagatgcctttcataattaatgaaatttaccttccaactggataacctatgatactccaaattgacacaggcagaagttatttgccatccttgatctaccttccagccagccaccataagacagtgagctgtgttatgtcgtttgttttatgccctggtcagtggtgccctaaagcagacatgtcctgcccattgtttgttcccaggcctgaaacaggttttcaaaactgttaggatagttgctccgttgtgattggagggtgaaatagcagcatcgctgtctaatgggcaccacacgagttgccgtgagttaagtaaggtgagatgtgaatatccttttacctttgggtaatgaagtaagggagtgggcagtcaggagcattaaagtagcaaaagaaacagacggtggacagaagagaatccgcaaggttcagattcccactgtcaagttgtctgagaatatccagttttacttttgttaagcagaaccatttaatataaagtattttgtttttaaaagtgctttgctttaatagtttatttattttacatgagcttaaataaggtaaaggagctcattattagtatgtgttttttttaataaatgctttgtttttttttaaacaggaacaagaatggtaagtccagcatccttgagaaaactcctggaatcttgcaaagatctttccctacttgacgtgtccttctgttcccagattgataacaaggctgtgttagagctcaacgcgagctttccgaaagtcttcataaagaagagctttactcaatgagttcatactgctctgtcactacaatcatgctttggtggcttcttgtgggggtggctcttctgtttgtttggtttttataatgatgagaattaagacatttatagaatttaaaggaaaatgtaaaattgtccactgaatcaagtaaaaatgtaaagaatgctctctaaaatattacagcacttttctttaggaatgtgtaatctctgatattatttcccattatgttgatcagtggtatgctttaatcagtaattgtatgttaaaggaataatatggaaatattctaatttattttaaaggaatactttgaaaaataaagtgatcataatatttatgaaaaataaagttgattttgcacatctttctttgttaagaatctttattaagccttatgacctggcaagggtgttgcttgttacacagactgggagagatgttgagagtgagaacactgaagttatagctcagcatcacagtgcttacctcacgctaaagcaccgaaaaaggaagtgaaaaaaatcagctggagggagagactcgctttaatataattgttttgttgttgttgacttagtttagttatttactttgacgcaaggctttccgtgtaacccaggctggcctcagacccggcatcagaagactgcttttgcttctaaatgagattgttttcaagctgacatattaattgttcagctgcaaaattagtagttttcccacttttatcttattttttcatatttttctttgactgctggatatataaaaacataggcagattcaagtataagacataaactactaactgaagtagttttctaactgctgaacaagtgccttacagatacatatgccttggaggcttcgggcttctcagttatttgtataactatgtatatatggattcatttatatttttctataattcaaaacttaagtaattaaaattcagctgtagttcaggatcaggaggaggagaggaaaaatttgttacataatgaatttattgaattctttctcctctttagaaagtagacaaaaatgcattgtggcattcaggggccctattaaccctgtagtataacagagtttttctacccaacacagaaatgtgatattctaatatccacgtgccctgcagtaattccgtcggtttgcgctgtttgattatccacttaattgtattttaatttcaaatgcagtttctgtgtctgaactgtcagtttcttattgctcattagttgaatgaggccagctagtagctaccatgttgggcatgtggatgaagaaccttctcatcattgcaagaagtgtttggatagcaatagttgaaatgttctcatagcataattcatttacaaaaagcgcattatcagacagtatcttcaggcagtttgtaagatactctcactagtacatatataagggcactttttcattcaaaggtgttaagctactaaatttatacataagcaaatggcaggcattcagcatatatttatttaacaactaatgtatgaattttgagttgtcacactttaaaagtgtgaatatcatacattactattactgtgtttattcttatttagattctaagaatataatatgaaatttaaagtagttaagatgaacacaatctctccattgaaagagtatgagaatcaccaccctgttcaagctacagtgagctctgcctggtcttctgtttgatggaaataagaatgctggggaagagcttggttggcttccaccttcatgcaccgggactttatttttgtctctgaatggatgtaaacatttctaatgttttatccaatgagtaggaaatgtataactgattacaagctcttatcttgagctagcagattccctttgctaaatacttacatggctggcgcaaggcactgtaccaagtttgcgtttcctaatgcacttcacccttgttctcaacctgtgaaatcgatgccatcgcttacccatactacagaggagaaaagcatgcacaggacgcttggtgagtgttgaagaccggctggtgacaaagccagcatgcaaacccagggcatttaacctgtgccttggaagtgttcagtgtggcttctgcactagactcgagaccgggagacctgtggaagagctacacagcatctatgggattttgggagctaagaggccaaatggaaaccttcttgcacatggctctactaatgggaagagttaaatacatagaaagatttcactcaatttagattcaaagtgtcctatcatggaatttaattccagagactgaggaggtaaagaacctagctagcatgtgtgagttcctgtgttcaatccccaccccacatgcaccatacacacacacacacacacacacacacacacacacacaccgtgtttatctgctgagactgttctataataagaatttgagtgtaattatatctgtccttttgaagatacatgttgccaaatatttctttacacaggtaagtgagaaacagtttttataaagcatattcattacctgaaaggaaggcattgatgaacttttggttaattttttccctcttgataggcttcttttagcacgtgctagattaatcacttctagctgaaggttggacaaagaccctctaccaaatacttaagtggattttgaaatcagaagttacgtttgcgtttgtattaagctcctaacatgctggtccaaataatttgaactacagctttatgtttgtagaggtcctgtctacctgttgatagtacactgagctatgaggaaactagatgtttaagtgtgttccacacataatactgtttgccctaaagtttttggttgaattcgttacaaaacactatcaactctgtagcaaaggctaaaatcaaaagccgttcagtatcatattgactatctcattcattcttaccgtagataaggacatatcagccttgagttcaaaacaaacaactgccataaaactatactaagccaacgaacgaactgctctgtgggagggtaaagcagggtgttggttgcttcaacatgggagacaaaggaaggccattcttgccatccctggttctacagcacaggctgagtgaattagatgctgaaaagtatctgctgatgaatggcactgtaaatgagcccaggttgaaactccttacattttcataaagtttaagcaacacttttgtaccacacagcacctctggtgacagctgtccacagcttcggctacaggttgtgtggagccccactttcttagaaaatattcttgcctgataagttgttccattacaaaaaaatcaaaggccatcccttcagtcgttcattcctggcattaattcctcaaatacgctatagtccttgatttgtccatacccaagggaagccattttccttgtttttaattgctgttactgattattgatgttccttggtgttctccatccttcaactgcattcttaactgccaaagttaacttgatagttaagcaagtttattctgcacacatttcttcatctgataaaataaaacacaagtaagttatcactgataaaaagacttttgttgctttgttaatgtttcagtcaactgagttgaaattttctttttattattgtatattctgtggtaataaatatccttgttttacaattttttagcaactgaaacctatggatcaaaaatgtctctatgagtgtttgttaattctaacacataaaattttattttaggtcatccattgtttgattgtatgttaaatactaagctttgccgtctaatattataacaaataatctttattattctatgccttaaacacatggtacttacattttactgattttcatgttttgatattatggatactggtgctgaaagtaaaaagaaaaaaatatattgatgatctgtgaggcacacacagtgctgaagattgcaacttggtcattagagtttatagtgtgccacacagctaggcaaaaatgacaagagcatgcagtacaagctccatctaatcccctcggcaccacctcagatgtgccatttgcgtgtgaaggtaattgtagacaatgtgtagccaggctacaaataaactttatttgtagccagaagaacttgaatttcctggggtttcgtgtgttacaaattaaaaattcttttaacatgcaggtattgcagttattaacttgtgaggcagtattgtgactctctccctaggatgtttgcctcctgagtgccaagattaaagatgctagccaccatgccttgcctttcttttttataaactgaagttaagcctcttcttagccctgatctttctcatttttccatttagatcttaaaatataaaattcacaactattagaaaaaaactaatgtatttactataatgcctaatgattatagcttctggtcattaaaatttgaagacaaataaatgactactcagctttttatgtaactgacaaagttttgtagtattattagtgtttaagtggggaaaggaaaattaattgtgaacatatttcatttctataaggtttgccacaaatacactaaagccttaaaacttttatttgctggtccttgatgtggttcatgtcatccctgggtaggactgtcggctttctccctcctttaaagcttgcatggtatcttctgatgaagccagttcttagaaaaaggacattcaggtcagttccagctcaggtgtctctgggccccgtgctaaagtgtatggtgtcttgagcttaatttccacctctgagggggcaaataagggcaatagcagcagactttgtgtttgaggagtcttttggacagtctggctaacaactcaaaggaaggcttctcaagtctagtattggagtttttgttagatagtctttggttcttggtagcaacatgataaccctaagggtgtagaagtggcacacacacgtttatccaacacttctctaatgacatcatggatatgggaggaaaatcgacacgcactactttactgaatataatccctaacaacagtcaaaacgtgtccttatatctacacataagtgtactcctaacccctcgtcaaggaaacgtgtccttgcaacagaaaaagaccaaaacagaaaaccacaaccaaccaaaatagagttgtagaggccatcccattttcaggggaacatcaaagaagaggggagagaaagatggaaaaagccagatcagagtttgttgtgagattgtctcctagtgatgtcagaacctacacccataaagtctcaccaacataattgtctgaacatgagctgaataaaggcgatgtgagtgccaaagtggatttggaacaccccacaaggtcataaccctactcaaagtactaaaaacaatcactggatactgaggacaggagaaatcatcttctgagtggaagaacacagtttagtaatacatggtaaaccctcaggacatgcataaagtaacattatacacactgagcaagttatatctaggaatacacacacacatatatatgtatatagataaacaaaaattacatgtatgtgtgtggaacaaaaattaatggcaaagaagggcatgaatttgaaagggagcatggagggagaaaaggtaaatgagaaatttaacatcttcttttacttacttgctttatattctgcttactgccctccgcccggtcacctccaccccaaagtcttgtatgtgcaagcaaatgaagcaggaaggagcatcagtaagactcacacatgcctgctgtatgtcttagtgatgggtgtttggagtttgtttggagtttgacattgtagagagcattactgttagcagactttttaatattttttaatattttttattattacgtattttcctcaattacatttagaatgctatcccaaaagtctcccataccctcccccccacttccctacccacccattcccattttttggccctggcattcccctgtactggggcatataaagtttgcaagtccaatgggcctctctttccagtgatggccgactaggccatcttttgatacatatgcagctagagtcaagagctccggggtactggttagttcataatgttgttccacctatagggttgcagatctctttagctccttggatactttctctagctcctccattgggggcgctgtgctccatccaatagctgactgtgagcatctacttatgtgtttgctaggccccggcctagtctcacaagagacagccatatcagagttctttcagcaaaatcttgctagtgtatgcaatggtgtcatcgtttggaggctaattatgggatgggtctctggatatggcagtctctagatggtccattcttttgtctcagctccaaactttgtctctgtaactccttccatgggtgattgtttccaattttgcaaaacacatgaaactgaagaagaacgaagactttttaaatttttaagctgtttttcagcattatgtttagtttcttttagcacattagatgcagtatgtcagatccttcagtgccaatcactgccttgtttgcgtgctgactatatattgttacattcctggttttcacctgtaactgttaggagagctagccctctgtcaaaggtcgttacattaatcacaaatcaaaagagttatatgttttatataagcattggtggcgttcagggttttgtttgtttgttttgttttttgcctctacacagtaaacagtacatttaaaatacttgcttataaatgtgactattacatgtaaggttttcatatttggctttttttttagatgaaaagggtgtttctatcagagctgatactttgacaggttgtgtttcaatgtgttttataaagtgataaaagagtggcaacatcactataaaaacaattgaaaagcattacagcaataccatcatatgatgcgaaacactatagactatacaaaaccccacttctgttggagggaaggttctgtgcagataattagaagatgttctgaattttgtttgcaaatactgtccttgtctaatcgtttccattgtggtgtgtattttggaataacaggtatcagtgtctcactggctcacgtgtgaagctgatcaattcaggacactttagaatgtaacagaaggtatggggaaacagatttgtattacagcctttatggacaagacaccaccttttaaaccatggctcatgatatgtaattaaatgtgagaacttacaaatgtgcaaacaccaaatgctaagtcaagatcaagtgtgctttgagtctttggtgtttctagccctgattagccaggctgcattgtgtacatgtccctgcagatttagttctgaacacacacgagctcttagtgctgtgagtgtcgccatactaaccaatcccaaccaaaactgccaggagcaccttggtgaggattccagactgttgcatgctgagttagtgattttacggtgcagaggcattttctgcctttatagaaaacgatgataaaattacagagaataaggattttcaatatcctgtcattccttagtatataagtattagactagtatatctttaaattgtaccaaaatgtttgatttttttttttaacaattgtttgagttgctcaccaatttcatacaaaatcattaaacatattatagtttgggattaaaataaaatttccaactatgtctaaaatgacctgaaatgtacctcaccttctttgtactatgcatttacatgaagcaatcttctcaggattgataattattaaataaaaaatttggcctggcttgatggtgcacacccttaattccagcactcagaggcagaagcaggtgtatttttgtaagttctaggccagcctgatctacaaagcaagttctagacagagaaaccctatcctataatttttttttaaagtcagttcttagaaatgtggaagatgatgcagcatcaaatatcatctgagttttaattctttatgtaaaaataagcaatcacattcatcttactggtatgtgacattggctctcaataaataataaaatcatttacagaataagtttaaaataaatttatttatgatttattcattatcagtaaatgtttgacttgtttactcagtttatataccactatacacttggactcacagaaaaatttctgaggtgcaaagagagtcaccggtgcaaagctttttagaattgctgatctagaagaggatagccacggactatatggagtggtatcatctgcagccatgctttctaaactcttactgtgtggttctggcactaaataaactttaaatgagttttcaggagtatttctttgtaccttcttagtgattaaattttcctgtagtttgtaaacttacccttcagttaaggtttgatataatattgtcttccctttagtttaataatgtatcagggtggggcttggagagagggctcagctgtcactgccacccactgcagaggacatgacttcagttccccacaaccacataacagttcaaaggcctctgtaactccatatctggacaatgtgacactttcttctggccttcatgagccacaggcaatggtgagcagacacacatgtaggtgaacacttaacaaaatgaaaataaatatttgtttaaaatatttattttaggaagaaacaaaactcttcataattaattatgctgttattccaaaagctttattcgtgagcaaactcctggtgagtgaggatggagtgaacggcgtacagtaagcagctgtacatctatttggtctggatagtgatagttttgtgcctggcacaggtcggggtagatccagtgagaatttttcagaatttgtgtgtgtccagaagaaactccacatatttgattttacttttggtatcttaaaccaaaccacagcctaagaattgggaacgtctacaggaacttctgtaccacctgatagattttacatctccatgtagcatcttgctgttaagctgctttaattgagagttatttgttgtgctagtccacaagctaattcaatcatcaattgtataatagaaaagaggaaaacaggttgggggttgattttttgattggtgacggttcttaatgtttaatatgtaacataacttttaaagtatcatgaaaacaactaacatttgtttttgtaaagtctaggaacaaaggagaagggcaatttcttctgagaattgtttcttccaaaacagtcatatttatgtgtggtcacaaatgtttatacatatgcaactaattcaagtctctccagtaaacatgtgtttattttgttaggtcttttggcatgggaggtcatttctgctatgattatgagtacttatgagttcctgatcggaatacaacagaggcctgaaaactgttaatacacagctctggcccaatgttcttgcttgagacattttagctgtcagatactctaagaaaaattcatgcttcttgaaaatggggtaactttaagagttctaaaaagaactctacccagtacagccccaaataaacaatcctaagtccttataattgacaaaatcagaaggctttacagtgtgtattctctgtcagtggtatttgtatgaccacgtgcagttgcgcaacaaagagaaaaatgatttggatcatggaggagagctgtcctttttttctattgtgaacatcttccaatttccacctgcacacagcttgccactgtcagtgttcttgttccctcctctgggtgcattggttttcccaggcttagacggtaagtgcttccagcatcccatcagactgcattattcagagccttacgttctctttatttttaacagccattcgtgttagttgtcaacccccagcctgaaacccccctacataacccaaatttggctgacttaaaaagtattttagacgtttaagcaacaaatgttaaagaagctgtgatggttagtcttggttgtcaacccagctggacctgggatcaacttagagacatgcctctgactgggtctgtaagggcattttctgtgaaggacaagacctgcgggcaccagatctacaggggtcagagggaaaagcaatgtgcacctgctgccactgccaccctgctcgctgacatcaatacccagcttcagcagacttcaaggcctgttggcaaaggtacttgttcccacagatcatggagaaaccagaaacggcaagcatgaggggttgtcttttttatagaaaagatgtataacctgttcttctacccagaaggctggaaattggaagtaattaataacctggtgatctgtgct

SEQ ID NO: 212 - DNA, 2374 bp, Mus musculus
gtctcctgctgcccacgctgcgggcttgcggcgaagctctgttcgcccagttccggaccctgcagggctgtctcatctcagcatctgtaggtgaaagcagcatgcatgtttcagacacgtggatgggcaccaactcctgtgcttcccgtgtgtgtcaggtgacctgtcaagccaggaccatccttcagagttcatgcatctcaccgaggacacctgaccttttgaagcttcataattcacgactagatgtcaccagtctttcccatgttaacagttctgaccatgttttattatatgtgccttcggcgtcgagccaggacagctacaagaggagatatgatgaacagccataggactatagtgtcaaacagccggacttcccctctcaatgcagaggtggtccagtatgctaaagaagtggtggatttcagttcccattacggcagtgagaacagtatgtcctataccatgtggaatttggcaggtgtaccaaatgtcttcccaagttctggtgacttcacgcagacggctgtgtttcgaacttatgggacgtggtgggatcagtgtcctagtgcttccttgccattcagaaggacaccgtccagtttccagagccaggactatgtggaactgacttttgagcagcaagtgtaccccacggctgtccatgtgctggagacttaccatcctggagcagtcatcagaattctggcctgctcagcaaatccctactccccaaatcctccagctgaagtaagatgggagattctttggtcagagagacctatgaaggtgaatgcttcccaggctcgtcagtttaaaccttgtattaagcaaataaatttccctacaaacctcatacgactggaagtcaatagttctcttctggattattacaccgaactagatgcagttgtgctgcatggtacgaaggacaagccactgctctctctcaagactgctcttgtagacatgaatgatctagaagatgacgactatgaagagaaggatggctgtgagatggatgctcttaacaaaaagtttagcagtgctgcccttggggatgggccacataatgggtattttgacaaactaccatatgagctcattcaactgattctgaatcatctttcactaccagacctgtgtagattagcccagacttgcaggcttctccaccagcattgctgtgatcctctgcaatatatccacctcaacctgcagccatactgggcccggctggacgacacgtcactggagttcctacaggctcgctgtgtgcttgtccagtggcttaatctgtcttggactggcaacagagggttcatctctgtatcaggatttagcaggtttctaaaggtgtgtgggtctgagttagtacgccttgagttatcctgcagccactttcttaatgacacttgcttggaggttatttctgaaatgtgcccaaatctacaagacttaaatctctcatcctgcgataaactcccacctcaggcttttggccatattgccaagttatgcagcctcaagaggcttgttctctatcggacaaaagtagagattgaagattatgatgtgatagccagcatgataggagccaagtgtaaaaacctgcggactttggatctgtggagatgcaagaatatcaccgagaatgggatagcagagttggcttctggctgtgttcttcttgaggaacttgaccttggctggtgccccacccttcagagcagcactgggtgctttgtcagactggcacgccagctcccaaacttgcagaaactctttcttacagctaacaggtctgtgtgtgacacagacatagaagaactggcatctaattgtaccagattacagcaactggacatattaggaacaagaatggtaagtccagcatccttgagaaaactcctggaatcttgcaaagatctttccctacttgacgtgtccttctgttcccagattgataacaaggctgtgttagagctcaacgcgagctttccgaaagtcttcataaagaagagctttactcaatgagttcatactgctctgtcactacaatcatgctttggtggcttcttgtgggggtggctcttctgtttgtttggtttttataatgatgagaattaagacatttatagaatttaaaggaaaatgtaaaattgtccactgaatcaagtaaaaatgtaaagaatgctctctaaaatattacagcacttttctttaggaatgtgtaatctctgatattatttcccattatgttgatcagtggtatgctttaatcagtaattgtatgttaaaggaataatatggaaatattctaatttattttaaaggaatactttgaaaaataaagtgatcataatattta

SEQ ID NO: 213 - protein, 593 aa, Mus musculus
MSPVFPMLTVLTMFYYMCLRRRARTATRGDMMNSHRTIVSNSRTSPLNAEVVQYAKEVVDFSSHYGSENSMSYTMWNLAGVPNVFPSSGDFTQTAVFRTYGTWWDQCPSASLPFRRTPSSFQSQDYVELTFEQQVYPTAVHVLETYHPGAVIRILACSANPYSPNPPAEVRWEILWSPMKVNASQARQFKPCIKQINFPTNLIRLEVNSSLLDYYTELDAVVLHGTKDKPLLSLKTALVDMNDLEDDDYEEKDGCEMDALNKKFSSAALGDGPHNGYFDKLPYELIQLILNHLSLPDLCRLAQTCRLLHQHCCDPLQYIHLNLQPYWARLDDTSLEFLQARCVLVQWLNLSWTGNRGFISVSGFSRFLKVCGSELVRLELSCSHFLNDTCLEVISEMCPNLQDLNLSSCDKLPPQAFGHIAKLCSLKRLVLYRTKVEIEDYDVIASMIGAKCKNLRTLDLWRCKNITENGIAELASGCVLLEELDLGWCPTLQSSTGCFVRLARQLPNLQKLFLTANRSVCDTDIEELNCTRLQQLDILGTRMVSPASLRKLLESCKDLSLLDVSFCSQIDNKAVLELNASFPKVFIKKSFTQ

SEQ ID NO: 214 - DNA, 72678 bp, Homo sapiens
acattgttcaagggtcaactgtataatgggatttgattcagaataaaaaggaactgaactactcttaacacatagcatcatgggtaaatctggaagatagactgaacaaaataagctagacacaaaataatacagttgatcctcaaacaacatgaaggttaggggtgccaatcccccatgcagttgatccagctataattttttactccccataagcttaactaccactgaatagcctatggttgactggaagccttactgataacatatacagttggttaatatatgttttatatgttatatgtattgtatactgtattcttacaatgaaataggctagagaaagaaaatattaagaaaatcatgaggaaaagaaaatatatttactcctcattaagtggaaataggtcatcataaaggtattcatcctcattgtcgtcatgttaaatagactaagagggaggaagaggatgggtcagtcttgctgtttcagagatcgcagagacagaagaaaaggcacatataagtggacccacacagttcaaacctgtgttaagggttagccatacataccatattatttcactttcatataattctggaataaaggacaatctggtttgtagtgacagaaagcagatcagtttttgcttggcataggttgtggatgggtgattgaccagggatccttttaggctagtggtaatattctgtatcttgattttggtggtggttatgttggtttctgtcattgtcaaaactcatcaaattatatgcttaaagtggggtacattttatactaaagttaatttaacagtattacaccattttaattagttgctattttagctataatggcaagctatgacaggtgtattgtccttggatttttgtttggcagggtgtaaatccactatatttttttctaggtaaaatgttctctatgttaatgtacaaaaatatatggctagtatttggctaaagtaaattcacataattagtatgactttaacaaacaaaatatcattttttctttcttcagtaagttccttaaatttatcctcagccagatatctccaatttttaatattttagttaaatatcattgcatatctgctaaagatttagggttattccagagtcacagttcttctcattcagatgccttattcttttttttttttttttttttgagacggagtctcgctctgtcgcccaggccagactgcggactgcagtggcgcaatctcggctcactgcaagctccgcttcccgggttcacgccattctcctgcctcagcctcccgagtagctgggactacaggcgcccgccaccgcgcccggctaattttttgtatttttagtagacacggggtttcaccttgttagccaggatggtctcgatctcctgacctcatgatccacccgcctcggcctcccaaagtgctgggattacaggcgtgagccaccgcgcccggcccagatggcttattcttacccatcgttaaacactgaagaaaaaggtaatatataggtaatataacagtggaatctatttctaagttatgttgtatcatcgtacctgtgtaattagaaacatatcctttcttttcactttgtgagatagcatgttgggcaggaagagggtttccagatccattatatcagaaaaaaaaaaaacaaaaaaccattccactcatcctatagctctacttaaaaaaaaaaaaaagattccttcaattcctttttctgcttttcttgctactaaagattgattatgaaatatttcagaagtttagatatgcttgttaaagaaagtctaggaaagaaagaacatattctgcagaagtaacctttctcaattcctagtttaaattggttctaaatcttatctcttgttttctgataaattcattcctacttgacttcttgggtacctcttgcttagttcctgccctttattcattaactcaccagaggtttttgcacagtctaatgtattccagactttttggattatttccttgcatttttgagatctaccttgattcctcgaagagagtggtactgtttacctctggtttttgagatttttgctctgcttttagatttttcttcctggcctggttcccttgccttctccatttgcttcattcgcttggattttcaagaagctttgaagctggataggagtctccagtcttcctcttgatccatatgtttcaggtaagaacgccacctattttttctactttggggccttactgattaaaaaatacagtcataataaaaatgttttaactggggaagaatttacttagagtaagagagaggcatataaagccttaagataccatcctgagtagtttccatgctgacactgttagattttttcaatgttagttttttaagatctagtacaattagaatatcaataattatgatgaagaaaaagcggagctttttctaatgcttggcctttgctcctttatatcacatctaatacgagaacaatattaagctgtcttattacctttgctgttatattacggcctgtctcttctgtctctctctctcttttttttttttgagacggagtctcactctgttgctcaggttggagtgcagtggtgcgatcttggctcactgcaacctccgcctcccgggttcaagccattctccgcctcttctctcttaacttgtaggttatctctttaagaaattctttttcagccatagtttttccagttctccataatcaacgtactgttttaacacagatttggagtgcaaaaacatcattgtatttgaggaaatggctttcttttacctctctaatcatctctttcatgaatctttctttaatttcaatcagagtttctttgtgaccagagtcaagactcttttatgtattcagaagctgcttttgtactaacagaagttactacttttttcattctctttgaacagtaaaatttcaatatatgtactattccttcttggatggcttcaaagaagttcatacatttgattcttacctattgcgcttcaatttttattacccgtttcctctctttatctctgtatcaagatatggaacatttcttgtgtcattttttggtttacatgtgccttaggaagagttgctggtttcatctctgtgtttattttaaacttattcattttaattctcttatgccatctactcttccagtctccgtaaaacaacagatgtttattgagcatatattggcatgtgctagactctaagggtatggttataattaaggcatgttctccgaacttggggagttcatagtctattcaggtagagaaatatttcagcatgtaagaaatagcaaataatacgaacatataagagcagaggaaaggtgcatggtagataaagtatgaacctgaccttgaaggatgagtaagagagtgccaagcattggaagagagggggcattccagagccatccagcctcagttgaagatttcaggatgctgaggcatgaaagcaggagtgctgctgagggcatggtggaggttctggtgggtctacagcaagggtagtgggtgtggacatgaaagggaaggggaaggcgggctcaaagttagatagaatgttcttgtatatcatgttatcaaaaagacagccttcctttaatggtacctctgtgtatatgagaagaattaggaagaagaaaacctgggaggagactgagaagttaccagaggcaagagggggcataagagcacaagttggtgtaaaagctagagggggccagccaggaaagagagctgataggaatttcagatgctacatcaaattcacattatcattcccctcttttctccattgatgctttctttcattcccctgttttgatttctagattcaaccagaaaagtccttcctcagaatagtatgtcttgatcagtttcagcaggattcagaaataatgagcatttaagggttggccttttttcttgattcattaccacattgagcattctaattacattttggtactatgtagcaaagctgtctaaacttgctttttttttttttttctatgacttcattgacatgtctctgtgggctcttttgcaagtaaatattgtgttacaatttgccttgtatgtatgcctgtgccttattgcctgtcctttttgtgtttttccatgttttttcactgtagtataacttgagaataatcctcttttgagttttaaacttgttttcaggttctttcatctcactgtgaacctagcctttacgctgtcctggctctggttcattctgattgctgcctttgttattttattaacagtccttttccttcctctttttcccttcgaagtacaagccgacttctcggcagctcctgccatcctgcttctctccgcctcatcgattccccatctcacttcaaatctcagtaggaaacatatgttctcccttgtctatacctcttaatttctcttttccactattactgctttctctgtaattgtattatttaacttcgttaagcattttataatatggaagatgtggtttaaacctaagttgtattataataaaatcatgttgtataaaagcaagttgtttcctaaggagtatgaaagtctcatgatacaagttaaaatggctgttgttttggtattccttgattgtgctagtataaatgttcagtgtagagaatttctcacttcatagtcattgcttatcagtgattggattaagcaacaaatgaaatgaagatccccctaattctgacttattctaaatggaaaataatatttttatatgttgtgagtccttaaagtagctttttgaatgaacaaaaaaagaaaatgtctcccagaagatccattttataatcactcttttggacaaattaagtgttcctgactaatatttatttatttgcaccaggtgggaaaaataattttatctttgaatcccattctccttataaaatagagttattgtatcttttacacttggttcattgcccatagggatattcattggttaccacaaattgcctccatgccttggcaaaagtccagacagcgcctggacaatttggacttctgcattggtcgtagctctccacatgagtcctgagacaatggctccattccctttttcagcttcatttcccagggaaaagtagagagagctatcctttcttctccatatgttcttccccacccctaaaacacttttatgtgtcatcttagcagattggaaaggagtttagaatcaatgaaggacgttagcaatgggtttgtacatttctcttttttatttctatgccttgcttattttcaaaaacaggttttaacttctataacattttccaaatagcactgctggaaaaagaataaatatatttgcttttttggtatatcagactctgcatttccttcctttaaaaatttcttttgccatttttaactttatttcctgaaaaaattagcattaaatattatttttatccatagttgaaaaaaactaaagcatccattttacatttctatattgaagaagtttgaacatataacacatatatttacagtttataactcacttttacatatgttgcctcaatgcaaaattttgcttaactttaacacagcttaaacataatattgcccatatgacagtcttgcttttgatattatcttataatctacaatggtaaaagctgggaaacagtttcaaagtttgtagcttggtatgtcaaacagaatttgactttcacaatttgtctaaaatctttttgccaaaaatgcacaacacagttttataaagaaagggggaggagcttagttgaagcaatttatagaccgtggagtgagaagtgatgtccagagattaagcagtcaacttattcatccactgtggcagatggttttctgtccttcccttgatggtttccaggaataacacatccatagtcttctaaattagctgatttgtcaattgatttgaatacatgttataggttgttctttatttcctaaattttatttttgcagtttaacttgttaattctttttctttttgaaaagagaatagtcaacttctttggaaaatggttcttaatttatctgcagccctattttgaaataaagtgtatatggtaaaagaaagatttgtaccatttcaattttttttgttaaggattgagacttgaatggcaaaaagttgtctgtctgtttttgagacggggtcttgctctgtggtccaggctggagtacagtgacacgatcatgactcacttcagccttgaacttctgagctcaagttatcctccagcctcagccttaaatatatatattttttaatttgacaaatttatacttgtggtaggtgaaatgtttgaataaagaagtaatataacaggtagttatttttcccccaattataacatgacatacttcagtacttgctattatatgtcctgaggtgaatctggttcattgactcatgagcacatccattaagtgtgtgttacagaaacaccttatttatttatttgtttgtttgagacagggtctggctctgtcacccaggctggagtgcagtggtgcaatctcggctcactgcaacttccgccccggcgggctcaagtgattctcccacctgggcctcccaaagtgctgggattacaggtgtgagccatcatgcccagcctatttattttaatatatgctttgttgcccttctttggaaaaagtcttattctggttattctgttatttcttgttcttgtgctgcaaatccctccatttggtgagtccactgactatctctcatcatggttcattttctattctggtctgtaactttttactgtgatgcatcattagtaaaggtttagtctgttgtatgttttggaagcattcctgcaaagagttttcacatttgctcttaccaggtcctaaagttttaccagttcaggactacttttcttttttcagtttttggcatgaggatagggtgggattctaaaccatgaaggttgtgtgaatttaggcccacactctatgcatggttcatgcctcatatggttctgatttcctctggtgactttccccccattgccttagttgatgtcatgcctacttgggtttcctggccagtaagctaagtttttatagtcctggtttcatggatagggtgatcctttcagagttttgactttatgaaggtccttccaactgtgacctgtgtctttaaataacgtctctgaatgggtgttagggagtccccttgtaaccattatggcctgtaactggttccatgagtcatgttagcttcagcccctgacctctgttcattgactttcttttttctgctcattgactttctttctttctttttttttttttttttgagacggagtttttctcttgttgcccaggctggagtgcaatggcatgatcttggctcactgcaatctccacctcttggattcaagcgattctcctgcctcactttcccgagtagctgggattacagtcatgtgccaccatgcctggctaattttatatttttagtagagacggggtttctctgtgttggtcaagctggtttcaaactcctgacctcaggtgatccacctgcctcagcctcccaaagtgctgggattacaggcgtgagccaccatgcccagctaactttcttcttagtttcttactactgtggattctctgcacttctttcaagttcagttatttaagtagtgtttcagtgcttatatttttaaatatttcattgtgtttggatctgtttgggtttgagaggcaaaaggatgctgttatacaatttaaaattattttagatttttataatttttaatttgctcatcacctatcaacatgtcaaatattttgtgcctattatgtactgtgtactttgagaaataaagatctttggctagattccctccttcaagagacttattcctaatataaaccctagtggaactaaggtatatatctcataaaaatgcagtgccagtaggtatcagaaagtaaggctactgatgtggaaaaaagtggttggaaaagaaatgatagaggaagcgagacttaacgtaaaatacgaagagtggttagaacttgattgggtttgctgggttagacaagaagagattggtccagcttgaagagagccttaaaataccaaaccaaataatttagattatatcttgcagataagaaaaaggcattggaggtttttcagtggaagggacatttagtgcaaataatgttttataatcttagtgctgaagttttggaagactagtgcattgctctattaaagaaaagttggggcagggcgtggtggcttacacctgtaatcccagcactttgggaggccgaggcaggcagatcacctgaggtcaggagttcgagatcagccttgctaacatggtgaaaccctgtttctactaaaactacaaaaaattagctgggcatgatggtgtatgcctgtagtcccagctactcaggaggatgaggcatgagaatcgcttgaaaccaggaggcagaggttacagtgagccgagattgcgccagggcactccagcctgggcggcaagagagacaccctgtctcgaaaaaaaaaaaagaaaagttggtacatctcccttcttagaagttaaactcaagactttacaggtacaaaaataagtttgttttatagttccttgttgtcaacaaaagtttacctactcactgaggatgggccccagcctatgttgtaaatgagtggagctggctgggaacgagagtggccactgagagagctcatgcctcttgggatcttgttgattgttaaaggttacaaactagatcaaatttttaaaaaacactgtttggcctcagtgaaatatgtatacaaacatagtttgaaacaaaagctgtgagtttgcaacctctttatagatagcgttcattattaaatctttattatattctatcataacatttaaaaaatacattatttaaaattgtgtacaaaatagaaaaatgtggcctgtttgatttgaagggttgaataagtggctatttataattttggatattttgactttgtgacttggacataaaaatattttccaaaactcttttcttacaggtaaaagaatgtcacatgtcagcatttgtacctgaagtcagcatgcaaagttcagggtacatggatgaatgccaacttttgcatttcccatgtgtatcctgtgaccattctatctggggtgagtgatttctaagagtagctggcaacaaaccagatgccagccagccatggactgccctaacaaataatgctaggagttataaattaaacactgatctgtgatctgtgatgtgtaaggcagttaatgtagttcatctggattaactgtcagcaccaaagaactatattcccataatgtgaaatctgaattctgtatgtttgaaagagagtaataattaacagtagggaatttttgttaacatgtaaaattacagcaatgtctaagattattttgaatttacagcagtattttagtggttcaccatataatttaaataattttaattttcagattcaaagacttagtatttcttgagtgatggttataattttgtataaaatacggctttttggattgtatatcttccaattgccttataatatagttttgcttcccatattgtatgcataacaatatttaggtttcttaaaaatacattagaaaatttatttataccagacttcacatttgtattttaaaacttgtttttttagtttcattctgagaaattacattgagggtagagcctgttcattaccttatccatgcatttttctgcttatttaaattattttacttcaccaagccattcatttttttagaacatccttcaaagagttcatgcatcttactgaggacacctgaccttttgaagcttcataattcacatctagatgtcaccggtctttcccatgttaacagttctgaccatgttttattatatatgccttcggcgccgagccaggacagctacaagaggagaaatgatgaacacccatagagctatagaatcaaacagccagacttcccctctcaatgcagaggtagtccagtatgccaaagaagtagtggatttcagttcccattatggaagtgagaatagtatgtcctatactatgtggaatttggctggtgtaccaaatgtattcccaagttctggtgactttactcagacagctgtgtttcgaacttatgggacatggtgggatcagtgtcctagtgcttccttgccattcaagaggacgccacctaattttcagagccaggactatgtggaacttacttttgaacaacaggtgtatcctacagctgtacatgttctagaaacctatcatcccggagcagtcattagaattctcgcttgttctgcaaatccttattccccaaatccaccagctgaagtaaggtaagactaattttttaatgacctaagttatatggtagaaaggttttggttgttaatattggagatcttttttattgcaagcattcttttaagtaacttaattgaatttgattttgaaaattttccttagttttctgatggggaagagagatcactcatataaagatttaatgcaggctttatacctgtaatacctcatactgtaatattcatggcttatgatatttgtatctcataaaatttaccaaaaccaaaaagcacaatttgaactcatagggacatgggccattctgggacgttagtacgaaatatgactttgaaaatattttcaaacaggcatcatgttactacttttaaatcttttcaacaactcacaataggcctgtgagtgacacttcagaggaggtccttaggggatttggtttaacgttagttgaatgtttttgcaacacccatattcatttaaaaatcaatgttgctttaagtaattcatgcattctccctacaagcctgttttgcataacagctccttggctgtcgtttttgtcattcaacctcctaattttacaaaatattaatataatgcagtctcacatgtaccctgttctccatgtgcctaggacccattcctccctcgaagaaaccacttttatcagctcattttgtatctttccagaatttctttgtgcagacacaagcaaatacaaatataattttatatttttatacacaaaagtaagcatatttatcacactgttctgtaccttgtttcacacagtagtatatgttggatcttttcttgtaagtacaaagagagcttcctcattctttcctgcatttgcaagtaatgcatagtgtgtatgaaccccaacttattaactagtcccccattgatgggcacttagttgtttctagtcttttgctcttataaacattaatgcagggaatgaccttatcataagtcactttgcatgtgtgcaagtatatctgtgggataaatttcctagaagaaggctactcaaccaaggataatttgataattttgtaatgtttaacattttttttttgcattttaacaatttattcttagttacatttaattttaatttttaacagttgtaattttcatatgtaatgccaaatttctctccaaagagtctgtactatttatattcccactagcagggcatgtacatgggtgttttgccaaagcctcgcctacagagtatgtttataaatttcaatatttttgcaatttaataggtgaaaaatgttatctcatgttaactgttaaaattcttttattatctctgaggttgaaatcttttcatatgtttaaaagccatttatatttctttttcctttaactatctgatcatattatttgctcattttttctattactcatggatcttagcagtttctaggacttcatatcactttattaaatcactcgttcattaaatattttagtgcctacctaatgtgctaggtgttgttctaggtattagagatgtgtcagcgagcagtgaacaaaataaataaaaattcccgctctcattctagcctgagagcagatcagggcacctgttcaactgtagggatggccagctgccagtgcaggaggaggcgggcagaggtcagctgctacctccgtaacatgcagctcctctgatatctctgtcccctcatctctaagggaatacttccagggcctgccagaaaacatacagagtacagctcaacttggagattgctggtataatctttacttttttttccagaactacctaataattcattgcaaataatgttattagtcgttttttaaactcagaaagccagcataccttaattaaaatcagatttttgttttctccctaagaggaaaaaatggagtaggatcttttgttttgttttgagacagggtctcactctgtcgcccaggctggagtgtagtggcacgatcttggctcactgcaacctctgcctctcgggttaatgagattctcctgcctcagccacctgagcggctgggattacaggtgcgtgccaccatgcctggctaatttttgtatttttaatagagatggggtttcaccaggttgggcaggctggtctcgaactcttgacctcaggtgatccgcctgcctcggcctcccaaagtgctggaattacagatgggagccactgtgcatggcaggatcttttcttatatgagaattgttttattaggactctgacattcttcttacaaagttacctacttttttccaaaaatctgaaaagatttagggaggagatcaatggaacatgtaatgtgttttctccagtctaaaacttaacagctgcataactaattttaagtacaaatcatgctcttgggttactgagagttactggtatatggttgtgattaaagttaaaactttatttatacctgtatctctaattttctttactgattttcagctttagtctactgaaaataccattacattttaagagaaaaaaaggtgaccaatatattattaagatataagaaaaagcctttttaaattttactgattatgaaatcaatagatgtttcattgtttaaaaataatctagaaaataccaaaaaaaaaggaaaatatatatgaaaaaaatctgtaattcttctgcccagattcagtaactgttaacatttgggtgaattttttatacaatcagaaacatttattgaacaccctctctgccagttcactgctaggaaccaagtagagagtcagacagagatggctcttttttgagcttacaggccagcctagaagaggaccatgaggaacatgtattggcagaggggagaacctaatctgtgggctcagagaaggcttccctggggaagtgacttacctgggacctgagggttgagtgaggctccagtgtggataggaaaggaggagagacaacagcacatttgaacgtgagatcatgagctaagatcatggtgtttgaagaagtgagaaaagtccaagaatgcagagaataagctgttggcaactggagacatgggagtaacattcttaagatctaaactaggggtttctagactttgggattttatagatttttttggatccagcttcccagaagaatatcttgaggtgactattcctgtgcaatttttatggaaatttttgtggaaatttttttatgaagatactctaggagaagctagtaaaggagtagggaaagcatgatgggaaaaatcaagcaaggatgcaatatcatgtgaagtcccagtctgctgggaggcaaagttgctagagagctgggcccttatactcctgcaccagccagacttttaccatgggctggaagggtgggaaagggggactgtcaatcttctaggcacatgtcactccctagatgaagcccaaggtagttctgtgaagaaggttgtaagtgtaaacccttaggagcaaagcaagcccatctgcagggtggcacatagaactgatgagatgggggatgtgcatgtgaatggagttcaggtgggaggagtcagtcacaataaactagtaacataataatcatcataaaaattagggaactcatagacttgtcagattatttactttgctaaattaacatacagtaaaaagacaaacaaaatgccaatgttacctgtcatcaccattatttcataaaagtttatgcatctgttcaaaaaaaattaaccagtgaagagcttggtcaattctgagttaaatgacaaaatcatgttttttggcccacaaagtcgaaaggacaagatcatgacaaatttgtgaaatgattactcaagcaactcagtttataccaagaaatcagcatgatcagaatcttgaataaagatctctttcaatgttataagaacatatatgtgtgataggtgcatactaaatgtgcattctcacatttagtgatggaaaactccgtcatgtactactgtttgggaacccagtgggctacagtgtctattattttaattttatatccctcccttaggagttaacaaacaagaatgtgttggagtagctcaggaatttgcaggaaattgacttcttttagtcccagaacatttaaaatttaaaaccagtcttttcctatttcatgtgattgcatttctttgttcagtaaatgaagtggagaagttacaggtagttctaccagatcttaaagtctcctcatttcttgcctagtaccttattaagagcaaaagaaaaaggcctggcatggtggctcacgcctgtaatcccagcactttgggaggccgaggggggcggataacaaggtcaagcgtttgagaccagcctggccaacatggtgaaaccccgtctctactaaaaacacaaaaattagccaggcgtggtggcgggcacctgtaattccagctattcgggaggctgaggcgggagaatcacttgaaaccagaaggcagaggttgcaggttttatagagtgccctagtcctgtgaataatatcttaatggatgcttatgtaagactcagaaaataggctagctcagggttaccatttggaagagagagacaaggaaacggggaagaagaagatgacaaatagaggtcagattaaagaaaccaattggaataaagttatttgggaatgaaatttaatgatgtggaattttttttcagtgttcaaagcactccaactatataatattgaaattaagaaagcagggagaaaaaaagaggctttcatagaatttgctaccaaatccagttgcttaagtaacgatttcacaaatttgtcatgacctggaccttggtcatgtgggccaagaaacatgagtttgtcatttaactcagaattgaccaagctcttcactggttaattctttttttaagcacatgctagtttattagtttccaattagagatgggctgggaggcagggagtgaatagatagacctgtcagaatacttgttacttttatttctgttttcctattattccttcactttcagctagtgaaatggaacagggttggcaagataactttctttgctggctactagatatacttactggctaggataaattttggttgcaaggaagctttttgtactcatctgcctggcttcaagcctgaatacaggttagaaaacttgctttctttggtttccattaatgaaacatctctcttcctctcatctacccactgcttcctggttgccctggagaaagtttcttagtggtataacaggtcagcagtcatagagtggtttgtttctgagcactggacacatagtagtcatccagtacaatcaacagaaagaacattaaatgggctgtgttagttactatcccagaattgaatgctccagatgcagactgtaagcccagtctcaaagacattccaggctgaattttgcacatgtgatacttgagatttaaaatacttaaagagtacattagagtttgtcagatttgtccagtaaataaatacagtgtatgagaataatattaaacatgtaaatgtactattacaaaagccatgacttaaaggagtttaatcatatcaacactgccctggggctagagaattaaaagagttgagctttctccagaatgtgtgtgtgtgtgtgtgtgtgtgtgtgtgtgtgtgtatgtgtgtgtacccatatgtacatgtgcgtatgtttatgtttgttttcttgttttcactgactagtttttattattctggctttagttttccagaataaaaagaaattctcatattctcttgttgggtaagatagatacctttctcattttaacttagaaatgatacattttagctctattggggaattttaaacaaaaaccttaatgcaggtagcagaaaatctatttgtattggtctcatagttaattcaaataatttttctgtctttttttttcttgttactttttaggttatcaagaaaaataaaagtaaaatatagaaactaatgatttacttggaaatttttaatatttagacatatttttaaatctttctaaaaacagatacaatcctgatattccactttaagtataatttttgcagattctgatatatatgtaactaaataatctttatgcgatatagaagtcagaagcaagaatgatgctaaaataacattaatcctaatatgtttaaacatgctagaaatgttaaggaagtcagtgtaaagcatcatcttaaccctgtctgttttgcatgttctgcaaggtagctagagaggactttttgtagattaatgcattattaaaattgaatatttatgttctaatcaatgtctttatgtttatatttataatttttaatttgatttacattataatgcatttcaaattatacatgaagacctgtattgtgtgcatatttatttattgctaagaacttggcagaggttatttctttattatattttcagtgttcttcttaagcctcccaaaactccccattgaaactaaacaacaaagtaggctggtttagttcacatgtgctgtaaaccagtataggtggttatttcacagggtcttgaggggtccttgtttcttggagatgttcctccagcatcgtctggtgtcaatttgcagtggcgacaaaaaagtaagactaaaatttgaatttcttcatgtattctataatttactctgtgattcttggaaataaggtatccaaaattaggcatacattttctcaccagcattgttttagatgtttcatgcttctgttccctagcacctatatggctagctctgttttgctgcatgtatttacattagagtattcaaatcaattccttcgttaggaacccttgattttagcagttaatctctagggacattcttaggttcaggatggcattccaggtttgcttttctgtcttgtcaccagaagaagatacccagcctgcttctctttcctcattaaacctgccacagcctgccctattctttggaactctttccctgccttgcaagattggttatagggtgtaactaatttatccattgctactttaatgttgcctctgaatacaaatactcacaggctgtttatgtttgatggattttattcctacatttcaggagagaatcagcaaaaataacaagtatgggattttaaaggttctagaaactgtaataaaagtccctactgctaaagttccctattctgtggttcctgattcccttcgtgatatgtttattagaattcctttggagtttgcttttattcctgaaggtagaaattgccatacttccctctccattcttccaagattgtggctgtatgcttttcttggtcccttctgggcctaaaaacagtaggagtacctatatgttgatggcttctataattttggctctgatttctcccttgagtttcacattttttttttctttcagtttcttctatgcgttgccattatcagtttttacttagatctcagtaggtcattgggccagggaaataaacgaacaatttattggtggaaaaaaatctcatatgattaatgaatatataaaaaaattaagtgccattagtaatcagtgaattacaaattacatcataaggagatatggctcactatgaaactagagattatttttaatgctttcagtgatcattcttatgtactattggcataagcttttttgaaagcaatttgtagtgtgtattgagagacttaaaaatattcttattctttgatgtaaaatctttattaaaaaattttactagcaaaagtaaataattaggaatagagaaaaggtgataattgaagtatttttaaatgtttctaattttctctttattagaaataatattagagaaatagttaactgacatatgagtatattaagtacctgatgatgctattattatgaagaatctttaaataattttggaaaatagttttataagaagacttatctggagatggaatataagttaggccttgaagaatagatatgcagataatagtaggttgggcatttcatggggaggaagataacacgagcaaagacataaaggtggaaataagtttattgcatggaaaataatgattaatctggctgggaagcaggagttcatttggaggaataggagaatgttattccccttttatgtctttagatatttgctagatactaaggatataaggatagcttaaatatagcaaaaatggaaattcaggagaagggcatatacaagaaacagtttcttgaaaaatttgatgaaacaatgatttgataaaataaagagaaaaagataatatgaaagttttgcatttatatgaggctagtgacagaaatggaaaagctgaagcaggagacctttgtgaagcaaaatgatcagtttagtttccgcagttggtttaagccatgcacacagggagcttcatctttgtgtgttttattctttgggtttacttatcttgtaaactgtaatgttgttcagatacctctaactacatgttccagtttttaaactgatcaatgtgaaatctgtaaaaaaggactgtttggggacttataaaaataaattaataaggtctgtggcatttggttttttaaagttttttatatcttgggaacaatacttatattggattctatttattttgatgactttgtttcacactgtgacatattgggcatgggtctataaccttaagggaccagtagatctcattctaaactgtattatagggaagtttctttttttggcagatgggagattctttggtcagagagacctacgaaggtgaatgcttcccaagctcgccagtttaaaccttgtattaagcagataaatttccccacaaatcttatacgactggaagtaaatagttctcttctggaatattacactgaattagatgcagttgtgctacatggtgtgaaggacaagccagtgctttctctcaagacttcacttattgacatgaatgatatagaagatgatgcctatgcagaaaaggatggttgtggaatggacagtcttaacaaaaagtttagcagtgctgtcctcggggaagggccaaataatgggtattttgataaactaccttatgaggtaagccaaaaatatttagcagcagtattggatataacactatagatttttaatctttagatattaatgtttactgagcatcggtaattgagcattggtaagttatatataatttgatgtgttgtatattttgattttggaaaaactagacaaaatcatgttttaactaatttcactgcttttgttttggtttggcattagtgtttctgggtaaactattaagtatatattttcatattgctaattaataataaccaaatacaaaaaccagtaataagtaacaatccactttaattcatattacactttaactgtgggcaatacatgcttaactttttattagttatgttaaagatgatttgctattaaaaataagaatattaataagattgtgagatgaatgcttattctgtttaatctgtagtttctctaagtgtcattttttttctatactaactctattctatattctcctaactgtaatttttggtctaggcaggtagtgctattaccttggaattattaatactttttttttttttttagtttttttttaattatactttaagttttagggtacatgtgcacaatgtgcaggttagttacatatgtatacatgtgccatgctggtgtgctgcacccatcaactcgtcatttagcattaggtatatctcctaatgctatccctccccactcgccccaccccacaacagtccccagagcgtgatgttccccttcctgtgtccatgtgttctcattgttcaattcccacctatgagtgagaacatgcggtgtttggtttttttgtccttgtgatagtttactgagaatgatgatttccaatttcatccatgtccctacaaaggacatgaactcatcattttttatggctgcatagtattccatggtgtatatgtgccacattttcttaatccagtctatcattgttggacatttgggttggttccaagtctttgctattgtgaatagtgcctcaataaacatacgtgtgcatgtgtctttctagcagcatgatttattgtcctttgggtatatacccagtaatgggatggctgggtcaaatggtatttctacttgtagatccctgaggaatcgccacactgacttccacaatggttgaactagtttacagtcccaccaacagtgtaaaagtgttcctatttctccacatcctctccagcacctgttgtttcctgactttttaatgattgccattctaactggtgtgagatggtatctcattgtggttttgatttgcgtttctctgatggccagtgatgatgagcattttttcatgtgtcttttggctgcataaatgtcttcttttgagaagtgtctgttcatatccttcacccactttttgatggggttgtttttttcttgtcaatttgtttgagttcattgtagattctggatattagcccttagtcagatgagtaggttgcaaaaattttctcccattttgtaggttgcctgttcactctgatggtagtttcttttgctgtgcagaagctctttagtttaattagatcccatttgtcaattttggcttttgttgccattgcttttggtgttttagacatgaagtcctttcccatgtctatgtcctgaatggtaatgcctaggttttcttctaaggtttttatggttttaggtctaacgtttatgtctttaatccatcttgaattaatttttgaataaggtgtaaggaagggatccagtttcagctttctacatatggctagccagttttcccagcaccatttattaaatagggaatcctttccccattgcttgtttttctcaggtttgtcaaagatcagatagttgtagatatgtggcgttatttctgagggctctgttctgttccattgatctatatctctgttttggtaccagtaccatgctgttttggttactgtagccttgtagtatagtttgaagtcaggtagcatgatgcctccagctttgttcttttggcttaggattgacttggtgatgtgggctcttttttgtttccatatgaactttaaagtagttttttccaattctgtgaagaaattcattggtagcttgatggggatggcattgaatctataaattaccttgggcagtatggccattttcacgatattgattcttcctacccataagcatggaatgttcttccatttgtttgtatcctcttttatttccttgagcagtggtttgtagttctccttgaataggtccttcacgtcccttgtaagttggattcctaggtattttattctctttgaagcaattgtgaatgggagttcaatcatgatttggctctctgtttgtctgttattggtgtataagaatgcttgtgatttttgtacactgattttgtatcctgagactttgctgaagttgcttatcagcttaaggagatttggggctgagacaatggggttttctagatatacaatcatgttgtgtgcaaacagggacaatttgacttcctcttttcctaattgaataccctttatttccttctcctgcctaattgccctggccagaacttccaacactatgttgaataggagtggtgagagagggcattcctgtcttgtgccagttttcaaagggaatgcttccagtttttgcgcattcagtatgatataggctgtgggtttgtcatagatagctcttatgattttgagatatgtcccatcaatacctaatttattgagagtttttagcatgaagcgttgttgaattttgtcaaaggccttttctgcatctattgagataatcatgtggtttttgtctttggttctgtttatatgctggattacatttattgatttgcgtatattgaaccagccttgcatcccagaggtgaagcccacttgatcatggtggataagctttttgatgtgctgctggattcggtttgccagtattttattgaggatttttttgcatcaatgttcatcaaggatattggtctaaaactctcttttttggttgtgtctctgcccagctttggtatcaggatgatgctggcctcataaaatgagttagggaggattccctctttttctattgattggagtagtttcagaaggaatggtaccagttcctccttgtacctctgataaaattcggctgtgaatccatgtggtcctggactctttttggttggtaagctgttgattattgccacaatttcagatcctgttattggtctattcagagattcaacttcttcctggtttagccttgggagagtgtatgagtcgaggaatttatccatttcttctatattttctagtttatttgcatagagatgtgtgtagtattctctgatggtagtttgtatttctgtgggatcggtggtgatatcccctttatcattttttattgagtccgtttgattcttctctttttctttattagtcttgtagcggtttatcaattttgttgatcctttcaaaaaaccagcttctggattcattaattttttgaagggtttttttatgtctctatttccttcagttctgctctgattttagttatgtcttgccttctgctatcttttgaatgtgtttgctcttgcttttctagttcttttaattgtgatgttagggtgtcaattttagatctttcctgctttctcttgtgggcatgtagtgctataaatttccctctacacactgctttgaatgcatcccagagattctggtatgttgtgtctttgttcttattggtttcaaagaacatctttatttctgccttcatttcgttatgtacccagtagtcattcaggagcaggttgttcagtttccatgtagttgagcggttttgagtgagtttcttaatcctgagttctagtttgattgcactgtggtctgagagacagttctgttcttttacatttgctgtggagtggtttacttccaactatgtggtcaattttggaataggtgtggtgtggtgctgaaaaaaatgtatattctgttgatttggggtggagagttctgtagatgtctattaggtccgcttgatgccgagctgagttcaatttctgggtatccttgttaactttctgtctcgttgatctgtctaatgttgacagtggggtgttaaagtctcccattattattgtgtgggagtctaagtctcttttaggtcactgaggacttgctttatgaatctgggtgctcctgtattggatgcatatatatttaggacagttagctcttcttgttgaattgatccctttaccattgtgtaatggccttctttgtctcttttgatctttgttggtttaaagtctgttttatcagagactaggattgcaacccctgcctttttttgttttccatttgcttggtagatcttcctccatccttttattttgagcctatgtgtgtctctgcacgtgagatgggtttcctgaatacagcacactgatgggtcttgactctttatccaatttgccagtctgtgtcttttaattggagcatttagtccatttatatttaaagttaatattgttaggtgtgaatttgatcctgtcattatgatgttagctggttatgttgctcgttagttgatgcagtttcttcctattctcgatggtctttacattttggcgtgattttgcagcagctggtaccggttgtgcctttccatgtttagtgcttccttcaggagctcttttagggcaggcctggtggtgacaaaatctctcagcatttgcttgtccgtgaagtattttatttctccttcacttatgaagcttagtttggctggatataaaattttgggttgaaaattattttctttaagaatgttgaatattggcccccactctcttctggcttgtagagtttctgccgagaggtcagcagttagtctgatgggcttcccttggtgggtaacccgacctttctctctggctgcccttaacattttttccttcatttcaactttggtgaatctgacaattatgtgtcttggagttgctcttcttgaggaatatatttgtggcgttctctgtatctcctgaatctgaatgttggcctgccttgctagattggggaagttctcctggataatatcctgcagagtgttttccaacttggttccattctccctgtcactttcaggtacgccaatcagacatagatttggtcttttcacatagtcccatatttcttggaggctttgtccgtttctttttattcttttttctctaaacatcccttctcgcttcatttcattcatttcatcttccatcactgataacctttcttccagttgattgcatgggctcctgaggcttgtgcattcttcacgtagttcttgagccttggctttcagctccatcagctcctttaagcacttctctgtattggttattctagttatacatttgtctaaatttttttcaaagtttttaacttctttgcctttggtttgaatttcctcctgtagctcggagtagtttgatcgtctgaaaccttcttctctcaagtcgtcaaagtcattctccgtccagctttgttccattgccggtgaggaactgcgttcctttggaggagaggcgctctgctttttagagtttccagtttttctgctctgtttttcccccatctttgtggttttatctacttttggtctttgatgatggtgatgtacagatgggtttttggtggatggcctttctgtttgttagttttccttctaacagacaggaccctcagctgcaggtctgttggagtttgctagaggtccactctggaccctgtttgcctgggtgtcagcagcagtgtctgcagaaccgcagattttcgtgatccgcgaatgctgctgtctgatcatttctctggaagttttgtctcagaggagtacccggccgtgtgaggtgtcagtctgcccctactggagggtgcctcccagttaggctgcttgggggtcaggggtcagggacccacttgaggaggcagtctgcccgttctcagatctccagctgcgtgctgggagaaccactgctctcctcaaaggtgtcagacagggacatttaagtctgcagaggttactgctgtctttttgtttgtctgtgccctgcccccagaggtggagcctacagaggcaggtaggcctccttgagttgtggtgggctccacccagtttgagcttcccggctgctttgtttacctaagtgagcctgggcaatggcaggcgcccctcccccatccaggctgccaccttgcagtttgatctcagactgctgtcctagcaatcagcgagactccgtgggcgtaggaccctccgagccaggtgcgggatataatctcctggtgcgccgtttcctaaggccttcggaaaagcgcagtatttgggtgggagtggcccgattttctaggtgccgtctgtcacccctttccttgaccaggaaagggaactccctgatcccttgtgcttcccaagtgaggcaatgcctcgccctgcttcggctggcgcacggtgcgctgcacccactgtcctgcgcccactatctggcactccctggtgagatgaacccggtacctcagatggaaatgcagaaatcacccgtctaatgcgttgctcacgctgggacctatagactcgagctgttcctattcggccatcttggctcctccccccacaatactttttttttttcttttttttttcgagatggagtctcgctctgttgcccaggctggagtgcagtggtgccatctcggctcactgcaagctccgcctcctgggttcatgccattctcctgcctcagcctcccgagtagctgggactacaggtgcctgccaccatgcctggctaactttttttttgtatttttagtagagacagggtttcactgtgttagccagtattgtctcgatctcctgacctcgtgatccactcaccttggcctcccagagtgctgggattatgggcgtgagccaccgtgcccggcctggaattattaatacttttttgtttgtctagtctgaagtcctgttttcagtgtgtccctactggggtgtttctgaggtattttagcatcccaggctcccagatgtcaaatgctagtagcattctagggctgtgtgacatgaaaacctctccccaccagtttcgaaatattcctaggggtgagagtagggccaagcatttctgtctcccactgaaaactactgtgtggttaaaaatgtatatcagttttctttttaaggaaactttatagactcaaattttaaccaacttagatatcccttttccaaattgatgtgtatttcagatttcatggaaataacacaaatagcttaactttcatgaaacagtaagatagccttttgaatgtcttagagtaatagtaactataatgcctctccaacatattacagttaaaatgccatggcacatcctgtgaagtagctaaagttgccacataaaggtgaatttaagtgtccaagttaatttggtctttaagccatgggaccaggatcccacccagacctcatgtgatggaaagggagcttcacagattggacaaaactggcctttactgggaggagggaggaaagatgaaggaaaagctgggtttggggagagagaggagcatgagatactgacagtgttgctcctcagggctctgcggtgggtctgttgttgcagcagtgggagcaattcatctggaggagagtgaatcgctgctttgattcttacccacttgcaaaaactgtaaaatagaaatataatttcagcaaatacattttaaacagtttattgaattttatccagacctgataaaatgcttgacccatagaatttgaatgaaggccagaagacacttgaggcaaagggaagagaaggtacaaagatgagaagtgaaactgtgtgacttgtttggaaactccagtatttcagtgtgaccaaagcataggatttgataggggaggctgcaggagatggaattggatggaggctcagggctgcctcagtgcacagctccatgcacatagatgacagtgattgggactccctgtctttggcagtgtggagtctattctgctgcgtcatagaggtctgtttgggtttcaccaagagatttgcattttatcccttcagccagtgatcttcagggtggtccagtatacagccaaattagtcaaggggagtcacagatactttagactttgcagataatttacttttgctaaaaaattagaacatgccctagagtaggaaaatacaataaagtaaaaatatcggttttccttaatcagtgtattcaatgaagtcccaattaaaatgcaaacagaattttttaaaattgaaaagtttgcctaaaaatatgaaaatactcaggaacattctggaaaagaagtgtgatagaggagtattagtcctgattctcatttgcagtcaaacaatccatgacattccaacacatatgctttaaaaaacttagttattttacttggaggactattgatatgggagaaatagcatatagataaatggaacagaatagagtccaggaacaggtcaagaggatagtgggaaatgtatcgacaactcccctgggaaagtgttatgtttctgttgttaaaaaaaaaaagaaacacaaataaaaacagttttatatcttttcttccttttttgtctttcagaataaaaacgttttgataccaatgttgtctaggatataagcaaaagggtactttcatacaatttttatggatatataaattgatgggaacattgtgaatggcaattctccacttgcatcaaaacttctaaatgcatgtaatttactataaggatatattttcaaagtttgccaagatgaacatacatgcataatacatacacacaatgatattgcagtattatttgcaataggaaaaaaagcaggacatacatcaatgaggaactagttgaattatgtcacttctatgaaacggaaggaggtgggtctgtatgtgcagatatagaaagatctataagatatatcattaaatgagaaaagcaagttgctgaatggtgtatatagtatcattcttttagtgcaaattcaagaacagaatttcatacacatttatttggaagagatcagaaaaacaatgattatctttggggagagggatggttagaactgagtgtagagaggaagaaacttcttattttagacctttctttaatgtttgggtttactttttacttgaaatttttgatttttgtttgtgtaatattttacacatcaacaggtgtatctggatgatgagatttgttaaagaaaaattattcaatcgttctaggtatagggaccactacaatgggattttgcaatgtctgagagagattgggttcaacagcatgggcaagtgggaattaatagccaaggagcagattagaaagtcagtaaattactaagaaaattactaagaaacatcaggagtaagggagattctggctacaccctctttaaacttattttaaagatcatgttgttgttactctgcgttttgtgatattttggcttaaaacagtgaaaatctgacctgaaattaatactgagcctagataacaaaataaattgaagaagagcatttaggttaattgcaaaacaaaaagtttagctagataaatacattaaattaaaaaaaaccctctctcatctaaataagatttttaacatttagcaaatatttaatatcttttcctttatatttgttagttcagaataggctatttaagcagttctttgaaactagaagcccccaactgtttagaaaaaataaaccttggactagttcaagaagataattttaattagagataacaatctcttgaattctgccttcttaataattcttgtatctgtttgctactccatcatcactgccagctgccttaagcagaccccttatttcctatttcctagaattctgtattagccccatggctggtttctcttcctgcctccttgctcccagtagcacgcccacaatgatctttctgaaacacaaatgtgaacatgtcactctagtttaaaacccctagtttaaaacccttcaggactcctcattgctttcaggataaatccaagctcctctgtgaggctttcataacacagtctttgccactagactctcttttcacctggtttgcccctgactctttgaagctgaatgttccagcaaaaaactatcatcagagtgaacaggcaacctacagaatgggagaaaatttttgcgatctatccatctgacaaagggctaatatccagaatctacaaagaagttaaacaaatttacaagaaagaaacaaccccatcaaaaagtgggcaaagaatatgcacagacactgctcaaaagaagacatttatgcagccaacaaacataagaaaaaatgttcatcatcactggtcattagagaaatgcaaatcaaaatcacaatgagataccatctcatgccagttagaatggtgatcattaaaaagtcaggaaacaacagatgctggagagaatgtggagaaataggaatgtctttacactgttggtgggagtgtaaattagtcaaccattgtggaagacagtgtggtgattcctcagggatctagaactagaaataccatttgacccagcaatcccattactgggtatataccccaaggattataaatcattctactataaggacatatgcacatgtatgtttattgtggcactattcacagtagcaaagacttggaaccaacccaaatatccatcagtgatagactggataaagaaaatgtggcacatatgtaccatggaatactatgcagccataaaaaaggatgagttcatgtcctttgcagggacatggatgaagctggaaaccatcattctcagcaaactaacacaggaacagacaaccaagcaccgcatgttctcactcataagtgggagctgaacaatgagaacacctggacacaggcaggggaacacactggggcctgttggggggtggtggggctaggggagggataacattaggagaaatacctaatgtaggtgacgggttgatgggtgcagcaaaacaccatggcacttgtatacctatgtaacacacctgcatgttctgcacatgtaccccagaacttaaaagtgtttttttttttttttttaaagctgagtgttcctggcacaggtacactgtacactttcactttggagctaggtctgctaggctttagtagcattctgtgtatctttttgtcaaagctattaaaacgtatcattgtccttaccaatccccactggactgtaagcactctgagaatgggcactctttcttttctgtcgccagtgtctggcacgtagtagctgttcagtaatgctgagtatgacaaattgtattagtcaatagattaccaaagtgtatctttgcacctaagaaaatgagtaggcaatgtgaggtgagtatactttgaataatcttgaaatgcactacagtcaaatgcacgtatgatttcttttatttggataattctgttggatgtttatttactatgtgaaaatattgttataaaatgtatgacacttttattccttattagattatgttatatgtttcatagaatgatactgcttttcactcttgatgatcttggtttctctgtcttatttagcttattcagctgattctgaatcatcttacactaccagacctgtgtagattagcacagacttgcaaactactgagccagcattgctgtgatcctctgcaatacatccacctcaatctgcaaccatactgggcaaaactagatgacacttctctggaatttctacagtctcgctgcactcttgtccagtggcttaatttatcttggactggcaatagaggcttcatctctgttgcaggatttagcaggttagtacaaagccttgatgaagtttttttcccccccagcagcaggttatacttattatgtagtggttttcataataaaagtttgaaattatgtaacatgtacttacaaaaataaaaaggaaatatattttgagtgtcatgtttagaatgctgctgcttataaaaaaataagtgttttactatcctcttcagctaaattttatatgaatatgaagggaaactataccctttacttcatgtttcttaaatcccaagtaactttcagcagagctcctgtttcttctttttcatatttgcagcacagatgattaacacattttaaaaactatttccaaatcaaaatctacctctctaatgtgatttgtcagaaatggaaaacaatttattatagaacatttttaattaaatcttaattacatgtgcaatacatcacccagatttagaagctcatttaaactaattatgttgaaaatgcagttgcatgctaaatagacgaccacacttgcagacctgcccaggtgtttccgctcctttctatttaagcatttagtttccttactattaaatgtcacctgttaagcatttgaaagcttgcacaagtgcatattcatttagtaatgccatagtaattttttcttaggatacaaacaggtgtttttctcctaaccttgatcatggtttttctcattgtatgttacatataatcccagcattttcatgaagttaaataatgaagaagtagaaactttagagaaattttctgttatttttaattaatgaatactcttgtattctatttttaaaaatgaaaagtgaactgtagcaatccctacacatatccccagtgtacattctacaacagtggtttatgaattagaaattcgtatgtggagccttgtttcctcaacttagattataaaaataaagatgcagttccagaaataaagatttgatattgttagacttaaatgaagtaatgatgtttgaaatagtaacaatgtgttccaaatactgagcttgatagtttatgcatcaaagtgaaaaataaaccaagtagtaatggctagtagcacatgttgaaaccatggatgcactgagtttcttttctgccagaaattgaaccaggagaaggggttcattgctagatatttggcagctgtccagtgaaacacagtttagtcctttctacttccctttgccccaaacacacatatttcaaattcttttctctgctaataggaccaagaaagaactgaagctaatgaagtctgtgaatatttagagtatacattatcataaaccaagactaactgaatatgaaaacagaacaagtggtgtcagtaagcattattttacattatgtagaccattagggtattttaattaccctcatagctctttcccaatgttttccattattaagaatttattaaacgtttgttttcaccctttgtgtgcaaggcattgtagtgggtgttgatcatatacagagacatgagatatataatatagttcctgccttcaggctacagagaagataaagatattaagataaacatataaacatatcccttatttttataaacagagtaacagggtagtaactaatgtgtagacattaaagaaaatattagtcgtgaatggctgaagtccagctgtactggcaaagtgctgcatatgactgtgataataacgagtaaaatataaagctaatattaatcaattttaaaaactttatgcagcttctggcgcttgagaagaaacatcacttataagaagaaaacttagccatgccatttaaaaaatttttatactagtaatggataaagatcttttgcaaagttagagtttctatctactttctaacccacaatttatcttccattttcaattcacccagggtagttgctgtagagcagtttgaataatcagaaaaagccatatataaatttaagttctcatattttactgtagtatttcagccagtaaaatcataaatcttgatggcattcctttaagtgtagtcactattcccattaagaaaagaaaaagttgaggtaagagggagagagaaccttttcttgtgcggggcatattggagttttgcctactgattactgttggcccccatgacttgactgctgaattgatagttattatggcttgtaggcagcattcccagaataaacaataaatatgcatggcttgattattaatgaataatctttgaataagtatggtctatttatgctcattactatgaagaagacttatttgtaatactttaaagaagaaaagcacatttaaaaactagagaccaatgttgatgagctgctttttgaacaaatctttgggaaaaagttggatgcagtttatttttgttgcttaaaagccttatctcacaagttagaactgtttaactagattttaaataactttttaagaattgttattattcagaatagtggagaaataggttgcattggaataaagagaacttaaaacttttaatcagttattaaaatcctattctagctacagatttgtgatttattactttgagtactgttcatgcatatcattactcattaaaatcacatctattataattccacttttctagtatggttccccaaagtcttagatgttcctttccctgcctgcctgtttgtgctttggaacttaattgtatcattctgttcaaaaagccttaggttcattttttccctaccatttttcttcaaatatttgctgaatggccttgatctccccctcagttatgtgtaggtttttactctaaactcctcttacttgttctcggtagtttatattcattcctttaggaaacattcttggatgcgttctagattcgagaactttattaggtattttgacatagagctaaagttttatggtataaagagcttatttcccactaatatatttattcagttgcctgcctatattttatacagttgtgtcttagattgtcaactctagaaagtagagaccattttaaggtgttcttttcccttctttctatcattgttggatagtacccatatacagttaagcaggaagttttgtttttaatggctttattttggatcagctatattaaataatgttccaagttatttgggattaaaattatcttgaatatattgttttagaaaactcggtgagggtcagctaaaaaaacatgagattaggaatttagaagtcatagatatttatatctaattcttctcttttatacttcaggcaatttctgaggactattaccttttattttgtgataagtaaactcaagtcattcacgtgatcttaattattttaggatgcaagttaccatttagtaaattgcttcttatgtacttgtattattttggacaaattaatcacctcataatgataagcaatttacttttctctccagagattccttttctcatagcaggagacttagtctgggattgtttatctgacttaggtcctctcataaaaccttcagtataaaaaaatactttgtgagcattcacaatgtagaatgaattgactgcaggaagtaaacaagctgagttctcctttcaaatgatcagtggcacagttgagatgaaaaaatacatatatgtaattatgcattaaagtaaaacctgcatgagaagcattaaggaaagaagtaagagctgtgttcagctaattgagtctgctactgtctctgccctcttgggatgtagatatgaaaaggtaggtagtatacattttgaaaatttaagtagagataatatgaggatattaaataatctgctcagagtaaaaatatgcaatatgggattcttgagagagagaaagaaagtcagaaaggtagtataggtatagactttatcttattttgctttcaaattccatcattcattaaatcaagttgggaagtttcctattgtctcctaacagtttgctttctggtataaagccagagtctttatagtgacacacactacgtcaactgtccctcatctctgatctactcatctcgccatcattttgcgcctcctgcatcccccgtctcactgttcttcactctgcttgttatcctgccctggactgcccttccctttgcctagaatgctcttcctccagatacctgctttgctcaccctctcgcttccttcagggttttactcaccacatctctgaagcttctctgactactctgtccatccttgacactttctattgcccttccctgcttttatttcctcctgggcacttttcacaaatttgcgacttactttactcatttggttatcatctccttctctcttcaaaacattagtaagcttcatgagagcagggattttgttttgtccactgctatctccccagtgcctagactattgcctggatgatagtagaagctcagggcatatttgttgaatgaatgaatgaatgtgcttcatgtagactgcagtttagctaatacagctagcaaaggaagcagcagtgagaggggttggaggagatccaagagagggagttatgtgaggagtgtcagagttttaaggaaggagtgtgcagttgtatgaaatgtcacaaatcaaataatacaagtttgaatttagaataaacgggtgttcacgtgtaaataagatgtgcaggctactgggttatttacaatatttaaatttgcagcaactgaatttttttattgtttaaatgtgaattggccaagatttaacttatacttaatgtttatggggtgctttgacctttaaaaactgcatttgcgtagtatttcagcttcaatcccacgaggcagtgtggtgaatgttgttacatacttcaagtctgcgtttacagctgaggaaatgctaagacttgagtagatgccttttccaaggtctctgctaggaactagtcaaacaatgcaaaaaactccatcttttaaccagtgttactttcttttatttacacaactaatctgatttagtcaattttactttgtatgtgtatttgtaagctcattaaatcatttaggaataaagatgtggcataaattgactaacagtatattactgatgtgacactggtgggaagatttatgtcaagagacctggacaggcataattggtacactgttaagagggttcagtttgcttagttgataaagtttcatggattcaaatactcctagattcatgtttacttttagattgttttcaggggatgatcatagacaggactatttttcccccaactataacataactgacataaatattgtggtaactactctgataaagcattttgtgaccttcatcttggtttatttctatatattttatgtaaagctgcaattgaatattttcaatatcaagcaatctagctgctaaatagtaacagctgcaagtaccataacagtgctgtagttaaacccacatagacattttctgagctgagaggagcctagtctgatttgttttgaggttatttaaataagttgttactttcgtgtgcagtgttcaaaatatattatccagtacttgatgggtactgttgagggggaaatatctcccaagagtttagagttttgttatgttttgctgtttttttttgtttttgttttttggctttaccaactcagatgtgaattataggtaagtgggaaaaatatatcttctactttcttaattttccacttagcattagctgactttttatatgatgtgaattcattttgttctctcaagttgatttttttagcctaaccattcatatttcagtatgcagtgaataagaatttaagcaaaacaaattttacattttccctaatagaaatctattctttcaaatgtatctacttagagttgctaaaattccaaagttcttgcaaaaatatcttttagttttataaaattcacatagaatgttgttttggcaggtttctgaaggtttgtggatccgaattagtacgccttgaattgtcttgcagccactttcttaatgaaacttgcttagaagttatttctgagatgtgtccaaatctacaggccttaaatctctcctcctgtgataagctaccacctcaagctttcaaccacattgccaagttatgcagccttaaacgacttgttctctatcgaacaaaagtagaggtgagagtaattcataattttcatcattgctattatggtagccaactgaagatttggttttctgtaattgctcataataatgtgttttttatttttaaatcaagtttatgatgccttctgactactctgaaatcaatagagctgattcagtcattgtgaagttatttcaaacctaatatgcttttaaattataaggaaatgttcttctctatgctcttaaaatttttgtgatgctatttatgtccccaggaaaaaaaataagcgttggttgaggtaagccaaaatgctggcagggaatgaattagagaaaggtaggaggatagtatgtaagaggacatttgcttgcagtgggaggaagcaaagtgatatttatcctggaccagacttgggggttaaaatttgtaataccatagttaatgagtctcatttaaaaaggaatcatgtcatatatattagtctacttgctttttcactaatatctctaggacatgtttccagggtcagtgcatatattatctaactcttttactgtaatagtgtatgttataccataatctatttaacattctccaaatgatcaacatttagtttttccagttgttttccttttacaaactacctagcactaacattcttctgtgcatagttttttttttcttttttgagacggagtctcactctgttgcccaggctggagtgcaatggcatggtctcagctcactgaaacctccgcctgaccagttcaagcgattctcctgcctcagcctcctgagtatctgggattacaggcacgtgccaccatgcccagctaatttttgtatttttagtagagacggggtttcaccatgagcctgtgcatggttttacacatacttactattactgctgttggatagagtcctagaggtggtattgctaggttaaagagtatgtacctgggcccctgtagtacatactgtttgtcatatactttttccctctgctgcatgcatattggccttctttctattccttgaatgttctgacctggtcccagctcagggcttttgtttttttgcctgtctggaatgtttgtctagctcattatggctgcccttttttcagctcagtgttcaacttgcatatttttttagagatggcttcctggatactgtagcaccccttctagtttgtttccttcatatcatcaagtttcatttcctttttaacatccttgtcactctctgaaatgatacttgttttcttgcttattttctgtcttctcacattaggatataatggtagaagccttgttggtctttttcattgccatatttccagaatctagaatagtacttggtaaagattggccattcagtaaatatttgttaagtaaatgaataaagataaccaaattacttttccaaaatgatataccagtgacttgggagactggattagttctggtgggaatggtttggttcccaagagagcaggtggttgtaaagcaaggatgccttttgtgtttggcctctttgtactgtctgcctcccctttgatcttctgccatgttaagacacagcaggaaagcccttaccagaagccgagcagatgacagtgccatgccccttgaaattcccagcctccatacctgtgagctaaataaactctttttctttatcagctacccaccctcaggtattttgttatagcaacaccgaatgaattaagatggcattattctcaattttgggcaaaatatttagctaggcttcaacaggtgacctggcagggtggaaagaagactttgattctagttctagccctgccagcaataagcttggtaatctaggtgaagacattgtctcagatttccagattttttatttgtaaaatgaaataattattgtccctgaatgccagatgatattagcctgtgttttcattggtctgtggtgaaatgactccccatttgtgtgggtataaaattgctagctatcttttcttgggtaggactgttcattctgaaattatgccatacctgctttttactggcacatttactattttatgggcctaagtactataaacgaaatcctctgagcaaggaggatttaaatgcctcatttaaaattttctgattgtttaataagaaatatagcaggcataattattaaatgtagttattaaatgagcctttgagaagaaaaatagggtaaaaaccaaaaaaatattaacttgctaggcatcttatatctattgtggcttgtgaaaatatatcccatgagatgtttttgaaatgttgtatagtaatgtgatctaagtgtcagagaattattagtctacagttttcttaaatttgtttcagactgatagatatgaccaaattttttaagtgtgatttatgaggattaagaagatttcatatctgaagagtggaaatttatacatatgtacctaggtctagatagcataagctctggtttccctcagttacttaaatacagatgtaaaatcattgtatgaatatattaaataaaatttaggttgtaccctctgttacttcctattaaattttttttattggctcatctggtaaaatatcataaacactacgtaatttttctgacattgaatatgtagaaaaaaattataaaactgagttttcagtgatctatggttgacttaaaattaaagatgctgttattttagtgatataaatggcaaatgtgaaatttagaaaatcttacccaggcagtgtttacttttaatgcctccgaactcattgctttctacctatacttcactctcttattgtctcctcattcttgggatctgtatcagagtcccacatgggcactaagtaaattagaaaaaggagagttggcaaaataatcagctgatttctttaaaaacaaacagaagctacagcactagtattcatggcaatctgtaaacacctccattgtcacttaagcaaagcgttatgtcacctccttcttcctttgatacacacactccttttaccttgcacctaatgatggtgtatgagagcaaacagagaatgagaagacaaggtgtaggagactggtctctctttaaatgttccacaaaatcactggcagtatattctcattctagactctgttttgaagaaggagcagtaattgatttcaaatgcctctgcttgctctaaggacatacgtgaaaagaaaaagaagataataattttagttttcttggagaggttattttgttttaaaagggctacaaattatctggtaccactttaaccctgttttcctgaaccctacaaaattctaaaataagcaaaaattagtattaaaaatatggattgtattatagcatattaacttcacagagaccagtttatgatacaatactgttacattttatgtgcctttacataatttgcattaataaatatagtatatttatgccattttacaagacttagacaagtccgtatgcataatgcataaagcttttgaggattttgaagacctggatttttagtcccaaagtttgggaaaaagctactgaatatattctgttggctgtcctagatattttgcattattatttctttacaccagtctgaatagggttggtggtattctcatctttacacataattaaattaaggtctcaaaagattaataaattgcctgctggcacaagcaatagagtcaggatttgaactcaggtcttgtggccttggtgttgtagttaaaattataacatatataaaagcatagaatagtagttattctgatagcttggctatttacctaaaacaaggattttctttactacttactatttctaatttgtagttggtaaggagatacaacatagtaactaacatatacaacattataatccatgataaaatacagactattatgtttatgttttataaatatcttctgcaggaaaacggattttttgtctttttactatgaacaagcttagtttgaagtcttagttgttctgaatttataaatcacaatttgttattcaaattacatttagaaacatttaagtgaaagtttgtagaatcaatacataattaactgctttaagtaagtagtttatataggcctactctcaattttatactgtaatggagagcagcattgagacagataatcctcaaaataattttgacatgtaaaatgatgtgttgttgatagctaggtgatgtattcttaagtcgttagccatagccaggcatgcagcaggcctgatgactcagtaagaatgagacctcaggagaatagaactgtggcagggtcagaattgtcttgtatgctgatgtgggtccctccctgcatcagtggttgttcagaatttttagccttataagatagtaaaatatagttcaacttggtttcttaatttatttcatgagatctttttctttctttagatgtgtttaggattacaatgaaaaatgacttcatcagagaaataacaaatgtcttataaatttagcaaagaaaattcactaactaagctatgtgcagagtcagtggcatatatttgttgaatttcattagactcagagcattaaatacatgcttagtaaagaacaacatactattacatcaataaaagacagaatggacgggtatacagtaagcccaaatatatgctcgcattgtcacaggcttgtccttagttggagggtgatctgtgttgggaaacctttttagaagaaattactcttgagctgagatttatgccctgtttagtgtgtaatcccagaattactagtgaaatgggttggtaaatagggtaattttttttcctcctgaatttggtggatcttttagagttgaatagacagcactttctgcaacagatggggatttagacagggaggacactttagttgtgcttagtttcttctaccatccgtggcatggaaataattaggtattataatgatttaaaggacttaagttcagtctttttggttcttttcttttcataagattcttattaggtacgataaagcattgattgcaagtacttctttaaccatacatgatgatgtattttcgtgaaagtagagctgtaaaaatctagcccattcagctgggctcaggggctcatgcctgtaatcccagcactttgggaggctgaggcagaaggatcacttgagatcaggagttcaagaccagcctaagcaacatagcaagaccccatctctacagaaaatttaaaaaattagctggacatgcccctgtagtcccactcaggagactgaggtgggaggatcacttgagcccaggaggtcgaggctacagtgagctgtgattgtgccactgcactccagcctgagtgacagagcaagaccctgtctcaaaaataaaataaatctgactcattaaattgatttttaaatacttgaaaaaaacttttattttgaaataatttccgacttacagagaaattgaaaaaaaaaatgatttcttatgtattttcacccaggttcccctactatatgcataattgttttagtgaaccatttgaatataagttgaaaacataataaccctttacccctggggcattataagtgaaagacataatttgcccctaaaagggcatatatctgtaatgtactttcaaatacttgtgttatgggctgaattgtatctccctgaaattcgtacattgaagtcctaccccccagtacctaagaatgtgactgtatttgagacagggtttttaaagaggtaattaaggttaaatgaggtcattagggtagagcctaatccaatatgactggtgtccttaaggaagaggagattaggggacacacacacaaggaagaccatgtgaagacaatggaagaagatgacccgctacaagccagtaagagaagtcttagaggaaaccaactctgttgacacctagatctcagatttctagcctccagaattgtaagcaagtaaatttctgatggttaaactacctagtctatgatactttgttatagcagccctagaaaactaatacaccttgtataggatagcataagaaaagttttttaacatagtgcatgagagtgtctttaagataagtcccacacgtactaaaacaatctggactagttttagaagtttgaacctgtttaccttttctctgtttggggaaaaaaaaaatctggagtcaggggtgaaagtggggcatgataggtagctcagtaagaatgttattctgttgcttagcagcagactggaaaaccaggagtgttttttaaaagttggagttataaatggaacacctgcatccagttttgattgcctcacttcaagaatgatagagcataaattgaaagaatctgaagaagtgaaaaaactgattataggtattgtgggggactagtatatgacagtaatccataagtatggttcagcatctgtttacttggcctactcagctgtgtcgacagtttcaaggacccctctgcttttatcttcatgaactagaagacaacaaaagaagttgatctttacttctgtaggatattaacactctcctatttttttctttctgtgccagtttatttggcagagcatatatataagtaaaattgcacaccagcctgactgttaatgaaagcagctgggctttctacaaaaggtgtattaactgtcttttgaaagagtgtgatttaatttagtgctacgaatttgttttctgacatgcgtatatggtggtctccttactgcattcttatttgatttaaacaatacattattgtattttggtaagtagagcagggatgagctttcttttaaaagagccattgcagctaacaaagtcagactataagaccaaactgattggcaaatgaagagggtggcttctcacttacagagccagtgctggtaactaagacgagggtgagaaattaaaatagaaagaaccggctttggtcacctaaattaactaatgcaggatgttgttagttgtcatctaaaatgcagtctatttaaaatagaaatgttaatatagctagataatatgtaaaacagaaagatattagtaattactttgttcttaaacacaatcaagaatcaatagttttaatagctgataataagtttaattatcacagataaaactaacaaactttcttagagtccttggtatgtgtctctaggctatatttctgtatcctgattggccttgtagaactttcaatgggaataggtgacttggtggggtgagtatgtgtgccctgaatgaatggactgtagtccagttacagtcaagaagcctaacttgtgagtgcagaggtggggaagataatcttttaatgggggcagactccttatcaaacacaaccatgacagtgaccaataagccaggtgtaagaaatctacctggaaaggacaccattcattagagatggctgattaacccatcctctcacagttggcatgtcctgaggaaagccaaattaaagttataggactgttaatatgtaaactgccatgtctttaaattttttttttttttttttttggtagagatagggtctcactgtgtttctcaggctggtctcaacctcctgggctcaagtgatcctcctgcctcagccttcaagtgcttggattatatgcatgagccaccacatccagccccatgtctttttgactgcaaatctctgcatccattgtaggttgttatgcaaattgatcagtcgagtatctgtgaggaaagatgtattcgactatattattgtaggaaagatccaatacagtgataaaaataggcttcaaaatgagactgcagggcaaggcaaaggtgtgtgaacatttagtcttagattttgtttcatcacacacaaggattttaagaatttgacaaattatctgaaccttaaactgaaacttgtatgttagagctaaaattctgagtctgtggtctagggtagctattaaacatctacagttaggtttagagaactttttcctcaaaggcagtgtaaggaactttattaatttttgcaatttatgatatttagccttttctttttagagatctgtcagaattctaactctccaccacaatgttgatcttaaagttgtgaaagacaatattattttcaaggtgattatgtatcagtatataatctataccatattgtgtatttgaactgtataaaagaataacttctaatagatggttcatagcaaatctggacaaagtaattggatttaaatattctaaaatggtgattatttctacatatgtttagtttcaagtactttaaatagttcttaaaatacttcaactttttttttgttgtttttttttgtttttgaaatggagtctcgctgtgatgcccaggctgtagtgcagtggagcgatcttggctccctgcaacctccgcctccctagtccaagcaattctcctgctgcagcctcccgagtagctgggactacaggcgtgtgccaccatgcccggctgatttttatacttttagtagggatagggtttcaccatatttgccaggctggtcttgaactcctgacctcaagtgatctgccggcctcagcctcccaaagtgctgggattacaggcatgagttactgcacctggctttcaacttttattctatattcttcttcaccaagtttattgaaattggaagagtggagccaaaaaaaatttaattagagaaagatttacacttatacatgtattttacactccagtaattgagtggttgtgttcttaggatttctttggagacatttgttatgcaaatttatgaattttcatttagtgaatatacttttataaaatttcaccaccttactctgagatagtgctctgatgtgtttgaaatgtagtataatcaatgaaagtacatttgtttctgatcacgttatataactagtctatattttagctagtctttgtctgtaatatgtacacttgttacctatcccttattaatatgctttctaggaatcatgttttagaatggagaatactaatttggaatcctactgtcctatattgagtgttataattaagggttacattctttattaaagataaccaacaattcttaacactgagcaaaaaaagtcataaactagttgtaacagctaaaaacttacattaatgtaaaatagcaaacatattactgcatacattgattatacaaggtctcagtatattataaaatgtacaggtatgcataaatataattctaagctataaatctggactatctaaaagttatatttgagtataataaatattggttatttttattaagtagttttgcttagcactttagaagcctggagggtgggaagttataaagtttatgggtaacgtttcttaaaaagctgtcaatgaaaatttgaattaatgccttttatctattaataaatttcttcttaacaagtaaaggcattaataataattctttataactgaatggcacttcatatctgcatacaccaaacttccacatctgttatccatcatttcactaactaaaactgtttttgaaattgaaaccattgtttttttttttttttttttgagacagggtgtcactctgtcacccaggctagagcagtggtgtgatctcagctcactgcaacctctgcctgccaggttcaagtgatccttctagctcagcctccaaagtatctgggactataggcatgcaccaccgtgccaagctaatttttgtattttttgtagagatggggttttgccatgttcccaggctggtctcaaactcctgagctcaagtgatctgcccacctcagcctcccaaagtgcagtgaaatcattttcttagcagtagtcattgtagtcattgtagtagtctgagtatttggaagcttcactaaaggacactagggggaataaacttgctaaacaaacaagaaggcagttgtgaaagtagggggaaacagtcttcctcctgttataatcattggagtatggtgtttatggactaattcctttgcagtcctttcctgagttgtataggaaggtccggaaccctgatgctataagcatgctttacagttgtttttgcctaattgcattaataaaaactgttcacgttgaacttgtctcttgcctttctctccagttataacttgttataatattttgctgtttacttctttacctttggcatttcacaatggctgagtgtcatgtgaccaacttgaatatttaattatgtgtttactcttccagtttgatcccaggttaagaagcgtatgcttcttatgtgtggcgaattgttgaatttattacttgaagttattcattgggttttgaagctgctgaacagggttaataggtagattttaggtggaatgtaaaataaatcattgtttatgaacatgtattctactgctagatgacagcatgcacctagagtatgttttggtaattctgtagaagaaattatcatggacccagtcactccttagtgaatgccttgccatagttgtttaagtaaggttgccctttgtttgaaaattacaaactcatttgaaaatgaatctgctgccttgcactattaaagctgctattttaattatattttagttttatagaactactcttgtacttctattgaatgagttttgagacctaaccagcagaatgtgtagacttggggacctgaaagatactttatgtcttaaataagaggttcatagaatttttcacttttcatttctgaataaatactgtgccattttcacagtacacctaataatatagctttgatccatccatttgtgtgttctagatatgtagcagtgctgcatatactcattatagtagaatcgttttgttctcctaagtagagattggcaaactttttctgtgaagggctaggtagtaaatactttaggccttgcaggccctatgggctctatcacagctactcaatcctgctgttgtagtgtgaaaacagtcacagacaatacgttaatgagtgggtatgtctgtgttccagtaaaactttatttacaaaaacaggcagtaggctggatttggcctgtggacagtagtttgccaactcctgctccaaactattgagttggtggtctctacaaaatcaggtccttctgtatctggaaatgaagagttaatttctccgtagtttattctctttgctttgacatcagtaacaacattttaattctgaatactaatagcatggagaaagaatattttaaagatattttaggaggaaacgggttgactggatttaaagacattgtaaactgattccataggcatgttctctaaacctgggtactcccagagtctctggcttttgctgatgagctttgctggagaaagccatgaaactgtgttaatttgtgcttagtcacctcagtgctacctgtcagccctttgatttatttctatttgacctcttgttaattcctcacagtatctcttccaaggttatcattgttctttccattaccatcacttccatctcgcaatatcttggtctcagcatttgatctcacgtctcttattcagcaaagatcagttatatcattcaacataaatctcttttattctatgttaattccttttcaagctgaggattttaaaaatgatagttctaatattaaatgattttttaattcccagtttaatgtacagactaagttactgtaaaatatttgctgtgaattcctcttctatgacttgaaattctcccagagaaaataatgcatctaccatttcacaaatgttttctagacatatataattagacttcagttcaaaagtgagttaggaggatatgctgttaggtctgtgccttaaagttacaatctttaagatacacaataagcagaagttgtgatttctctgaagaacagtccagacaggttaatatagtattcttgacaataaatattttttcttaccattatcttactttttttgtttgtttcttttgcagacaggttcttgctcattcgcttaggctggagtacagtggcatggtcacagcttattgcagccttgacctcctggtctcaagcagtcttcccacctcagcctcccaagtagctgggaccacaggcatgtgccactattcctggctaattttttttatttttatttatttacattttttgtagagatgagttcacaccatgttgcccaggctggttttgaaatcctgggctcaagctgtcctccctccttggcctcccagagtgttagaattataggcgtgagccaccacacctggccttactcttacttttaattcaaagaactgattgtatagggaatttatctcaaactgtatcatgagaatcttattgtcccagtctggggataatcagctaggtgacagtgttccaagccaccccacccaggagtttggatggaagtcttagagaaagaagagattttgttttgggcagatataccaaaaagtatatagtgacctggtattggccatgcctcctggtcagaactgagctaagccttctactggtcctgcagtatccgcagtgccactgcagagcaggacctctataccttcagcagaagtcctggttctagaagggagcaatgtgcaagacccttagacaaggaggaataaaaaaagatggggtcaggagatggcagttcaaagaaatagtgaaagtaccttgtgaaaaagaactagaaattttgaaacataaatagactaaaacaagaacacatagttgtgaaaaaaactgattggaaatctagcaaataaagtatagtcattaggaaataatgaatagatgtgataaattctaaattggacacaggattactaaattagaagagaagtctgaggaatgtactcagatttctaaaaggtatgtcagacactgctgtaagttttatacacacccacacaatctcaatcaataaatctctctctctctctctctcatttactcctaaggcaaggcagtcctactcatttaataaatatatattgtgcctactatatactagtgactctgttatttatctattgctatatatcaattgcttcaaaattagtggcttaaaacaacctacatgtattatctcacacgttttctgtgggtcaggaacctgggagtggtttagctgggtagttttggctcagggtctctaaggaggttgcagccaggttgttatctggtgcttgactatggctggtggctcagcctccaaactcagggggatgttgctacagttccccttcagcttgtgaccagaggcccctgttccctccacacaggcctctccataggctgcctgagtgtcctcatgacatcacagctggcttccccccaagggatcaagttgggagggaggaagccaagacaggagccacagcctttttataactgtattaggagggttccaaatcagaaccaataggagataaagatatttattataaggaattggctgacatgatatgaggctggcaagtctcaaaatctgcaggacgaattggcaagctggaaacccaggagagctgatagtgtagttgtagtctgacaggtagcaggtttaagacccaggaagagctgatgtttcagtttataaccaaattcaggaagaaaccagtgtcccagtttgaaggccatcagacattgttttttttcctgaatttggaagaattctctcttatttgagggagggtcagcctgttttttctattcaggccttcagctgatcagatgaggcccacccacattaggtagggcaatgtgctttattcagtctactgatttaaatgttaatctcatccaaaaacaacctcacagaaacacccagaattggcagggcgtagtgactcacacctgtaatttcagcactttaggaggccgaggtgggtggattatgaggtcaggaggtcgagaccatcctggccaacaaggtgaaaccccacctctgcataatataaaaattagctgggtgtggtggcacatgcctgtaatcccagccacttgggaggctgaggcaggagaatcgcttaaaccagggagtcagaggttgcagtgagctgagattgtgccactacactcaagcatggggacagagtgagactccatctcaaaaacaaacaaacacccagaattatgtttaactaaatatctgggcaccccatggcctagtaaggctgatacataaaattaaccatcataaatgtaatattgaaagtgacctatatcacctctacaatatactgtttgttaaaagtgagttgctaagttaagcccactctctcaaagggagaggaattaagctctacctctggaaggaaagcatatagaataacacgtggacatatttttcaaaccactctaaccgctggtactgggagactccagtgttatactccagtgttcattgaatagaagttactgaagaaaaaaatggaaggaatggtagaaaagtaatatttgaagagagaattgttaagaatcattatctttcatgaagagagatatgagtcttcagatcaaaatgggcacttggggttttaaacaaaataaatgaaaatacatttttagacagattgtgatgtaattgcaggagatcaaaaataaagggacaagagctatcagagacaaaagatatattacctgcagaggaaaacaattagattgacagtagacttcttatcaagtaagagactcataagcaatggagtaatgttttcagagtgttgaaagaaggtaactgtcatctgaaaattcgaagtctagctaaactttcgttctagattgaggaaaaatctcaaatatgcacaataaaatttattttaaaaaaagattgagggtaaacattaagttatttaagtttctgtctttctgattccccatttataatgataggataggtaaataacggtatttaccttataggttaactgttctgttcactgttatatcccaagtgcctaaacggtgcctaacacatagtaggcatgcaataactgtttattaaatgaatgaatgagtgaataggattgttgtgaggatttatatatataaagaatttacagcaatgctacctgacatgttaataagtactcaataaatgtttgttgttaagattttatcacctgtagacactcagtaaaagaacgattaaaaatatttctcaacaaaaagacaaattctgtaaggaagtatcagatataaaaaaaaattatgacacagaaattgataaaatgctagtaaattaactaatgaccatggaggggagattaatttaagaaaaattaatctttttgtattatttctaaaaggtaaaaactaaaacctttaaggtgattctaaagttcacatgaaagagcaaagggccaacagcagctaagagatgtttgaagaatgaggaaaagctatttgccatactagatttaaagacttatgaagtataataattaagacagaaatgttggtgcagggaatggaaaatagaccagtgaaacaaaatgacccagaagtagactcatgcgtatatggaaaccttatatatgacagaaagcattacaaatcagtggatacaatgaagtcttcaataaatcaaactggaacaatgtggggaaaatgaaatttgatatcctaccatataagaatcaattgtagttgggttaaaaacctaagtgcaaaaaagaaagactctaaaactctgattttaaaaaaaaagaatcttagattcttccttagctaaagaagaactttttggaaaaaacaacaggatacaaacataagggggaaaaggattaatggcacatttaatatagtcatattaaaatttaaaatgttcacatctcagaaaatccagtaaacagtgaaaagacatgcctcagagaaggtatttatagctgatataactgacaaagattggtatccagcatgaataaagaattccagaagtcaagaaggaagaaacaacccaatggaaagaaaaatcagcaaaggatgtgattaagcaatttacagagcaggaaatatgaatggccaatgaacatatgaaaagatcttcagtctcactagtaatcatactaatgcaaattataccattctgtactcatgagacaggcagatattaaaaaggatgaaaagtctacgtatgttggtaaagatgtggggacctaacagtcttacagtactgatgggagaataggttaatttaagcactcagaagagctattttgcaaagccaaataaagtcaaagaatacataaacacctggaaattctccttctggtgtgttctctagagaaatactcttctataaatgcacaaggaagcacataaaggaatgtttattctaacactgtttgtaatggtgaaaattgtaagcaactaaatatcaatcaaatgagattgtatgctattatatatttgcataatggaatattatacaatttctaatgttaatattatatgctacttatggatacataacgtatagtaaaattgtatattttcaagcatgttttaaacaccaagtcataataaaggttacctctgaggaagtacgtgaatggatggagggatacaaaaatgtagtgaggtaaacaaaatattgagttgataaattgagtggtggctacatggttattatgggcattcttttggaccctacacttgtttgtatatttgagattcttcatagtaagtaatttaaaaataaattaccaaacaagtttcattaaagattagtggactagagctatatgtatcaacatggacagatccctcacactgatgaagaagatgcagaagtatattcacatcgtaataccatttatatagaaaccatgtagaacaatattatgtgctacttatggatacataatgtattggaaaattatatattttcaagcatgttttaaacaccgagtcatgataaagtttacctctgaggaagtatgtgaatggatggagccatacaacaatgtagccagataagcaaagaatgtcaaaatgttaagagttgacaaaactgagtggtggctacatgggtgttatattggaacctatacttgtttgtgtatttgagattcttcatagtaagtaatttaaaaataaattaccaaacaagttgtgtgaattatatgtatgtgtgtatttatctctatgtatgtgtattttttaatttaaaatttcttaccaacaagaatttatgagattctttctaaaaattctaatattctctggatcttacttaagggaaaatcttataaaacaaccttttaatatggatatggtcctgtaattaaaaaaaaaacaaacctaatgttatgttcctgtctgttaattagttaacatggctaagtattgtgaagaacctgaaaattaaattatcttaatataccctttctaatgttaacattctgagagctacatgggattgttttataaatgttgttatgttgaaacttaagtataaaatcaatataaactttttttgtttaaattcaaagaaatgctcaataatgaaataattagacttaagtataatagtcctctgtggcctattgtaactattattatttttgctttaagtaaccttacatttgagaaatattttattactttattttctcaatgagaatctttatctgggatttgaccaaatgttttacattttcattgacacattcttcacctttccctcaactgatagtttttagtttctgatcacttggaacagatttttacagaagttgtataatatcttaatttttaaatatatttaaaaatgtataagatattttgccatgtaagtttgaatagttttctccttaattgataaaagaaaaattagaaatttgaatattttgcattattttgtttttcacaatttttcatagcagacttttttaaaaaaatattttagggtgccatgattatgtagcagtctttgggtttctttagtggtgagaccattttcattgcacaggatagatgggcttaaatggcaggaacatgactagaaagtacatattatatatatttcagtcagcatgttgctactgacaggtgctcaatggttgttggtatccttgtcagcaaagagaatcctttgacattaaagtcaccagctcaatcctgatttggggtgactctattggcagttccatcaagctgcagctgatcagtgaatgtcagagctgcagccattcttcaggagtgtcaccagcctgctgcgggttttttgtctttttgtttttgtttttggagggaggagtggtttagcttgtcttgttgttcaattgtagccagactttcaaattgcttacctttgggaaatgaaccgagaggtcatagggaatataggtatctttagggcatccaaaaccatatacaaagtgattacttacatggagactagtaatgattaccttgactccaagccaatcaatggtggagcctctggggactcattaaatggcatttgtggactctgtaacctagcttttgagctgcatttcaggaaaagcagtgacagcctttaatgtctaattgacctcttctctttgtttcactttcattcactttccatatttgcctctgatgtggtccctaatggcagcaaacagcactgctcagcattttgaacttctgttcagagcttcagcacctcagtttaggcagttgtgtcatggtaagtgtttgagaattctttatactactcaattacttgttctctttttcttcctatgggtgaaatgtatcctgactcaccctaccccacacacacccacagtttttcagatttatggttctcttctttgtcccttgctttcaaacatttttcttaaattggaaagtatgtctttgaaacactgacattatttatccatgagagcaaggaaagaagtatagcgtggtggaatagagtatagttctgcctcaagccagatgttgtctccgacaagctaatcacctctctaggtttcttcacaaactaaggtgttagtcatacctaaatgccgatagttcagtaagtttttcactaagctcattttagcttttaaatcctgagatacttttcttgaaattttaatgataatagataggtttattttatctgtttgtttttgtgtttgttttactgtccttactggtcaaaacagaaagattaacaccctatgttggaactcttttttgtgtgtggaaattttactggtctgtgaaatataaaagcctagggactgttggactagataagcttcaaagtccttccagattttttttttttttttttttttttttgagatggagtcttgctctgttgcccgggctggagtgcagcggcgcgatcttgactcactgcaatctccgtctcccggattcaagcaattctcctgcctcaacctcccaagtagctgggattacagggatgtaccactatgcccggctaatttttttgtatttttagtagagatggggtttcaccctattggtcaggctggtcttgggtttcaccatattgagtaggctggtcttgaactcctgaccttgtgatccgcccgcctcggcctcccaaattgccgggattacaggtgtgagccactgcgcccagcctagtccttccagatttaaaatacgattttatgtgcccttgaaagagctcatggaaagagttaaatgttttaatctaaaccacataattatatagcttttaaataatactgagatataaaggacaatagaaatcttgtgtggagaaggtgtgcatgtgtgtgtttgtgtgcacacataccgtaagtgaatcttccagtgtaactgactggaagaattcattcctcctcacttcatcccctgttccctaaaacaatgtaggtttaggagatccccagaccattccatttctgccttgcattcacttagtaggaagacttgaattagcaaaatgatggcaagattctagaaaacttctggtatgctagggagtatttgctttaagtaaccttacattttgagaaatattttattagagtcaatagacagggtccctgacctaaaatgagtaccatttgaacacctcttagagctcagtgtggcttcagaaatgcctcaagatttggcagtgtagactaagtaggcctcttttgatgacatatttatctctgtgtccccatggtctttaaaatcttgtggttaggtcttattaaaccctaagtatgggctcaggccatctcagtctctagaaacagtcttgggagcccactagattttcctcacttctggtcaaattctttccatagtaagccatttgataggcttctgtgggtctcttcagtgactcttcttgatggacccgatgacatttgatggcagtttctgtcacaacaaaccagccagttactgccacttggatcttccttattgctagcctgctctctttagattggtaaggaccatttaactttgcttagatgtaccttattctgcttgttatttacctccccttaaactggagcaacattccttagaaaatcaagcctctggccatagactctttactgttggaattatatatatgcttataattgaaattgtgttattttcagttagcattttccagagttgacccatggaaaattacctctaaaggataatcaattttaaaggctgtgtatttgggggtggagtggagattcctaatgaaattaggaagccaggtatggttgctcaaacctatagtcccaactactctggaggctgatgtaggaggattgcttgagcccaggagtttgaggctgcagtgagctatggttataccaccgcactccagcctggtcttagagttttacaatggtgtgtgctacaacaaagaaactgtttacctttgctaaaaccagtgttttcaaaccttgcctgactactgaactcatttttctatattacattttccatattacattttattgttgactgtcaatataatagcaatgtttagatttgtgatatttatgaagcaactgttcacagtatacatacatagagcactgtgctgactttcccatggtgattgtgatctattatataccttcgctgagtattcacctcatggcatactttctctgtagtgagtttaatgtagatactaaattagttgtgtcactttttttctgaaactaatctttgtgccacaagtgccagttagacagatttgcagtgacaagaacttctgaggagcagtgtctcacctgtaataaacctgaatattctagtcaatgccgtaaacatgtttttaggactacttagaaatatttatttttcctcttgattgggaaagagacaaattttatctatttctttttacttctaaaaatgactttaaaaagtttaaattccactattatataatgctgattgaagtaatttaaagttgcctaaattaaagaatcctaagacctacctgctattttcttaagtttcctactaattatgtgatcctggttaggtcacttaaattcttgctgatagttcctctgtgacatttgccctatttttaaaattagataatgaataagaaaataaatatgtctaatatttttggggaaaaaagagtcctgcataatatctaaaatttagaaggaattatagttaataaaggagggataggttgactttgttccagtaaaaagtatttagtttcatttttattttcccagccctgaatttggcatgagtagtgctgtgataatttcacaacaacaacaaaaaactcttgaaggaatttctcactgtgttctatgctagtagagaatttgttcaaatgctgctgagattgcccaggcacaaattgggcacagtcagaatcataggtttcataaagtttttaaattttttttttctaagtaagctaattggctgccctaattatcaaacccacagttttgtattgttcaggtatactcacttaaggagatatgttcccccaaacctgtttctcatagacttccgcatgattccaccatacatacactgacatccagaaccttagaaatcattacctctatatctaatctgtcagcctttggttctaactcaaaaatgcagccccaaatctgtcggatttcttcattccaccattgccaccttaatccaagtccctgtcatctgtcctttacactgttgcagacctcttcaatgagcttccttctccgttcctccccactataggcccatcctccagacagaagccagaggtggttttgtgtcagtttttatgtaaataataatatgtcactcctttgcttagaaccctccattgacttccttagtacttgaaagaaaaatctaactccttcatggtctaaatgtcctggccactgcgtgactctgccctccatagcccgtcctctccctcaccacccttggactgtatggatctcatttttgttcctcgaatgcatcaacctcattcctggagatttcagcaattaccacctcttccctcaacccgtgacactctgatcactctcacatcactctgttttattattttcccactatatgtcactctttgaatgtattttttccttaattagtctgtgtgtctttcctaaaaatatggacagtgtctccttttttcagtttactgctggtcctagcatctggagtggtgcgtagatgtttgttgaaaatacaattaaacaaaagaacaaaaagaaataatcattgtaattgtttactattttgtttccttttgataattttccttgtgataattttaatatctgattttagcaaaatcaaatgaacctcttaaaataacctatttaaagaaacattattaaagcatgtaaagcccaataactgaaatgtttaatccttgattagtagagtcttgtcctgtaatcatgaggtaagcactggacacctccaataactgacagttgattaacatattgtaatctaaattattttcatgttgtatatgcagtccccaaatgcctcatttaagccaaaactagtatccttattagtattatcagcatttccacatagtgttttagagcctaccagatacacatcagggagatcatatatacttgccaaagtatattagccatatataaaacggaggaaagtaggtgctgtcaatgagtagcagcagcaaggttgaaatggtgggcataaaagaagaacatataatcctttaattcttcatgagagactgaagacatagactgctttgggatttaattcattaacatcttctgtctggagtgctcttaaatggatttttaaataaatgagtactcctggctgttttatgaaacagtggcagatccgtgaggtcagtgggcagatctgtattaacaaggatgtggatttgtttacatggaagcaaagcaataggttataattaagaatctgacttactctaaacagtttgcatgtctgagcataacatgtaaaagattggaattatttgatttccagattgaagactatgatgtgatagctagcatgataggagccaagtgtaaaaaactccggaccctggatctgtggagatgtaagaatattactgagaatggaatagcagaactggcttctgggtgtccactactggaggagcttgaccttggctggtgcccaactctgcagagcagcaccgggtgcttcaccagactggcacaccagctcccaaacttgcaaaaactctttcttacagctaatagatctgtgtgtgacacagacattgatgaattggcatgtaattgtaccaggttacagcagctggacatattaggtaaggttacaatatataaatttgttttaaatgtctgtttccttgacagaaaagccaatctcagactttttgttaggaaaaagaaaatttttggatacaataaaaattttatcctgataagatggcttggtttgataggaaatgcaagatagatcagttaatatagggaataattatatatgtactttaataaaatagtgaggacaataacaattttatagttgaaactgtaaaaaactataaccattaattcttggtctacttgtaagagtgagaatttacatgagctgcgctctctatttttattaaggagagaagaaattaattcatttgtataatgaattcaagctagttttttttaagtttcttaattaaaattcttgattaaggaatatcgtgaaatctttatccctgataattctagcgtttaggaatagttctaccccaggcagatctattgaaaatcttttccagctctgggatttcttgaatccttgctgcattcatcagaaaggaaccctgtgtaattttgttgcttcttacttttagccaggggtgctagcagtgtcacagtagttatcattgtccacacaattgatactttgtgaagtcatatcgcacttgcacattttacatcaaatgcatggtgaaaaccattttgaactggggtgacagaaataggaaagtctggaggagctgatttgaaggggtaggaggtaggaatgaagatagtgggtaggatattggcaagattcaggtcctagatgctaaattggctggaaaattcaacttttacttttttaacagaaccatttcaatatgaagtcatgtttgaaaaaatgattttaatttgtaaagggttattttaagttcattacaaacaataaatcatggatggattcattgttagcacattatataaatgttatacttaaggtgttttgttttgttttgttttgtttcccttaaataggaacaagaatggtaagtccggcatccttaagaaaactcctggaatcttgtaaagatctttctttacttgatgtgtccttctgttcgcagattgataacagagctgtgctagaactgaatgcaagctttccaaaagtgttcataaaaaagagctttactcagtgacttaatatatgttctgtattaaaattaatgtgctttgttggggtttaattttgggattggttttgggttttgtttttagttgttttaatggtaagaattaagacatttgtagattttaaagaaaaatatgaaattgtccattaaatcaagtaaaaatgtgcacaaatgttttcataaaatactgcaagcacttctcttcaagaatatgagtggatattatttttaccttatgttaatcagtgatatgctttagtcaataatatgattgataaaagaataacatggaatcatgctaacttattttcaaaggaacactgagcaataaagtatcgtggcatttatgcaaaaaaaaaagttaattttttacaccttcatgtaaggatgtcttattaagcctgtgacctggcaagtgttttgtttggtatgtacaaaatggtcagagctagttggagaatgagacatgcttttccagctgtttggttatttctctggattaactgttcaactggaaaatttttagtttttctagccaggtgtggtggcacacacttgtagtcctagcgacacaggaggtggaggcaggaggattacttgagatgggattttgagactctagtgtacttatgattgcacctgtgagcagccactgcactccaacctgggcaatatagcaagtccctttctcttaaaaaaaattgtagtgtttccacttttcttctgatatttttgtctatttcactactggataatgccaatataaaaatttgggtataatcaagaataagaggtaaactactaaataaaaaaagctttccaactgttagaagcagatgccttaacattttgtgaaaggtaaagttttgaggtttctgaattatataaaaaaacataaatgtggagatatatattatatatacacattatatatacatattatagataatatatatccacatttatgatttttaatatatacatgtatatattatatattatataattatatattacatttatattatatgtaatgtacatgtatatattatatacatatatataattatatatattatatagagagagatatatatcttgctagggtgtgtggatgctggaatataacgattttgcacttaacaggacaatgaattttgttatactacagttaatattagttttgtgttcaaaacagctgtgccttttcatgccacaaaatattttctgtctactttctgagtagcagaattaattcatttttttaacaaaacgatgtatgtcaagtgttcagtagtcacatgaggagaatgcttcctttgtgcctggcactgtttcttgtgctttgcattgactaattcaattctcacaacaaccctgtaagataaatgccattacttacccccatttacagatgaggaaactgaggcaaagaaagattgaagaatttatttatgatcatacagctgctagtggcagagccaacatataaacccaggccatctggcttctgaagcattgcattaaacctgtgcttttaggtgttcagggtagcttctggctctagggcagaggtcaggaaactttttctataaagggccagatagtaaatattttaggctttgtgggctaagaggtaaaactgagattgttatgtagatacttaaataactagagagaaataaaatttgcacgaaaattttattgacaaaattcaaaacaataatttagaacaattttttttgtaatacgggtttactaatgaaaagaattaaatatttacagggaggatcaaagttaatgtttcgtgtcattaaagttgattgtaagtactcatttgttaatgctgatctgtaataagattttatgtattttacttctgaaaattccttgcagataggtattgtcaaatacttacattaatccatgagaatatgatttttgttgagcatattcatcacttgaaaggttacttcttctctggatattttccttttagcatgttattacattgcagcttaatcacttccaattgaagactaggcagaagctcctcaattgcactgttaaattgattttgaaaaatggaaatttcctttacatttgcaaactccaaaaaatactgcaggcactatggtgtgagctacaaatttgtgtgagagtggagatctcgcttctttgtcttaccttttgatagcacaggaaatgtgtaaagcagcttgttgttacttgtaattcaaacaatgttgtcatcaaaatgacttatgttttgcttgtaaacacgttttgccttgtaattttggcttgaattcatttcaaaattttattaagtcttgagcaaaagctaaattccaaagccattcagtgttccataatagtgattgaggacatgtcttctttttcagaaaaatgtcaatatcagccctgaacgcaaaagctcacaatagaactaacactattatgccaatgtggttgggcaaatcagcatattcatcttctgtatctgacaaaagataactgaaccattgatgtttaatctatcagaaactatgagagcaaatgaagttcaccattgctaccagtagttcagtaatacaaaattgaatcaaatatatcccacaaagtacctgctgatgaataatacagtaaataaccatagattttaaataccttcttaccttttcacaggctttataaatttgacaaacgtaatcattttgcttcacacatttttaacaccaccagttgtaacacatcttagcagattctacttcaggttgcatgaaatttgtgttttcttcttataaaatattcatgcttgtaattgtgccacacagataattcatagagactaatttcagtcacttcaacgttggcattgacttatcaaataagcaataactaggcagtgtcagtaacatctgttgactcatcaagagccaaggaaaaccactcagggtcatttgccttgttttttattgactgttgatgttgttcccagtgttctcaattctttaagcaaccattcttgccaaaaggctaatttaatagtcttaagtttactttggacacagtccttcagccgatagaatcaaacacaatttagttatcgttagtaaaatgttttccttgcttggttaacatctgagtcactttggctgcaactttattttcatttttgagtttgtttttttttttttttgagactgagtctcattcttttgcccaggctggagtgcagtggcacaatctcagttcactgcaacctccaccctgcaggttcaagcgagtctcctgcctcagcctcccaagtagctgagattacaggcacatgccaccacacctaactaatttttatgtttttagtagaaatggggttttaccatgttgtccaggctggtcttgaactcctgacctcaagtgatccacccacttcagcctcccaaaatgcttggattacaggcatgaaccactgcatctgacctccctatagtattctttaagaacagctataatgacattgcatattaaacatcatactctgacatctaatctgatttttaaaaattcatatactaatgtgccttaaaaatgtcacttcaagtctacttttctttttttctcttgttttgatgttatgggtaagcactagtaataaaaaatttaaaaatattgtggtatgacaacatatgtggcactcaaaatgctggtaactgcattactgcagtttttagtgtgccaagtagcagtgcaaaatgatgacagcaccacataagtctcctttgcatttgttcaactctgccattctaatgtgaaagcaatcatagacaatacctaaacgaatgagtgtggccatgttccaataaaatttcatgagcactgaaagttgaattttacataattttgatgtgttacaaaatactactgtgttagccattagattttttcagccattagaaaatgtaaaactgttcttatgagctggctggatttggcttgtggaccaaatttgtgacccctattccagagtattttcgagtcagttaatccatgtttgcccattcctaattttataaaccacattcaaacctgttaattcgctgttatcattctcattttgccatttagattttaaaatgaagagcagtgttttgttagaaaaaacaaaatgtttaccataacaagaaagatgtgtagacaagaaagatatttatgtagactctttgtttgttaaattttgaagccaggtgatgcattgttagctttgacaactgacttaaatttttgtataattatttatctttgcattttgctcaggtaaattatcttcccagagtctagaaataaagatatccctgatcctgtttaagagcataaataatactctcaatgtaaattgttttgaaataagatcttaaaaatacaaaatgtagacaattaatattcaggtgcttacttttgagccaatatgtagcagagaaaaactaatttctctgtggcagtatttttatttttggcatttcccaggaattaactgaagactaaaactcatatgtgaagtgtaatgatactaatcaaagagtcagtaaaatttccatttggctaccatgtatgtgtgtatatatttatgtatgtatgtgtgttacatatttgagacagggtctcactctattgccccaggctggagtgcagtggcatgatctcagcttactgcagcctcagtctcccaggctcaagcgatcctcccacctcggcctcccgagtacctgggactacagacaccaccacacctggctaatttttttattttttatagagacacagtctttccatgttgcctatgttggtcttgaactcctgggctcaaataattttcccaccttggcctcctgtagtgctgggattacgggcataagccactgtgtcaggccccatgtatgttaatagtgaatgtttggcttttcatttgttactttcagctattaaaggatacctattacagacacaggaatttacattttcaaagtcatttttgacacatcagtgctgcatctacttttctccttttagcacatttgatattgatacttcagagaaacttttttaactacccttaaaatcttgtcaatgaccattaactgccaatcatcacctcatttgctttttttgacaacatactactagaaacctaggctgtgagtgtaaaaccataactgttagaatcatttttttggcaatagctcacattctgttaagagtcatttgctttaatcaaagatcatgatttattatatattttttataagtagggatggggccaagattattcctttggcacagcagtaagtgtgctcaagatctttgcctgtaagcttgaatatttggcttaaattttgtgcatatgaatactgttaaaggtatatttgactacattttgaaaggaaaaaggtagtcctgctaaaattgacatttagggatattttaatctatgtatttggtaaagtaattagtgaagtattagttataaaaattttaaggaaaacatttaaaagcaaaatagtcgtatcagataaatagagtagaatacactaaagataaaacaagtctctgttacaaatgaagttgtctgtacagacgactgagatattttaattttatttacataaaaatgctgttcaatatctaatgatttctgttgtttgtattctgcactttagagtaataaaataagtttgagtatctcattagttcactttcaaaattgatcatttcagggcactgctgaatataatggaaggtttgggtaaataggtttgcgtcacagcccctgtgaaattaccagcctagatgaggagccatccgcctgtgtacagaactcttttttttttttttttcatttctctctctatatattttttattattattatacttttaagttttagggtacatgtgcacaatgtgcaggttagttacatatgtatacatgtgccatgctggtgcgctgcacccgctaactcgtcatctagcattaggtatatctcctaatgctatccctcccccctccccccaccccacaacagtccccagagtgtgatgttccccttcctgtgtccatgtgttctcattgttcaattcccacctataagtgagaatatgcggtgtttggttttttgtccttgcgatagtttactgagaatgatgatttccaatttcatccatgtccctacaaaggacatgaactcatcattttttatggctgcatagtattccatggtgtatatgtgccacattttcttaatccagtctatcattgttggacatttgggttggttccaagtctttgctattgtgaatagtgccgcaataaacatacgtgtgcatgtgtctttatagcagcatgatttatagtcctttgggtatatacccagtaatgggatggctgggtcaaatggtatttctagttctagatccctgaggaatcgccacactgacttccacaatggttgaactagtttacagtccccccaacagtgtaaaagtgttcctatttctccacatcctctccagcacctgttgtttcctgactttttaatgattgccattctaactggtatgagatggtatctcattgtggttttgatttgcatttctctgatggccagtgatggtgagcattttttcatgtgtcttttggctgcataaatgtcttctttgagaagtgtctgttcatgtccttcgcccactttttgatggggttgtttgtttttttcttgtaaatttgtttgagttcattgtagattctggatattagccctttgtcagatgggtaggttgtgaaaattttctcccattttgtaggttgcctgttcactctgatggtagtttcttttgctgtgctgaagctctttagtttaattagatcccatttgtccattttggcttttgttgccattgcttttggtgttttagacatgaagtccttgcccatgcctatgtcctgaatggtaatgcctaggttttcttctagggtttttatggttttaggtctaaagtttaagtctttaatccatcttgaattgatttttgtataaggtgtaaggaagggatccagtttcagctttctacatatggctagccagttttcccagcaccatttattaaatagggaatcctttccccattgcttgtttttctcaggtttgtcaaagatcagatagttgtagatatgcggcgttatttctgagggctctgttctgttccattgatctatatctctgttttggtaccagtaccatgctcttttggttactgtagccttgtagtatagtttgaagtcaggtagtgtgatgcctccagctttgttcttttggcttaggattgacttggcaatgcgggctcttttttgtttccatatgaactttaaagtagtttttcccaattctgtgaagaaagtcattggtagcttgatggggatggcattgaatctgtaaattaccttgggcagtatggccattttcacgatattgagtcttcctacccatgagcatggaatgttcttccatttgtttgtatcctcttttatttccttgagcagtggtttgtagttctccttgaagcggtccttcacatcccttgtaagttggattcccaggtattttattctctttgaagcaattgtgaatgggagttcactcatgatttggctctctgtctgtgtacagaactcttaacaatccatccacatgctataaaatgacatcaacttgggtgcattttaaaccctgagattacaggagtctgcaactacactctaaaccctgagattacaggagtctgcaactacactctgttatttatttctgccttctcaataattcctccaaattaagatttacttaaaagtttgatttgctacttaaaccaaaatttgatacagtgttttcctccttttactcataaagtatcatgtatttgccttttgtagaaaccaatcccttcattactatagttcttcagttgttccacagttcttaggcccaaactacttttggtgagctaggatggaatgaatgacacaaggtaaaacacccgtccatctgtttaatcgatatatattgacaacaataatacattgatagctttgagctaggcacagttgaggtaagggtgctgggtatagaaaaggcatataaacaaccacagagcaatttcccaaaatggttatgtatcaagacatttaggtttctttactgctaaacttcagggactttaaaaggctaatggacactgtgaaggtgagttaagatttgtactgtttcccagacttctgtgaatatctatcaacttctcttagaaattagtttttcagagcacagtttggaaaatgccactaacagcactataggatgtattatgaaaagtattcactaaggtcacttttaaccttctcgttaaagattatgcattgtaattttgtttcttttaaaagtatttcttattaagaagaatccttggaagttactgatactttggtgatgtgattttaaaaatatttttgagcatgactgctttttattttgacccttaatttctaagtccaatttttattaatgtattagatttttagaatattcatttacttttagtatcataaaattctgtgaaatacaactcatagtctagtaattgggaataccgtaagggcctgctgttccagctgatgattttaatatgaatatctgtatataggatttaactgtcaagttgctttaattaatatttattatgttgtgctggtccataaactattttaaccatccattgtatagtaatagaaaaaagtagaaattttagattaacttctgataagtgactttttaaattgtttaatatgtaactttttttaaaaagtatagtaaaaattcactgctagcatctgttttgctaaagtctgagaatgaaggaaaaggggtagtttatcatgagaatcatttctttacaaataaatactttaaatgtgaaccctattatatgtatagtcatacatatatatatacacgtatatatatatatacacacctacaattacttatttcttctccagtaaatatatgctaattttgttaaacttttttttagtgggaagttatatttctatagcatatttataaattgctgctaagattacaacaaccaaggcaagagaactgttaatactaacataaattctgacacaccattcttcttacttgatatgttttttgctgacagataacccgcatagagtcaatattgttgaagccctagtaacttcatttgaaagtcataaaataactccatccagtaaaacctaaaataaacgttcttaagtcctaataatcagaaatatttgtcaaattgaaagaatttacaatgtgtgtccctatcatatgttatcctcactgtcagcagggtatgtctggacatgtgcacagaaaagagaaacacttagattgaggacggttctgcctttgtctttcaaagtgccttccgctttacaatctatacagattccttgcaaaatcaagagtcttattcatttcctgctctaggtgcatccattttaccagggcctagagtatgaatggaaagtgctcctggagcatcatcaggccacattcctcggtgccttcagcccttctaaacctgtgtagcaagccactagcctcagttctccgtagccttaaatctcgcctcataaaccatctgggcgattaaaaaaatattttaaacattaaaataccaagtgccaaagaaggtgaatttcttaagcctagtggtacactgataagtggttagctaccaactcttgggagaaaaaagctccagtttgtagtgcttcccaatttttgtcatgtaatactcccatctgtctgatttcaagctatcaatgtgaagtcacttaatgctgagttggaatgagacgcacatactttgctcttttgagatgatatgaactggctcca

SEQ ID NO: 215 - DNA, 1866 bp, Homo sapiens
atgtcaccggtctttcccatgttaacagttctgaccatgttttattatatatgccttcggcgccgagccaggacagctacaagaggagaaatgatgaacacccatagagctatagaatcaaacagccagacttcccctctcaatgcagaggtagtccagtatgccaaagaagtagtggatttcagttcccattatggaagtgagaatagtatgtcctatactatgtggaatttggctggtgtaccaaatgtattcccaagttctggtgactttactcagacagctgtgtttcgaacttatgggacatggtgggatcagtgtcctagtgcttccttgccattcaagaggacgccacctaattttcagagccaggactatgtggaacttacttttgaacaacaggtgtatcctacagctgtacatgttctagaaacctatcatcccggagcagtcattagaattctcgcttgttctgcaaatccttattccccaaatccaccagctgaagtaagatgggagattctttggtcagagagacctacgaaggtgaatgcttcccaagctcgccagtttaaaccttgtattaagcagataaatttccccacaaatcttatacgactggaagtaaatagttctcttctggaatattacactgaattagatgcagttgtgctacatggtgtgaaggacaagccagtgctttctctcaagacttcacttattgacatgaatgatatagaagatgatgcctatgcagaaaaggatggttgtggaatggacagtcttaacaaaaagtttagcagtgctgtcctcggggaagggccaaataatgggtattttgataaactaccttatgagcttattcagctgattctgaatcatcttacactaccagacctgtgtagattagcacagacttgcaaactactgagccagcattgctgtgatcctctgcaatacatccacctcaatctgcaaccatactgggcaaaactagatgacacttctctggaatttctacagtctcgctgcactcttgtccagtggcttaatttatcttggactggcaatagaggcttcatctctgttgcaggatttagcaggtttctgaaggtttgtggatccgaattagtacgccttgaattgtcttgcagccactttcttaatgaaacttgcttagaagttatttctgagatgtgtccaaatctacaggccttaaatctctcctcctgtgataagctaccacctcaagctttcaaccacattgccaagttatgcagccttaaacgacttgttctctatcgaacaaaagtagagcaaacagcactgctcagcattttgaacttctgttcagagcttcagcacctcagtttaggcagttgtgtcatgattgaagactatgatgtgatagctagcatgataggagccaagtgtaaaaaactccggaccctggatctgtggagatgtaagaatattactgagaatggaatagcagaactggcttctgggtgtccactactggaggagcttgaccttggctggtgcccaactctgcagagcagcaccgggtgcttcaccagactggcacaccagctcccaaacttgcaaaaactctttcttacagctaatagatctgtgtgtgacacagacattgatgaattggcatgtaattgtaccaggttacagcagctggacatattaggaacaagaatggtaagtccggcatccttaagaaaactcctggaatcttgtaaagatctttctttacttgatgtgtccttctgttcgcagattgataacagagctgtgctagaactgaatgcaagctttccaaaagtgttcataaaaaagagctttactcagtga

SEQ ID NO: 216 - protein, 617 aa, Homo sapiens
MSPVFPMLTVLTMFYYICLRRRARTATRGEMMNTAIESNSQTSPLNAEVVQYAKEVVDFSSHYGSENSMSYTMWNLAGVPNVFPSSGDFTQTAVFRTYGTWWDQCPSASLPFKRTPPNFQSQDYVELTFEQQVYPTAVHVLETYHPGAVIRILACSANPYSPNPPAEVRWEILWSPTKVNASQARQFKPCIKQINFPTNLIRLEVNSSLLEYYTELDAVVLHGVKDKPVLSLKTSLIDMNDIEDDAYAEKDGCGMDSLNKKFSSAVLGEGPNNGYFDKLPYELIQLILNHLTLPDLCRLAQTCKLLSQHCCDPLQYIHLNLQPYWAKLDDTSLEFLQSRCTLVQWLNLSWTGNRGFISVAGFSRFLKVCGSELVRLELSCSHFLNETCLEVISEMCPNLQALNLSSCDKLPPQAFNHIAKLCSLKRLVLYRTKVEQTALLSILNFCSELQHLSLGSCVMIEDYDVIASMIGAKCKKLRTLDLWRCKNITENGIAELASGCPLLEELDLGWCPTLQSSTGCFTRLAHQLPNLQKLFLTANRSVCDTDIDELACNCTRLQQLDILGTRMVSPASLRKLLESCKDLSLLDVSFCSQIDNRAVLELNASFPKVFIKKSFTQ

SEQ ID NO: 217 - DNA, 22109 bp, Mus musculus
  misc_feature (1)...(22109): n = A,T,C or G
atcccctgggtttcccctctgccttcaagtatcttgcagacattcaggcttcataaagcagggcacctttgtgtcttcctcccctgaaggcgcccatccaccctggcagcaaaggagatgctattttgggaaacggcagctgaggagggagggttgttaattgtttgtcaaatccttccactctagttagatctcatggagagagagagagagagagagagagagagagagagagagagagnnnnnnnnnnnnnnnnnnnnnnnnnnnnnnnnnnnnnnnnnnnnnnnnnnnnnnnnnnnnnnnnnnnnnnnnnnnnnnnnnnnnnnnnnnnnnnnnnnnnnnnnnnnnnnnnnnnnnnnnnnnnnnnnnnnnnnnnnnnnnnnnnnnnnnnnnnnnncacacacacacacacacacacacacacacacacacacacacttttttaaaaaataaataaacccacttattaatagaaacatatcaacaaacataatattggtaggtccaggagccaatcaaaatagttttaaaatcaagcaaggtgctgcgagatggctcgggagctaagaggcaggtactgctcttgctgagtttaattctcagtaccaatggcaggttggctcctaactgcctataactccggctccagtagatgggacatcctcgtctggactctgcaggcacctgcactgattgttacagacccatctacttccccatatacagataattaaaaaaaaatctttaaaatcacttaaaagactcaaaacaaacacagaacagagcaaacccagcctcacagaatactcacagtaatgggaaaacagggactttctgaaaatgatatttgttcatcctgtgccaggctgactaagcacacccagggttcgccaccactctactgatgagtttgataatgctcccacccaggcccactcaaaagaacactcatacaacacacagttactccatcagggcaggggcagacgcaaaagcaaacagaaagtgacaaaggctgagtaaaagctactcagagctctgacctcagaggccctttgggactctgaaactttctaagcattaggtcagctagtgaagggggcagggcagggacaggagtaccagctcggtttttttccttaagagaagcaccacctgtccttattggtcacttctgtcccttgactggttctcttggggaagaatgggcggttgtgtgtttgttaatgagagctctctctctctctctctctctctcttttctctctctctctctctctctcttacacacacacacacacacacacacacacacacacacacacacactgacacacagaaggagacgatagctttgcctatgtgacagtcatttgcccccaaaagagctcagagcaccttataaatatgtctgctaattcacacgcttgctcagagttagacagcgggtctgaaacttccttttattccaggagaacgtctgtataaataaacacttactcggaatttgcttagtcaaaaatgagcaggagatggttggagacatggggttttttgaatgagcgttcatgttcaaattgagatcagctgtgttgatctaaaagcaaacagaaagtgactagtgaatttcaacagtcctattggttacagtacttggaggggtaggagggtggagcagactttcttactggctgaacaataaaaagctgacactcagttgggttttctgaatatcactgacctgcaatccatgttgagtagaagcagcagcagcagcagcagccactctgttacattttctgtaataaaatcacacatctgtaaacaggacatagggagcagacaagggcacgatagcatcttccagaactctataatgttcatgggaaacaagtttgtttacaaaacagttgagtgtatacaacgcagataaataaaatgcaaagcagatttataagtgttattacaaatggtattttatataaccagtgactatttgggggcagcatggggcagggggacaagccagtagactagaaacaccaatgggcactgacagcttcctggaagaaatgatttgtagaaatagggtagaggtgagaggctattttgttgaagaattgaagaaataggaatttatacatatatatgtatatataattatttttggtgttagagatcataccagggatttaggcaaaccaagtatgcactctaccactaagctacatgcccagccctgagagatacacatttattgtcagagctatgcattgtatgcatatgtgcatgggtagaggccagagcttgacttctgtgccttcctttattgctgtccaccttatgttttttgagacagaatctggagtgactgcagggaccagatatagagcttattgcttccatgagactgtccagatagcaagccatcaggatccactttctctgtcccctagctctggggctacaaaagcatgctgccatatacccattttatgtgggcactgaggatccaaactcagggcctgatgcttgtgcagcaagcactttaccccaccagacctttctgcacccaaggatttacatttttgagacagggtctcacactatagtccaagttggtctgaaactcactaacattgcctaggttggccttgagcttacatcaatctttctgcctcagctaagagttatgcttttgagtaggagtatttatttggaacacagatggagtatctgtgttctcagagtggtaaatttgaagacttctaaaatattagatcggatccaaaaacaaacagcctggctacttgttctcaatgtctatactgtataaccacctaggggggctttgaaaaattgtcacaccctagctttaccatagagcctttgatttaagggatctggtagagtctgggtgcctgggtgccgaagcactccccagaggatgctagtgtccagttatggtttctagtcattttcacaagaaaagatgtagcctgactttggttactttatgggttccctttttctaccatcctaccacacacatatctcttccaacccccaaacatgatgtaggagaggaagaaagttagaggggaaaggaggcattggcattgctagactacttcctgctgattagagatatctacatctttggggcagcaaccagcaaccagcagcagtaggaggaagaggaggaagatgaagaggaggaaaagggggaggaagaggaagagaaagaagaggaggaggaggtagaagatgaggaggagaaggaggaggagaagaaagaggaacggcagtagccatacttgcccctcagggctctggaatttttataccctctcaagagtccccagaattccaaacatcatacacttgtacaaactgtctgcagctagcaaagtcatgcccctgctagagcacaaggcaaatcacagtcagccgctgtggacaatctgaagcagccccgtatcccacacttgagattaaaacaaaaacatattctcataacatttctgtgtttttaaagagaccaaaattctcacttcaaataggagcacctctctgtgcccagacttagtctgtgagaactgccaagtggggggtccagttctgtacacagtcctgtagtttgtctttgacatggtattgcctttgtattctagaaaacaggccagaagcctggaatcctgccacaaccatcataggaagtcatttaaggtgcctccccacccccgacccccccaccgaagaacattaaaaataaatgggttttagttcttagacataagactaaaacaaaaaagtctactctaacaatccaggacagcgatgctatcccagtgagcacttgctctgatgtttattaggacatttgcattttgttttgttgtttttaaagcaaattctcctgtggctcaaactgaattgcctatgtaaccaagaatgatcttgaagtctttctctccttttttatttttaacgtgatttttattttatgtgcattgatgttttgcctgcattgattatgtctgtgtgagggtgttggattctggagttacagacagttgtgagctgccatgtgggtgtggggaattgaacctggttcctctggaagagcagtcagtgcttttagccactgagccatctctccaacccctagaccttaaagtcttaatcctccaccttcagagctctgtgacttcacggttaggcaaccacaccctgttgccatgtttgtattttgaactgaaaccctgttgggctagtttatgtgtctagtaagtagccttgtgcttttctatcctcacaaatgctcagcttcttctgtccagtgagctgggttgttttgttgggggggggcggtggggggagcgtgttagtattttgagacagggtttgagagaggaggtccacttcctctctgtggccctggctgtcctggaactagtagaccaggctggccttgaactcagagattctcctgcctctgcctcctgcgttctgggattaaaggcatatgccaccacccaatcaatgagctgttttgatattgctgtaaatatgtcacatatttctattttcctttgattttatctttaatgtggcaactgttttatgtttcgctttctgtctacttcatctaccacacgggttctcgctctcttttctagttaaagacattgattggttaatagcccacaatatgcttagccttatttacatgtctacacttccctaactcctccttgcccctaggtcagttttttccaatagaaaaacaactagagacggggcagtgatggtgctgggtggcctacagggtgaatatatatatatacagatatatatacacatggcttaaattaatattttaattaacacaatatgtcaaaattgtgtcattttcatacataaccagcataaaatattacgatattataatatgtgatattatgatattataatctccattgtaatttgggggagaattttgtttggttgagacagggtctctctatgtagtcttgggtcatcttaaattttcactgatcctcctgctccagtcccacttgtgctgggattataggtatgcaccactctgccccaccatcataatagtaaggaggtaatttacagtttcttttggctactaagttcctgaaacctgctgtgtgttttatatttaccacacatatcactttatacttccaggattatgggggtcacttcctgtttttatttttaaattgattaaagtcaataaaattaaatgcttagtacctttggttatactagccacctttcatgtgcccactagtcactgtatcccctcttttttggttgtagaagcttcctgatcagaagcgattggtccctggagagatggattgtgaagagtccattctgttggctcaggattagaggaaatcctgacaataattgcaaaagcatgagtgcaagttagctgtcatttcctaagcccctgcgatgtccgaggccctggtgaaatagaaaacaacagccacagcaacaggtaagacttaataagtgcttatatgtgctacaacctgcactaagccatccaagtatctttattagttctgttttacacggaagacgggggtacagaagaactaggttgtgggtctcccatttcactagaggtggaataactttctgaagctcacaaggcaaagaagagggagatgcaggcattacagcccagcgcctcacacactccagtttgaatcctcacaactcaataactttgggaaactgacttcacttctcagaatctcagcttacccatctataattcctgtaaactggccatcatggtgcttgggtgggtcttatgattattagagagtctacatatgtaacctttctggatgtactaccataaccaccctaattataatattggaatgcccccaccctgccagttgatgggacatctaagtgccccttcctgccatggtcctgtgcctgtcctacaagagctttccataatctgacattgaaagagctttggcactaattctgatggttagtgcccgtgtccctccagtcatcccatattatcatgatcctgtggctacaaataaagaccgcctcctatctttgatgtgggaacaagctgggaggggtaatgggcctgaaaggagaaagcgatgagggcagcatgaagggtatgcagtatacagtggttgatggtgggattactccactcagataggtcagaaagccttctcaggcaccaccagcaacctgtggacatgggcagcactccagatcagcacttcagtgctggaattgtttttgtctcttacatttgtgtgtgtgtgtgtgtgtgtacacgtgtaagtgtgcaggtacctgtgcatgctcctatggagaccaaagtaaattgtgctccacttaattgatttctttttctttcctttagtaatgtcatacattaatatagcgtatttagatcacatgtagcccctatgaccccttccaactcttccttctacatctttctcctagctttatcatttatcctcctcctcttcttcaatccactgagttcagttcgtgctgcccacattgcacaggtgtagggtcagccactggagcatgagcaacctactgtgggacagagtaaagacccttcctccttgaacagccttcacttgccaaacgttcctcagctcagcgtggggctcatgagcttctcccctcttcaggctggagctctgctttcttttctgagatggggtttctcactgagctggaagcttgcctttggctagacggctagccagtggagcctctggaaggcaactgtctctgcttctcagcaccaccaggcttggctttatgtgtaggtcctgggcatccaaactctgaccctcccgcctatgcaacaaacacttcactcactgagacatctccatagccctgtcccttctatctcttctatctatctatctatctatctatctatctatctatctatctatctatctatctatctatctgtctgtctgtctgtctgtctgtctgtctgtctgtctgtctgtctgtctgtctgtctgtctatctatctatctatctatctgtctatctttttcactctttctagttccatctagctcaggtcttctcaggaattctttgcctaaggatacacagacgctttacagttgaatgatcacctgtgtaccgattgttctggaatccatcctgaggttcccttattactggaaaatctttagtaagtccccgtggccccatctcctcactgaagcatccatgcttcgctatcatcaccttggaaacctggcaaatgagatgctctctgttctccaccctaccgccagcccacccccacccctgctttggtgcttaagagtttgttataccttagggctttcggcaactcttcaaatccactttccttattcaaactttcatcaatgctacctaaagagtctccagacccttctgttactccaaattcaaatgtaaggtagtaggttcaaataactaatgtgtactgatagtgtacgtgtgctcactgctgtgctaagagtgttaagtgtgcaataagcatccttttctcacagtgctctaagaggtaggcactactattatctctgtaatcaaatgaaaaaaaaaaagacggaatgacagagaggcaaaacacttttccaaagtgctcttcagcaaggaagaagtggagctgggactcccactccagtagcctgtgcttgcaaacatctgtttacagtgacttaaaagttctcacacttttcccagtggaagtctggtaaggcctgaggccttggcccttccaagatgcttcggagccttattaggactatctgaaaaccctaccatttccaggtttatcagaaaatttgggtaggaatagaactgatgttctttgtttttgttttaataaaatcagaatgctcagtgggaatagtgatgcacaactttagtcccagcactggggaggcagcggcaggcagatctctgagttcaagtctagcttggtctacagagctagttccagaacaggactacaggacagaacgaaaaaaaccctctctataaataaataaataaataaataaataaataaataaataaataagcaggcaagtaagtaaataaataaatattttaaaaagaagcgctgatgaaacaaacaaagctttgaaaggaccaggtcctgaacctgcccatggctatcagacagctcactgactccaccccagacggatcgtcagttggcctgtaaatttaagcgagctgtgttagacaggaacatgggatatgtctgtacactcgttcaagtgctacttactacgcggcatcgataaatctgtctgtgagatgcagcattacctgatacactctcacttgtaatgcactgggccccatcagagcctcactggtctgctcttcttaggaaacctgaagatgaagtagggacaactctgttgctttaagggtgagtggtcaggatctagatgtggtcttggatttcaatacccaataaatatttgtcaaaaaataaaataaaataaaaaagattttccaagagagaaaacggagaagaacctcatgctattactgaacatatgttgctgttgctacatgttataattattttctctccttctctatgtgggctgagaattcctagaagggagggactctgggcttcagttgtagcagtaatagtggccaaagttagcatcccccaaaccatcagatctgaaggcatcctggttgtgaactggctcttaatcaagcctacctctcactagtatttcttccatgtaaatggccaaacctattgtagggtcaggcaaacctttcacatagacaccgtgtaagctgtggttaactttattatttagattgactctgagagttgccatttatcttctgtgtaataaagaaggtgtatctgtgatttcttcattttatatttgaaacttcagggccataaggcaatttacagagccatcaggcaccagtacaatcttgtcatggtccttctgacagggatttgcaagactcagtggatgggactacattgactgaccagaaaaattttaggaaccctccccccatacttgacaaaaaacaatttacataatcaacatgggaaaccagaacttatttgtatttttagaacttactagatttcccccaaaatagatcagttacttattgtgtgtgtgtgtggggggggggtattaaacaaacagacaaacaaagaaaaccattgtggagaaataggtaacatcttccatttaaaatatgtgataactgagaatctggggaacgaaatgaaagatgccagctttaggtgagaacaaacaacgttgtacctgaattctgttccttcataaggcagaagcttgggtatttctagaacgttcccttttgtttgtagttaaatgctgagtataacgctaatgggaaaggggctaactccaacataatatctcaaatatatcgtgctagttgtcatatattgtcatcgcttccatttctgccaagaatgaccagaaattacagctgaaacagctatgagcagctggaaattgtgtatgaaaggaactgaattttattgtgcagtagattccagcacactaaacgaatgaaagttccagtcagtgtgctaaggtacatcacaaagcggaatcccttactacatacagttctgtgggcctcgttctcctctatcaacgcctctgaacacaaatcccaccgcacatgatcaatgggctgcctgcaatctccccctttaagagcttgctccgcgggactaacgtttgaacaggccctggggcccctcctctgcctctgattggtcgggggcggagcacgaggcacatctgcccgcccagaacggttagcggcgctttgtgattggcgttcgaggagcatatataaggtgcagtgtggccccgcagcgctcagtttagagtccggctcagaacggttctgttgtctgaagggaagcggcggagggggactacgcgtcaccaggtcttttctccaccgagctttcagacgccgagggtacaaccacagaggaagacctgatcccgcctacagctcctctcgcagcttcagaaggcaagcaggcgttcaccctatcgtctggaagcgaaggcaggatggagttcaagctggaggctcaccgcatcgtcagcatctccctgggcaagatctacaactcgcgggtccagcgcggcggcatcaagctgcacaagaacctcttggtgtcgttggtgctgcgcagcgcccgccaagtctacctgagtgacccctgccctggcctctacctggctggccctgcggggaccccggcggtgccgccgcctcagcagcctggagagcctgtagccgggccaccctccggctggggagagccgcccccgccggtcgcccgtgccgcctggccggagcccgagcctcagccgcagcctcagcctcagcgtccctccgtgtgccacacgcccggagcgggaagctcagaaccggtggccgcggtggccggatcgggggaagctctccggggcggagaggaggactcggcggcagctgcttggggccgcgtggagcgtccgcgcgcggcgtcttcaggaggtggctcggacgcgtgccccgaggggccccgggcagtgcgccgcccgtgcggctgtcccccggccgtggaggagcggtcctccgaggacgggtcccccgcgccacccgccccgtgtcccaggaagcgtggcgcagcgggagtgggtggcggccgcgcgagctgctcggcacccggctctacccctctcaagaagccgcgccggaactcggaggagcagccagtcaccggcgaggacgacaccgacgaggagatggagaccgggaacgtggcaaacctcatcagcatcttcgggtctagcttctcgggactcctacggaaaagccccgcaggcggccgagaggaagaggaggcggaggagggcggcccggaagccgccgagccggggcagatctgctgcgacaagccggtgctgagagacatgagcccctggagcacagccatcgtggccttctgagcccccgggacccgagtggctggagcttgagcagcgggagtccccgaagtgcggccggggcctctcccggccgcgaggacgagccgagaccgtaggcgctgggcgcgtaggggagactggttgctgccgggcagcacatcgccccagaaggggcagcccggctgggccgtggctctcgagtctcatcctgagacctagagttggaggcttattggaagaggacgatcgatcgttaacttttgtatctgtgtgtgtccgtgtgtaagtttgtcttgtgttgagactgttctgtgattctggaatgcaccaccccttccccggggcttgagactttgggggtgcagacagggactttcctctgccagcagcacagaaaaggaagctgcagaaaggctcgaggaaggggagttccccgttcgatcttgggggagagagggactttacacacacctctctctcatgaaagctacgaccgcaccggggcgcggagtggcgttttctcacaggatttcctcagactagagggagttcgtctggagtagagacttgtattatttttctccctccccatcctttctctggcacagaagaagcgcttctaccctgtgattactctgggaaagcagaacattaagggaccttcaattccccacaggggaaaaaaagcttgctgaacttcacagaagagttcaagcttggaaatacggagtttatagagaaaagatatattttttaaaagctctagctcagaacttactacacagtgcttttaaaaagtgtttaatgaaacaaagtttacagacgagctctaagtggaaggaccttatggctttgtagataaggtgactccagtctttgttgtataaaggttgggggagctgataaggtttttgtacagtattttctccttctctgtattgatttttgtataaaaatgtaactttacgtgtctaacacgtattaaatattttgaagcaactccactgcctgtttgtatgtatgtaatcacttgtctgggtttccaacaaggtggcggggaggggcaaccaggctgggaaatggaaggtgtggttcttaatatcagccattcacaggcgagggacagtgttggctgacttgaataagtagcaagaaagacacgtttaagggtttggttttggttttttgttttcacgaacatccccatccatggatactggtatcaatgactgtcagtttgagacttgccactacaattttctcttcagtcatgacagaccagtttggttttctatagtttgatctgatgggaatctctaatattaaataatattaaaagccaaattttgcagcctttccaatatcaaatatttccaccaaaactttgtttccaaaataggtctggtaatgtatagatggtagatcaatttttagatttgaattggggtgggtgggggttagatagcagcttcagaggtcttactaggaccaaacatgaagaaaccgatgaaaccgacttgtctaaatgtttagatccatcactgtggcccaatatatgtcaaggttgacatttgactttagttgtagaaagtaaaaagctctgaaagtgaaattatgtgtatcaaaccagagaaggaaggagaccgagggaggttggctaaatttaattctcatgtagcagaacttcctgatttgctcttgtcacctacatgatgacataagtggttttggtcatgctaaacagatgacagccaaggcaatttaaagagaccgttttgtctaaggcaaaatgttcagtacttaagaggtactctcttaggagcaaaccaattagacacttaagttttaaatataattgctagtacttgaaaagatgccaccagtttctaagaagaatgcttaagaaacagaaatgaggaaagagggaaagggctatatagcctttagacaaaaggagcatatgaaatatgctctttggccatagcttaagctctaattatatgaactatattagttgactaggccattgctttgctctttctgtaagatatggctggttttttaagcaagggagctgttacttttctactccatcaccataatcatgtacataatacatagaataataatacatagaataaaacatgctttaatcagattgttactcaattgtcttgttttctttcagaaattagctacttaagctctattataactactaaagatccattaagtggatcttaaactgaaggtgtccagggccttcattctgaaaccatttcctgttagttactagaacacagttatgcttgaagacctgtctcggtgtgctttatatttgaagggggtcacatttggtgtgaagagagctgtatgtttgttttagatgtgactaaggcccctctgcatcctcagttgcctgccaaaaggaaccatgggaccatgtgtctgcttaatttcgagaagtaaattggaaaaaggttttacttctttgtgtagcatggactgaatgttacaatagcatgagctctgaagccagatttgcctgcattttcctgccttagtcctgactctttgctctgaggacttcatgttgcttcaactctgcttcttcgttgttgtggttgttttcaagtgtaaaattaggatagctgtacttacctcatcgagttgtgaaaattactgagttaatggtcttagaaagtacttcctaagggcagcaaggtaccgcttgcaggtagtccccagcattccggaaggtgaagcaggaggttccccagtttgaagccaaacctgcctacatacagaccttttctcaggccccaaacaagtacctcaactgttattgttgctatagaagtgaggtgtgtgtgtgtaaatcagatgctgtggcaaaaagaattgtgtgcatttgtagggaagaagaaggaggtttctatttttaaacaatcctgtcagcaaatatgagtttttaagtctctgtttctctggacacacttgcaggcatgaagctctgctctaccagtagagttggtcgccgtgtctatctcacaccaaccctgtggctttcttggatggtatctgctctatattcagggaagagtaaacaggagtgaaaactcataaaaggacaaagttcttgttcacacacaagtgctttcagtgacgagtaaaggaaaacagacaaagaacaccatagagccatgcttggctctaagtgcttggcctagaatgtttctaaagccatgcttgtcaataggtctggacatcttgaggcacaagtaggcttattgtaactgagtaagatatagtatgactaaagacagtgtctaacctttccggagcaggaccacattgggagcgtctccattctcttcattaaattaaccattctagcattagaaactgaattcagcacccccaccccaacatgttagatggtcattctaccactgagccggacccccaagccgaaaacttctgacagcgatgcaaaagctagatgcttaaagacatctttggcttttaatcccagtattcaagaggcagagacaggcagatctctgagagtctgaggccagtctgattgatatacctagcaagttttagggcaaccagagctacataaagtagagtctcattaaatcaatcaatcaatcaatcaatcaaccaatcaatcccatgaccagagagtgaaggtgatagaattcagtttagcactttccagccatgccactttgagaaaccatcctttgggggtggggtgtgggagggcattaatgatgggacacttgaagtgctgttccaatgccttggttctctctgtgacttctaactgctttccctgcctttaattgatgatagattcgattttaggatcggggacttggggattgggtcttttaacttctttggtggaacactcagaataaaagatgttagtactgggaatgaagttaatgacagatctgcccccatggcgtccttgggttaacctggatctctccagcttccttggtgtgccgatgtggctcagagccagagtgctatggtctaaagcctcacactgtggcatggagtttgacaggattttttttcctttatagtcattattttattttatttttttagtagagttagttcagttcctgaatatccaaaggacttctggtcttttgccctaaatattttattcttgtcctgtttgtgaaattttcattctcctagactcccttttatcccagcagttcctaaaagaagatgagatgaaaagaaatgctgatccaaccttccgcgactatgaaaggagccttcactgtgaggtgcggtgctgcagtggggagtgaggttggcttcgcagcattcctggcactctgtccagtaatgagcacttcgtctctcagcctttgaactgttgttcaaattaaaagttctaccctgtggaaaggtttgggaggaagaacagcagaagtagagttgacgctaggaatctcttccatcttagctcatgcccttggactttctcagtaacatttcttaagggtacaatagagaaagtacagtgtaaggaaagcgtagtgtaaaatatacatgcctcgtggaatgcctccttcccgaccctgtgtttccccgtgtgtgccaccccctcccccagtgggaatggcatttttaaaaataaaaaaagcctctctagcaatttctctgtcccagagggatatagaacccaagtcatctttgctggactgcgtcctggggtttgtctcaggcctttggaatcctacaggcagagaaggggaagcctctagggactgcattcctgaaagggcctctctccccctctttagctccacagccatctccactactggatggctgcctacttagagacagcggtgaacggtactggctgtcggctggcttgtggaagctgaaggaagaacaagtggccttcactagcacctaccactgagccatccccagcaggtgactaaggtgcaggctctgtctgggatgcttgtgggtaagcctagactaagcattttctctatgttttgagacttagctgccaaggcctgtgtcataagccacacctctaacttagaggaggaaggcaagaatcccttttcccttcctgactcctttaaccaagtttaacctggctccagctctgctttcttccaatcagctggacctctgccaggcttccaagcctctaaggctaggcttctttcaggttttttgagtacacaggggtatgctgaaagtcctgttccacctgcttagtcttcttccctccccacacacctctctcaccccctgccttaccaaggcaccagctggggggttggggtggtggtggggagcttgtttgttctgaggtaacagggaaagcaaaagcaaaagcaaaccaaaccaaaccattctcttgtactctgcaaaccagtgttccttggactccaaactaaggtagaagatgcctcaggcttctctttatttaaatctcttcttgcatcctagataaccatccatcagggcttctcctggttgctactaactgccagtagggtcttgaccttcacagcacagatggttgcaactgtgctgtgggtggctctcctccttttgtctatctggtctttctaagacattgcgctctcctgtgatggtcctcacctactgtttgagaaagagtctgactgctcagggaaggagagcccacgattaggaaatatgacaacctactaagaagagtgaagattaatatttcctgaccatgaaacttgtaaagtctccccaaactctagacactggagatcaagccacagctgtgttggctgcaagttgtcatcctctctctgtgcctcaccggatccctcagtccctgcataatagcaagggtgggtaggggagtctactctctggaaacaggagcagcagctgaaagccagcttggctggtggccagatgctggaaaggagaggcaaagccagggagcccacacgtggactcgacagcctctcccccagcctctccccccagtgtctcccccaacctctccccccagccctcccccagcctctcccccagccctccctcagcccctcccccagcctttgctgggactgcacgtgctgctttatagcacagataatgaatctcagaaccacttggatggggaaatccaaaatgcctctttgccttgtctccccctctgatcaatagaggcctttttacagggagagtggctaggattgggagaggggagccgttatttacatcagtaccagagtcctgccagcgggaagtgagctggaggcctgtggacccagggttgtggggagtgggcagtcacgtgaggaacggccactgagtcaagctctctgcatgaggtctgctggcggccaagggaatttagggcaagcacaccccgcccaccttcttctccctggcttttcttcagctctacctctccttttcttcagacagtttccaagttttatttttggtttggaaaagggtgaaaattccttgacatctgcactcagccgttcccttcccccacaacgtgacctactttagagactagagtgacttttatttttacggccatgggagaaattactaaaagcaaagaagctggagctgagggacttgggacggggactgggaggaggttattgtcctacaatttctgtggttgtcctctaagttccgtctccagactcttttaaggggtgctcgctttgtggcacggtgagaacagctgtaaagatgtggcgtgtgggcaagtttggtgtgggcgattctggtgtgggctggcccagctgtctgcttcacagccttccctcatctcagcatcaggcatctggcttcccagtgcagagcctgctgctcttgggattcctcaatgagagaagagagagttgcatctgaggctggacagaataaatgaggtcacaagcagagtgttcatcttgagtagtatggtgatgactcaaaagaagtactcaaagtcaccttcaccggctgccacgagacccttctgaggacaagatgaggaaccagaaactgaagaatgtgactcaattcaggaagtagctcatttctcttggtttctatttatggtgtgtgtgtttgctttatagttgtgattaaaaagtaaactgtcaagaaaaatacacttatgaaggcacacacctttaatctcagcacttgggaggccgagacaggcagatctctgagctcgaggccagcctggtctacagagcaagttccaggacagccatagttacacagggaaaccctgtctttaaaaaaccaaaaactaaccaaccaaccaaaactaaacaaaacaaattaaagtggatattaagcaaaagacacagaaataaaaacaaaaacagaaaaaaaaaaaacaaaaagctatttctaccaccctcacaatcagatgtgagttcctcagctttaggttactggaggcctagctcccccttgccattcctcccttcacagactgcctccggccatatggaatgatttacaatttgaaaaacatttcttcaggcttctggacctttctatgtcttcccaagggggctgtggtcaagtttagagatgctcctcctagctatgggagtaaagtatctcactcatgttgccagcacacagactagattggaatactagagagatcagctagcatggcccctgttcaagggtagctcacaaggctgggaagtgttacatgttttaaagaaaaagaaactccaggaaaaaggaagagccaaaagctaagatctggggtggagggagcctagaagcgggctgcggccagaagaggcaccatcaaagggaacagggaggagagccatggtacttactgccaaaggaggtgacaacagaaaagaccatggaaaacaaggacagagagaatttcaccgagccaaagcccgtcgtgggtgaaatggaacaggtgctggtagaagatgcgagagagacgtgaggttagagcccatgtgaagggacagctgtggaggctctgagtatgactttcttcttcccctgagctggcataaaagcaaatgagaaacaagatggcagaaaggagctgaggtcaactgaaagggcctgcatctgctgggtagtggtgtcacaggcctttaactccagcaggtaggagacagaggcaggcagatctctgtgagttcgaggccagccttgtctacacagctagttccaggacagctagggctacacagagaagccccccacacacaaaaaaaaaaaaaaaagaaaaggaaacaaagaaaaaagaaaaaaaatgcctgcgtacaggggcaggaacagcaatgctgggggggtggtaatggggtttggacatatatacatatgtacatgtattcatacatatatatatatatcccctaaatatgcatcttttagtgggagcaccttctattctgtaaaataccagagacactaataaattactctggggaccttgttagtttcagcctactatctcctcttcactcccaatcgacaaggacccttgcagtgttaactctaacctatcagttggcaaggtaacaagccaaactgctgtaggagtcaggaaataaaaggatggcttcccgaagccctagtgtcaccactaccatgcttaaagagagacatttctgatgtaccaacgcctgtgtacactaggtgtttaagacattggaatgcaagtatattccatgaagaaggtatggtttgttagaaaacacctgcagaaagcacacatatgcacactttgtatgtgcacacgtgagcatgtacacattaagtgctcctatttggaaaagcagttatgaatgaaaaatttctccttccacccctcagtctgacctcatccttctttcagtgtgacagaggattagtcggaggctgcaggcaggttgggacacgtctgacgaagaggttccggatatcaagaggaaaggaggagagccaagcagcgttaggtcagttaaggcaactggaaggagagaggaaaggagtgtgggagagtgggggacggatggggaaggcaagagagacagatgtctgtgatgatttcaagagacacagaagactaaaataggctcagagtcagaaaacagggagaatgtgagaagtaggaaaagtaggaaaaggtaactgaactgcagagtgtgtgagagaagcctcgcagagctgagaaacagcaaagttctccagagcacggggcaaaaacataaacgaaggaatggctccacgtggtgtctggatcatttcctgttaaaactatgacagaaatgtacaaaccagcatctttgttagactcctgccccagcgtttcagaaagctaaggtgaggtcctagctgtccgcatttgcctaggccacccagggacaaaaatgaaacctagagctcaaaatacctccagtctgtttgctttctgctgtaattagctgaaacgattgctataaacaaacagatcatctatctccactcccagatcctactgtctgcatccagggccttctggattgtgtctggttctcctactcatatcccttcgaagtaccaggacaacaaagtttgcctctgccctctcattccgctggtgaacacatctgaacgcttgttaaacatacagccttgtgtctacactgtagctcactcccatgcctgcttttcagtttctgccatcactgcccttgactttgaacactcaggtcaatctgttgttttcccctagctctacctggtaactaagaggttactcatcttacaatctaatttggtgatgttatcagttcctgataccccatgccctctatgaacccttctgcctgttggtgagcctcctcttcagccatcactgcttagtctatgagggagctgggtacaaagatgaagaaagaacttggtgactgacactaaggaaaaggatggagacattgatcattataattcagatggaatactctaattgtagggtaaaaagtctgagctcatttacagtctgaaaactcaccaaaccccatcaatccctgatctcaaagccccaccaatccctgagtccgaaaacccatcaatcgcctaactcaaaagcccaccaatctttgggcttgcttcaggctcagaacttgaaatcccaccaatcaccaccctggaaagctccacccccaggaaaccctatataagcctgttccggtctctgctgcttctcactgaggcagccactgtcttaggtctttcccaggaaatctctcgtgtgaggtttcttgtgcagcatgactgtggttttccttgactcctgactgctaggatacttctcctgccagagctgtgatatattgtgtaacacctacaataatgatttgggaatgatgagggaagcttaacccagagagagtgctaaggaggggaggttatttgatttttaaactgatttccagatggaatcagctaagttgggaatatgaggaaaatcatttcagactgataggagtggcatgtgcaaaggtcctgaggccaggagagttatggctgtctgtgtgccttaactgcttcattcatgaagggtcagacatagactcatggattaagaatgatcagactacaaaaggctatgtgtgccagatgggaagtattggtttcatcttaaaagatggtggaatgcttgcctgaaaacaagtggccttgggcgccaaggaaggcttttgagaaagagtagaatccagctggatacacatctaggtctaacactgcctgaaacagaagttagaacaggggcgaagagaaaagtctgtggcagaaaggggcagctagaaggcttcgggcagtaatccagttgagaaactgggtgtggtggtttgtaatccgagcacgggaggtggaggcaggaggatcaggactttggcagcaacctgaaacccgtttatgtatttaaaatgggtattacatttaagtttgtgtgtgaatgtggc

SEQ ID NO: 218 - DNA, 2109 bp, Mus musculus
gctcagtttagagtccggctcagaacggttctgttgtctgaagggaagcggcggagggggactacgcgtcaccaggtcttttctccaccgagctttcagacgccgagggtacaaccacagaggaagacctgatcccgcctacagctcctctcgcagcttcagaaggcaagcaggcgttcaccctatcgtctggaagcgaaggcaggatggagttcaagctggaggctcaccgcatcgtcagcatctccctgggcaagatctacaactcgcgggtccagcgcggcggcatcaagctgcacaagaacctcttggtgtcgttggtgctgcgcagcgcccgccaagtctacctgagtgacccctgccctggcctctacctggctggccctgcggggaccccggcggtgccgccgcctcagcagcctggagagcctgtagccgggccaccctccggctggggagagccgcccccgccggtcgcccgtgccgcctggccggagcccgagcctcagccgcagcctcagcctcagcgtccctccgtgtgccacacgcccggagcgggaagctcagaaccggtggccgcggtggccggatcgggggaagctctccggggcggagaggaggactcggcggcagctgcttggggccgcgtggagcgtccgcgcgcggcgtcttcaggaggtggctcggacgcgtgccccgaggggccccgggcagtgcgccgcccgtgcggctgtcccccggccgtggaggagcggtcctccgaggacgggtcccccgcgccacccgccccgtgtcccaggaagcgtggcgcagcgggagtgggtggcggccgcgcgagctgctcggcacccggctctacccctctcaagaagccgcgccggaactcggaggagcagccagtcaccggcgaggacgacaccgacgaggagatggagaccgggaacgtggcaaacctcatcagcatcttcgggtctagcttctcgggactcctacggaaaagccccgcaggcggccgagaggaagaggaggcggaggagggcggcccggaagccgccgagccggggcagatctgctgcgacaagccggtgctgagagacatgagcccctggagcacagccatcgtggccttctgagcccccgggacccgagtggctggagcttgagcagcgggagtccccgaagtgcggccggggcctctcccggccgcgaggacgagccgagaccgtaggcgctgggcgcgtaggggagactggttgctgccgggcagcacatcgccccagaaggggcagcccggctgggccgtggctctcgagtctcatcctgagacctagagttggaggcttattggaagaggacgatcgatcgttaacttttgtatctgtgtgtgtccgtgtgtaagtttgtcttgtgttgagactgttctgtgattctggaatgcaccaccccttccccggggcttgagactttgggggtgcagacagggactttcctctgccagcagcacagaaaaggaagctgcagaaaggctcgaggaaggggagttccccgttcgatcttgggggagagagggactttacacacacctctctctcatgaaagctacgaccgcaccggggcgcggagtggcgttttctcacaggatttcctcagactagagggagttcgtctggagtagagacttgtattatttttctccctccccatcctttctctggcacagaagaagcgcttctaccctgtgattactctgggaaagcagaacattaagggaccttcaattccccacaggggaaaaaaagcttgctgaacttcacagaagagttcaagcttggaaatacggagtttatagagaaaagatatattttttaaaagctctagctcagaacttactacacagtgcttttaaaaagtgtttaatgaaacaaagtttacagacgagctctaagtggaaggaccttatggctttgtagataaggtgactccagtctttgttgtataaaggttgggggagctgataaggtttttgtacagtattttctccttctctgtattgatttttgtataaaaatgtaactttacgtgtctaacacgtattaaatattttgaagc

SEQ ID NO: 219 - protein, 357 aa, Mus musculus
REAAEGDYDGLFSTELSDAEGTTTEEDLIPPTAPLAASEGKQAFTLSSGSEGRMEFKLEAHRIVSISLGKIYNSRVQRGGIKLHKNLLVSLVLRSARQVYLSDPCPGLAGPAGTPAVPPPQQPGEPVAGPPSGWGEPPPPVARAAWPEPEPQPQPQPQRPSVCHTPGAGSSEPVAAVAGSGEALRGGEEDSAAAAWGRVERPRAASSGGGSDACPEGPRAVRRPCGCPPAVEERSSEDGSPAPPAPCPRKRGAAGVGGGRASCSAPGSTPLKKPRRNSEEQPVTGEDDTDEEMGNVANLISIFGSSFSGLLRKSPAGGREEEEAEEGGPEAAEPGQICCDKPVLRDMSPWSTAIVAF

SEQ ID NO: 220 - DNA, 22994 bp, Homo sapiens
ccaacaccccactgacacacatgaaaacaattctagccaggcacactaacgggataattcaccatgacacacactcaccccatcacagcacagacaagttcaaaatcaaacagaaaaagtcccagactaagaaaaagctactcgggactgtgacctcagaggcccccatgtgattctaagactttccaagagttaggtgagcccctgaaggaaatgggtgggaaggggcaaagaccgggaacccaaatcttatgcttctttttttttgagacagggtctcgctctgttgcccaggctggagtgtagtgatgtgatctgggctcactgaaacctctgcctcccaggttcaagcaattcttgtgactcagcctccagagtaactgggattacaggcatgcgccaccacacccggctaagttttgtatttttagtagagacggggtttcaccatgttggccaggctgatctcaaactcctgggctcaagtgatgtgcctgccttggcctcccaaagtgctgggattataggtgtaagccaccgcacaggccaaaatcttatgcttcttaatagggcaacaccaccaatcactttataactacttggttttcttcctagaccaatgctcatgtggaagcatggctaatcctacttgacattttttttttttgagacggaatttcacccttgttgcccaggctggagtacagtggtgcgatctccgctcactgcaacctctgccttccaggttcaagcaattctcctgcctcagcctcccaaatagctgggaatacaggtatgagccactgtgcccagctacatttttttttaatacaatgatctttcagcattttcaggaaactccaaatggaatgatctcttattaatagaggagttgggctcagagaactatgtaagtgataatgataaagggaaggatatgagagaatgcctattttacatttttcctcaaaagagctcagactgccttataaacacaaatctactaatccgccacacactagctcctggttagccagcagatctgaaacttccttttgcactggaggatgtgtttgtataaatacttactcagaatttgcttagtcaaaatgagcatacgatgggttagtgatttagggtttttgaattgaatgaacattcatgttagaatttagatcagctgtgttgatctaaagtgaacttgactaatgaattagaatatgttctattagccactacagttagaataggaggagggggaagggggcaagattttcttattggctgaaagaaatatataggtggtccctaaatgagctgctgataccctgcaaggttttcagtgcatcagtaatccacaataaacgtttaatcagaacagagtgggcaagcaattagctcagtgataaaaatcacacatttgtaaacaccatggcaggaaaaggaaactgtttaaaatcaacttattttttgtgaaaaatagcttttatagggaaatggtataatgtagaatcatgaaaaattacgagctaggctaagataaaatgtatttgcagtaatatttggttaatctaccactagaataatttatgtcaagtaccttttttatcctctagttggctgcgtttaaatattctggcctcaaattttaggaacccattaattaatccatttattcaatagtcattcatcccctgatacaaacatagcaatattcagggtgctggttacagggagcgcaggatgcaaaaaagtgtaatggagcatctcccagcactttttttatttatttttcgagacagagtcttgctctgtagcccaggctggagtgcagtggtgtgatcttgaccccacctctccagttcaaacgattcttgtgcctcagcctcccgagtgagtagctgggattaccagcatgtgtcaccacacccggctaatttttgtaattttagtagagacggggtttcaccacgttggccaggctggccttgaactcctgacctcaggtgatctgcccgccttggcctcccaaagtgctgtctccgagcacttaatgctatttggaaatgagaactatatccacataaaagttaagtaatatgagtaaacaaaatataatacaaaacagaaatataagggataccacaagatagtgagtgctactgtggttttaagtaacaaacaactgttggattatgagagagagagtgtgtgtgtgagcacacaataagcatcaatgggcacagaagacttcctggaggaagtgatgtgcagaatttgggcgggagggaagatgatttcttctttaagaaactagatgagatatatacttttttttttctttttttgagacagagtgtcgctcttgttgcccaagctggagtgcaatggcgtgatctgggcttactgcaacctctgcctcctgggttcaagcgatttgcttctggagcagctgggattacaggcacgcaccaccacgcctagctaatttttgtatttttagtagagacagggtttcaccatgttggtcaggctggtctcgaactcctgagctcaggtgatccacccgcctcagcctcccaaagtgctgggattacaggtctgagccaccgcactcggccaagatatatacttttgattagatctgtctagctgagaaagagggcatttatgttgttcaggatagtagaaaggttggaaagattagcctaggttcatagaatcatagaattttggacctaaaatgattctaaaacaatcagctaggacaccagttctcaaatgtggatgcacgttgtaattactcacggagcttttaaaaatttcagtgctgggtttcaccccagagactgatttaactgatctgggtgaggcctgggtgtctggaagtttaaaagttccccaggtgattctaacgtacagccttagtttgaggtctactgatttagtccaactccccagttttatgagaaaaggaccaccttcaaatttgctgacacacagctggtaagagctgccaggacacccaatgagccccagctctatgcaccactctcggttgtttgtctttgacaatgtattgtgtagtactctggagaccacgccagagaattggatttttgccataaaaggtcatgggaagccactgagggtttttgtgcaggaaaatggcacattaaaaacaaatggtcctgcaacttctagaaagacatcagaattgaaaggaataaatgcaccctaacaacccaggggattgatgttatccatgtaaatactcctctgaaatttaagttttcatgtttatattttgaattaaaaactaatattgtgataatttctatgtcatggcattcaaataaggagaactgtgctcctcgaacttgtggttgtctgtttagaaagaactttcttctggccaattagttctgttgtttacatttttctttgattttctccttaactctacaactatctaagtgttttatgtttcatttcttttaaaatttatcttttctgtcctttccctcttccccaatcaaggacatttgttaattgcccacaatatgctcatgcatatttatatgtctacacctccctctccccttattgtccccagggcagtattgtccaatagaaatataatttgagccacatatgtaaaattttataaacagattaaattaatattaataatctattttatttaacccaatatatctaaattatataatttcaacatatagccattataaaaatacaaatgagatattttacattctctttttcatcctatgtctttgaaacctgctgtgtattttacggttacagcacatatcaactgagatgctagattttcaaaattcaaaaacatgacacaataagattgggtttcagggaacacgtattctgcttcaatttttaaatttaaatggattaaaattacataaaacgtaaaatgcagttcctcagttgtacttaacacatttcatgtgctcactagccacatgtggctagtagccaatgtagtgaacagcacaggtctagggttttatatggtggtgttttctcattctgcagcttgataggatcctaggctcattttaatgagtttgattgctctacccttattgaagaatctgttttccttaggagtcttaaaggagacagaatctgaaaaagttgatcataaaaacaatttaaggttctctagtggccggtgcagtggctcacgcctgtaatcctagcattttgggaggctaaggcaggcagatcacttgaggtcgggaattcaagaccagcttggccaacatggtgaaaccctatctctactaaaaatacaaaaaaattaaccaggtgtggtggcgcacgcctgtaatcccagggaggctaagacacaagaatctcttgaacccaggacgcagaggttgcagtaagctgagatcccaccactgtactccagcctgggtgacagagcaagactctgtctaaaaaacaaaaacaaaaacaaaacaaaaaccaaaaaacagaaaaaacaaaaaacaatttaaggttatctgaacaaagattcaaaatttagtacaagaaggtgggcagggttgtaagcagtttaggaatgaaaatggagagaagggaaaaagacaggttttgatgtgcattcctagtcaaacaccatttgaaaatttaaaaattatatagaaaatcaagcagccagggccaggcaaggtggctcacgcctgtaatcccagcactttgggaggctgaggcgggcggatcacaaggtcaagagatcaagaccatcctggccaacatggtgaaaccctgtctctactaaaaatacaaaaattagccaggcatggtggcgcacgcctgtagtcccagctactcgggaggctgaggcaggagaattgcttgaacccgggaggtggaggctgcagtgagccgagattgtgccactgcactccagcctgggcgatggagcagggctctgtctcaaaaaaaaaaaattaaaattaaaattaaaaaaaagaaaaatgaaaaagaaaatcaagcagccaagagaaaaaaaaaaaaagatgtacaatatccagaatagtgagagaaaaaaggaacaaattaaaaagtggatttgggccaggtgcagtggctcatacctgtaatcccagcactttggaaggccgaggcaggtggatcaattgaggtcaggagtttgagaccagcgtagcaaacatggtgaaaccccatctctactaaaaatacaaaaattagccattgtggtggcatgcgcctgttgtcccagctacttggaagactgagaggcggaagtttcagtgagccatgatcacaccactgcactccagcctgggcaacagagtgagattctgtctcaaaaaaaaaaaaaaaaaaaaaaaaagtggatttgtctgttctcagaagaaaaaaaggagtatcacttacataaagtgctaataatgtatttttatagatcttttccccctaaatatttagtatgtcatacaaatgactatttgattgcataagcaattttgacactgcccctcaccccccaccaattgaaaatgtcctaatattgaaaggtagggacagtgcaaataacttatttttctttcaccaactcccttcttactaattgttacttctcacatagctaccgtgtgcataatctgtagtgggtttgcacagactagacgtaatttaaggcaagttaagatctttaatcatctgataataatacttagccttcaattagttgtgtaaacaagggcgtaaatagtgtcaacagcagtgggcagagcagcctgtgcgacaggaatccacaggcttgagcccagatagcgcctgagtgacctcagacagctgtggaaacagcagagcccaaagctccttgtactaatctgcctgtgcccagcagaggggtgaaaagacagaacagacctgtgggaggtgctctggccttttcttccagagcagttggttcctctgttcttctgacaaccctactgtttctgatcatgctgcgaacttctcttttcaactgacaaaatctcagagatggatgatggcaaattctaactcagttcctgcttgctaaatcttaaaagaatatgctatcgtcctgctttttttggtaggtggaggtgaagtttcctgatcatacgaactcgggccctccagacatgagttctaaaggttccatttcgttggctcaggatcaaagaaaatcctgataatgacagtgataatgtgcaacttgcaagtcatcagacatttattaagcacctattatgtggtacagcagaaaaagcattaaaaattcaacaagtactaagagtgtacctactatgtgttcagaactgtgctaggcactggtgtgataacaataaccataataacaacaataactaagaattataagtgtttatatggtgctaggaactgtactaagcaatttagttatttttattattcccatttttcacaggagactgaggcacaaagaggttaaataacttgcctatataagcaaactaaaatatggatttcccatttcacctagaggtgagatgactttccaaaggtcacacagcagtgagaagaggagccaggcaatctagccccatgaccccacattggagctttaagtaggttaaatgtaaatgaagataatgatatctactttcagaactttataaatgtgctaaataatgcatgtactatgtctagcacagtgcttggtaaacattattattattaggaattcattaatccaagtgtataatcactcagtatgcactggtacagccaacccagttgttaaagtattgaaatgtttccatgtcagttgatagaacctctgccctaagcccgtgagtagcccccttactggccatgcagcccctcttgcaggagccctccaaacccctagcattgtaagggcctccaggaccctgttctgatggttagtgcctgtactgcaccagctgttatgtattttcaccatatcctggctacaaatatgagctgggctcctgccttcaatgagggcatagtctgggagggacactgggcatgacaggagaaagtgatgagggcaatgatgaaggagtgtgctgagtacagtggtggatgatggaaaagctcagctcaggcaggtcagaaagccttcatggaaggcaagaggcttgacactagcaataacctgcctggatgggtgagtgggagcatcccagatcatcactaaagttcttttgtctctcagtttcctcattttttttttttttttttttttttgagatggagtcttgctctgtcacccaggctggagtgcagtggtgcgacctccgctcattgtaacctctgcctgctgagtttcagcaattcccctgcctcagcctcccaagtagctgggattacaggcacgtgccaccatgcccggctaattttttgtatttttagtaaagacggggtttcaccatgctggccgggctggtcttgaactcctaacctcgtgatccgcccacctcggcctcccaaagtgctgggattacaggcatgagccaccatgccctgccagtttcttcattcttgttgcctccacctagttcaggtcttcacaaccctttgcctaaatttccacaagagctttatgtgtgctcttctatgcaccaactgttctagaatctattctgtgcttcccttactgaacaacctttagtaaggtccctgtggtcctatctcctcatcaaggcacccacaacccactatcatgcagcctcggcctctgtttctagcctttcccacttgcttttgggcatgtgcccagcacaactgcaaagtaagatgttccctacactggactctgttgctcctgctgcttggaacttgtggatcctacctcagaggttttcagcaccctcttcagatacaacttctttggtgaaactttctcccatctatgttcctttcttctcccagcctcttctcccaccccagggtagtatgtggggtagtgtgttctgagaactagcctacattgatagcttattatatgccaggtgctgttctatgagctttgcatgtgctaccttgttctaccctcacaaaaactctaagaggtaggcattattattattatatttatatttattttattgtattttttgagacagagtctcactctgttgcccaggctggagtacaatggtgtgatctcggctcactgcaacctctgcctcctgtgttcaagcaattctcctgcctcagccttccgagtagctgggattacaggcacctgccgccatgccaggctaattactgtatttttttttttagtagagacagggtttcaccatattagccaggctggtcttgaactcctgatctcaagtgatccgcccaccttgtccttccaaagtgataggattacaggcgtgagccaccacacccggctgattattttgtaataaaaaagacggcagcacagagaagtgaagtaattttccagaggccatgcagcaagtgaaaggtgaagctgggattccaacctaggaagccagcctcctcagcctgtgctcttagccattgctttatagtgactaataacttgcaaagaaaaagagaagagaaaaattcttgtgtcattactcaatatatgctatttggttttgtaattattcgtgtcattattttatatcttcctctacgtgggctgaaaattcctagaggggaggaactctgggtctcagagcctgctgtctcagttaccatcagttgtgggcacaggtaatgctattgagccatcacatcctctggagattgtgaattggtcatgatcaagcccactcttcactggtatttttcctaaataaattcattgcttgaccaaccccggggcaggatcaggcccagggttccacatggactccaagaaagcagtgcttagttttctcattcagattgtggctgagaagttgtcatttatcgtctgtacaataacgcagatgtgtatgtgacttcccccttttcagcagtggagacactgaagcggcctgaggttatttacccagagtcctcaggcaggtctgtggtggagcttcggtggaactaactggaagtgactccatgtttccagtccaggaccctgggcaaccccgtggtaattgtgtcctgatatacttataaggaccagtagatggactaagttgttgactgaccagaaaattctggaactccctagcactatatttttaccttgacacgaaatgaaattatgacatcatcatgggaacacaggacttctttctttttattttcagaacttgctcgatttttccaagggtggactggtcagtccttgtaatggaaaaatggaaatggaaaaaaaaaaggaaaaaaaaatcattgtggagaacctgtaacatcttccatttaacttatttgataactgggtttgttctagaatctagagaacaaagtgaaagatgccagctttagaggacaaccaataactttgtatctagacacgattccttgaaaagaagccaaaaacctaggcaaaaacttttagaatcccccttttctttggggttagaactgacagctgctaagagtgtatgtgactctagcggggaaagcggctcatccaaaaataatgattgccaaatactttgcagtaatactatttgttatccaggggtgtcctccgccgcgtatggccaccatctctatttttgccagggttgaggggggtcgcttacaggtgtggccggcctggaaacggtggtgtggctggtgagggcggagtcgatcagggaaggatcaggactttatggcagaacagagtccaccaccgtgttcggaagaaagttcgaatattttgttcgctttggttccggcaagccatcgcacaagccagaatctgtaactccaaacagtagcgctctcgagcaccgtcccgaacattcactccccacgggcctggtctgcggccgcaagccgtcgccccctttaagagcctgctccgcgggactaacgttcgaacgggccctggcgcccctcctcgggctccgattggccgtgcgcggcgcacgagggcgcgccggccagccccggaacggttggcggcccttcgtgattggcggtcgagaagcctatataaggcgcggggcagccaggctgccctgtttagcgaccggacccgaaacggggaagttgtcttgtttggagaggttagtagagcagcgcgcgcgtcaccagagtcgtttctcttcggagtcttaggtgatcgagggtgtgcccagggggcggacttgtttgcgcctcccgttccctcccaatttccaaacgtgtcaccccggcgccgacggccctgtgcaggggaagcagatggagttcaagctggaggctcatcgcatcgtcagcatctctctgggcaagatctacaactcgcgggtccagcgcggcggcatcaagctgcataagaacctcctggtctcgctggtgctgcgcagcgcccgccaagtctacctgagcgacccgtgccccggcctctacctggccggtcccgctgggaccccggcgccgccaccgcagcagcagcccggggagccggcggccgggccacccgccggctggggagagccgcccccgcccgccgctcgtgcctcttggccggagaccgagccgcagccggagcgctcctccgtctcagacgcgccgcgggtaggggacgaggtgccggtggccacggtgactggagtcggggacgtttttcagggcggagaggcggacgcgacggaagctgcctggagccgcgtggaggggccgcgccaggcggcggccagagaagccgagggtaccgccggaggctggggcgtcttccccgaggtatctcgtgccgcgcgccgcccctgcggctgccccctaggcggggaggacccgccgggtacaccggccgcgaccccccgcgctgcctgctgctgcgcgccgcaaccagcggaggacgagccccccgcgccgcccgcggtgtgccccaggaagcgctgcgcggcgggggtgggcggcggcccagcgggctgcccggcgcccggctcgaccccgctcaagaagccccgccggaacttagagcagccgccgagtggaggagaggacgacgacgcggaggagatggagaccgggaacgtggctaacctcatcagcatcttcggttccagtttctcgggactcctacggaaaagccccgggggcggcagagaggaagaggagggagaggagagcggtccggaagccgccgagcccgggcagatctgctgcgataagccggtgctgagagacatgaacccctggagcacagccatcgtggccttctgagcccttggcccccctgcggggaggaggtggagcagcgggcgtccccgaagtgagggccaggcccttcccggctgcgaggacgcccagagaccgcgggcgctgagcgcgttgggcagactggttgcctctgggcatcgcaaactgcccccgggcgcatctggcttatctggagacctgggagcttgaggctcattggaagaggacgatcgttaacttttgtgtttgtgtatgtctgtgtatgtaagtttgtcttgtggcattaagactattttgctcttctggaatgcaccactccttccccagggtttaagagattgggggcagacagggactttcctctgccggctgcgtggagaaggaagcggctaaaaggtttgggccggggagttccccattcgttctccggggagggagggactttacacctacccctcaccggaaagctagacccgcttcagggccaggagtggcgtttccgcacaggatttcctaagacgagagggatttagccaagagcacagacttggattccttctgtccctccccacctttctctcccaatgaagaaacgtttatatcctgtgattactctaggaaaggggcgtattaacggtcctttgcttccccgcaggggagaaaaagcttgacgaacttcacagaagagttcaagcttggaaataatggagtttatagagaaaagatatatttttaaaagctctaggtcagaagtactacacagtgcttttaaaaagtgtttaatgagagtttacagacagaagcccgaagtggaaagaccttatggttttgtagatatggtgactccagtctttgttgtataaaggttgggggagctgataaggtttttgtacagtattttctccttcgttgtattgatttttgtataaaaatgtaacttctacgtgtctaacacgtattaaatattttgaagcaacgtaactgcctgcttgtctgtaataacctgcctgggttgggagggaagtgggaggagggaaaccagggcctgagctagaaaattgaaggtgtggttcttagtatcagtcattcgcagactgaggacattgtttactgactccactaagtatcaagagagacacgtttaatttttcctcctagatcagaggactgctattagatactaatatcggcgacctgtcaggttctagaaacctgccactacaactgccttttctaaggtcagtttagaccaatttgtcacccaatatgtgggtgtctaatactaagtaatttaaccaacttttgaagccccgcttatccacaaaaatgtttttcagcaaaactttgtttcctgttaagctattaatacgggtcatcttttagctttgtaattgaaaaaaaaaaagtttagatagtagtttaccttaaaagcccattcgaactgacataggaagatgaaagagactgacttgtccaaattgtcaggtccacctctgcatcacagtggatgtcaggatgtaaattttcagtttttctcttacatctagaaagtaaatatattgctgagagggaaattgtttgcatcaaaccagataaggaaggagggctaggcaaatttagttctcatttagcaaaacttcctgatttgttttgttacttaaatggtgacatcagtgtttggtcatggtagacacttaggtgatgatagccaaaacatccatcgattttactaaaatcactgccattaagagagttttttgtctcttcatgttcaatgtttgaaaggtattcagtaatctatttcagaagcaaatcaattagggaatggtgtttattaaaatacggtacagttgccaggactttaaaagatggtactggtttctaacaacttacgagtatatagggtatttaaaagatgggagagattgaagaaagacaaaggtttaaaggtcatagccttcgagcataagaggcatatgaatggtgtcttggccttaactcccaattatacgaacttctgttttagctgaataggccagtgcctcgtgccttgatatttcggcaaatctattagtggttccttaagcatagggaactttgtactttatgctctgtcgccataataatgtatttatagaattaaacattctcaaattagggtcttgttaaactgactttttctttcagaaagtagctacttaaattctgttacagctacaaaagatccatcaagtgctgactgcttaaactgaagaaggtgtccagggccttaattctgcaaacatttcctgttgttagaaagtatgatgcttgaacagcgatctcagtgtattttatgttttaaagggggtaacgtttggtgtgtttaagagagctgatgtgttttggatgagactaaagttgatccttggttttacattaagatgaacctgggtccatgtgtctgcttaaagaatgtaaattggcatacttgataggaggataaagctttgtaggaattagaaaagatcattctcttttttgttgcagaagcagtatagtatagtagttagagcatgggccctggagccaggctgcttggtgtcttcctttatttatttatttatttaattataaaaagtaaatataaagtgagctatgttgaccaggttcgtcttgaactcctggcctcaagcaatcctcctgcctcagcctcccaaagtgctgggattacaggcatgagccaccacaacctggcctgcttgggtttttctatcttggctctgccacctagctgtgggtccttggacaagttacttcatctctctgtgcctcaggtttttcaaatgtaaaattgggataattggatctgtctcatagggttgtgaaaattaatgagttaatgctcttagaagagtacctcatatgtaataagcacgcaactgttaattattgttaatgtagaagttaattctgtgtataaatcagatacactgtggtcaaagatttgtgtgtatttgtaagaaaagaggagaatggagaatctatttttaagtggtcctatgtgtgaatgctgggttcttttattcctctttttctctggacacttggcagtcaggaagctttgttctaccaacatagttttgttgctgtgaatgtctcacaccaaccggatgatttttccaattgtatcaaacaactctattttcagggaggagtaagctgaagtgaaaacaggcaaggagcaaagttcttgttgacatacaaatgctttctgtggatgagtaaagaaaaaagtagcccataaagttatttttgcttgaattattgcgcatggaatgtttaaaacatgcttattgataggttctggacaagagccttcccaatgccaacctagggctatcacacaaccaaatcagatgcagtgtgactagaaacgatgccatggttttagtacctaaccacttcttcaccactctgggagggacctagtctcttgatcaaattaaccttagctctggggtgtaaaaaaaccttctgactgctgcgtaaaagccagatgtttaaagtgctttccaacaagtactccaagaagatcacattaatagggaataaagtctgggcgcggtggctcacacctgtaatcccagcactttgggaggccgaggcaggtggatcacctgaggtcaggagttcaagaccagcctggccaacatggtgaaaccctgtctctactaaaaatataaaaattagccaggtgtggtggtgggaaaaaagagaataaagggataaatgttagtaatgtatttttttttttgagacagagtcttgctctgtcacccaggctagagtgcagtggtgtgatctcagctcactgtaacctctgcctccctagttcaagcgattgtcctgcttcagcctcccaaagtgctgggattacaggcatgcaccaccacgtctggctaacttttgtatttttagtagagacggggtttcaccatgttgaccaggctggtctcaaactcctgacctccggtgatccacctgccttggcctcccaaagtgctgggattacaggcgtgagccactgcccccggcctagtatgtacttctcaaccatgttgttttaaccctgtcttcccttttagaaaccatcatttgttcttggcgatgggaactaatgatggaaagcctgaattgctcctccaaggtgactgggttttctttatggcaccaaataacctttccattccttctactcatcactgattggatttgggagtgtgaagtgagaggaaatgggtcatttgacaactttggtggaaagcttctcagaataaagatgtcagaaatattgggaatgaaattaataattataaaactgttccatcttatcactgggttagtctgagtctctcttactgcaacttactaggcatgataacctagcctcagatcctgtgtgatggggtcgacaggctaatcccactgtgatatggcatttgatggacatttatttccttgtacttttttaaaaaaaagtagagttagttcagttcactgaataaccaaaggatttctgatctcttgccctaaatattttattcttctcctgtttgtgaattttttattcttctagacttccttttatcccagcagtccctgaaaaaagacaggaatgaaaagaaacgctgatccaacctttccgtgactatgaaagaggccattactatgaggtgcagtgctccggtggggagggaggcctgcttcccaggattcctggcactctttccagtaatgagcagtttgtctctcagcctttgaaccattgttcaaatttaaaattcaacccagtggaaagccttgggaggaaaaaacatagaaggagagttgatgttaggaatcactgtgatcttaacacatgcccttggagtttttcagtaataattcttaagggtacgatagggaacaaatgtggaagagcagaaagtgtgaaaggatacgcacatctagctgaatgcctccttcctgattcaaacacagtttttcccaatgcctgctaccactgctccctcccgcagtgggaatgggggttttaaaataaaatctctctctagcaattgctgtctcccagaggaatacagcccaaagctctttgctggactacagcctggggtttatctcagacctctggaatccttcaggcagggaaggagaaacctccagggactgcattcctgaaagggcctctcctctttcctctccagaccagcagcagcctctatcaccggatgctgcccacttatgggcaggtgaaatagagtattggctatcagcttttggaagctgcaggaagaagggctggtacccagcactgctactgagcatctctagcaggtgattcttttaggggactggcatagagctggcctggtgtattatattagtccgttttcacaccactataaagaaatacccaagactgggtaactgacaaaagagatttaattggctcacagttcgcatgtctggggaagcctcaggaaacttacaatcatggtggaaggggaagcgggcacgtcttacatggcagcaggtgagggcacgtgtaagcgcgggaaaaactaccatttataaaactatcatgggaacagcatgggggaaccaccccataatccaattacttctctcccctgacactggggattacaacttgagatttgggtggggacatagaggcaaaccgttatcatctgggatatttgcagtaaatctactttttatgtaataaagttttctgggacctggtcacaagaagcctctaggcctgtgtggtaagccatatccctaacttacaggatggtgagacagctgccccttttccatccatttagcaccaaggcagtcctggtcccagccctctgctttttccctatgaatggggcctctgcaaggttgccccagcccaatcgttctatcagatgccaagacaaggctcctttcagtttttctagaattcagggatgtgcggaaagccatgtgttcccacctgcttgttcttcaacccattccacctctcaagtcggggcagagcagctgttggaaacttgcatgctgtgaggtaaaagaaaaaccattttgttccctctgtgcaaacactgatgttgtctctgaagtgtaggatttcctttggtactctctacacttgatcctcttccagaatccaagataccatccatgagtttttctctatgttgatccacatctggttcgttctttctagccagtcacaggatctgcctgtcttctgtggcacagatacttccttcagcgctgtagctgttttgtctttccatttctgtctgtctgggtctttctctgtctcccctccctccaccctctcttgaggactctcatgttcattattttcctcgggaagaatctgactgctaaggagagaactgtgagtgggaatgctacagcctgctaagaaggagcagagatttggatttcctgaccacgagacttgcaaagaatctccagagactctgggccctggagatcaagccacagctgtgttagctggaaatcatcctctcactgtgtctcaccagaccgccaattccatcataatagcagggggtgggtaggggagtatacatcctagaaacaggagcagcagctgaaacccaacttggcttgtggccagatgcaggaaaggagaggcaaagccaggggagcccgaacgtgggctacaaggcatttccgctccccaccccaacttttttttttttttttttttttttttttttttttttgctggaactgcgtgtgctgctttctagaacagataatgaatcacagagctgctcagatggagaaatccaaaagtgcctctttgccttatctcccccttctaggctttgattgattaatagagactttttacagagtcactaaagtgggagtggggagtcctcataaccccctggggtcgtgcagcagaggtgaccagcgggaagtgagctacaggattgtgaagtgatgtggggaggtggaggaggaactgccactcagtcaagttctgctcaagaaggtctgctatgggccgagtgaatttagggcaggagcaccccacccacttttttctccttggcttttcttaaactgcatcacaacctcctgttttcttcagacaatttccaagttttatttttggtttggaaaagggtgaaagtgccttggcatctgcatttatcagctagcactctgtgtgacctacttaagagactgtgtagtgacttttctttttagggccatgggagaaatccctaaaagcaaagattcagtgtcagaaactgaagttgaggtatatgggatgctctgcttgggtgattatgttctacagctcctgccggtttctccccgcacccccctgcctcttcagaatgcattttgaaaggcgctcctagcctgcactgcagagagcagctgtaaagatgcggtgtgggggcgattctggtgcgtgggctggcccagctgtctgcttcccaacctttcagtcacctcagcatcaggcatctggctgcctaacatggagctggcagcttgctaaggctcctgaatgccctcaggagatgaagcggggagtctcttactttaccaggcagaaaagactaaatgaggtccagagagtgagcagcaggtcatcatgaatggtcaagtgaggacccaagcagaggcagtgttagaatcagccctggactgattccttgagacctctctgggcaaagggctgtggtcttgactctgaacatgtgactcacgatttgaaaagtcattcatctttgttggtttctatttacagttttaaaataaagtatccacttgcctcacaattgtgattagaagataaattagtgtttgtaaagcaaagctaaaagatataaacaactcactcctggatcccatcaattaagcattgacaggaacacccagaagaaactcatgaatagggaatacaaagatgcagacaacaggaccctggccctcacgaccattacattccagttaagacgcaaaacaacatagaacccccccaaaacttgatagtatgttaagtgtcggctagtcgcttgcttcttaaagtatggtccagggaccatgggtatcatctgggagcttatgaaaaatggagagtatctcaggccccacttcagacctactgaatctacagtttaacaagatccccaggtgatcaatatgcacattaaagtttaaagagcagatatttccactgatctcagaatcaagcatgaatttctcagctttaggtcactcaaggtccagctgtgtcttgttatttcttctctcacatgctgcctccagccatacgaactatctgcagtttaggtaacttatttgcaggcttctgggcctcttcacgtgctgcttcctagagaggcatggtcaagtttacagcttaactgtgagaataaagaaactacagggaaggaaaaagagcagaaagctaagacctagtgatgaggaagcctagaggtaggggctagaataggaagagggctctgttaaaaggaacagtttgcagagaggtaggagtagagtctggctgctgtgaagggagatggggcaaagaaaatgtccttgaactaagactgccattagtgaattattattattatttgagacagggtcttgctgtgtctcccaggctacagtgcagtggaacgatcacagctcactgcagcctcagcctcccaaagtagttgggactacaggagcgcaccaccatgccaactaatgtttatattttttgtagagatgaagtgtcgccatgttgcccaggttggtcttgaactcctgacctcaaaagatcttcctgccctcagactttcaaactactgggattacaggtgtgagccactgtgcccagccacattttttttttttcttttagagacagggtctttgttgcccaggctggagtgcagtggtgcaatcatagcttactgcagccttgaactccttggacaaagtgatcctcctgcctcagcctcccgagtagctggcactacatgcacacgcctctatgctcagctaagttttaactagtgaattttgacagaggttctgtagaagatggtagagaaaactagattataagtgagtggaaagatgtgggggccctggctgtagctccttccccaagaaatttggcataaaggcaaaaaagaaccaggtggcagctagaaaggatctggggtcaattgaaagggcctgcacatgtcttaaggcagaaccattgggtgcagaaaacagctagagtgacggtgaatgggatttgaatacataaactcctaaatatgagtctcttatcaggaggaataaaccctttctttttcttctccggtcaaataaaaggagacaagagacactaataaatcactccagggaccttgttagtatcagcagtctgcattcccctcctcaatcccagctcacgaagaaccttgcagctgaaactccagcataccagttggcaaggtaacaaactgctaagggatcctggagaataaaaggatcactcctgaaaccctagtgctgccagctactaatctaaagatagagatttctgatgcttcatcccctttatagattaggagtttaaaacatattggaatgcaaacatgtgctatgaggaaagcaggatttgtcattcttgccagcagaaaacacacatgcacacacgtgcacacgcgcacttgtagtctgttctcatttggaaagccagttatgaatgagcatggtttcctgggtaaaaattttctcttccttccctccccaccaagtctgacctcatctgtcattttcagtgttatggaggattagtctgagactgaaaacaggttgagacatgtccaaaaaagaggctccggataccgagagaggagggagagaagccaagcagtttgaggtctcttaaggcaactgacaagaagatcaagagaagaatgttaagagtaagagaggagagtggagtggacggatagggaaggcaagagagacagatgtctgtgatgatttaacgagaaacacgagattaaaataaattcagagtcagaaaacaggaagaatgtgaggagaaaaaggtaatggactgagaactgcagtgtatttgataaaacatagccccgttcagatggaaaaacagcatcatcccccagcaaactcctctggaacgtgggggtggggggaatgcaaaagaattaatagctccacttggtagtgggatcctttcatgctaaaggtgtgaaagtgatttacaaaccggcatcattactggacctttgtcacagtttgctgaaaagataaggtgaggctctaacttgttagtctttgcatgcctagaccacccagagacaaaactcaacccagggctcaaaattcctccagtctgtttgctctctgtcctaattagtgaagctatttctaaaaacaaacagatatctcgtctcacagattccctcgccccactgctatctgcatttagtgccttctcctgacttgtctgattcttccactcgcatttcttctcaggtaccagggttgcaaatcttggccttaccccctacctccaccccccatcccccatacctcttaccaacacatctaaacactcgttaagctcacagcattatcttcacaatgtagttcacttctattcctgctttctagttcccactgataccatcttcgttcttcaaacacttcttagtctgttctccatttcgcgtcaaagcccccctcacccccaccccagccctaccttataactaatggattactcatctgacagtacagttttggtgatgttatcagtctctgactcaaaagcctctaataacttcccatattctctatgaactcctctgcctgccagtcagcctttcatttagccatcatttattgtctactttgtgtcaggcactgggtacaaagatgagtaaggaagttgatatctagagggaagagggatgaaaaatggatcattacaatccagggttaatactactgtgatataggaatactgatgaggaatacttaacccagacagagtgtgagggaagggttcctgcgaagaggaggttatttctgcgctgagtcgcaaatggcaaattggacttagccaagtagggaataagggggaaatcattccaggcagatagagctgcatgtgcaaaggccctgaggccttgagagctggtaggagctgaacatcacaaatgcttccttccttctgtttggagcacgggtgtgaagaatggccctgaggattaagaggggtcagattgcaaaacactgggcatgccatggaagggggtttggtttcaccttaaaagatgtgagggagccaaggaaggcttttaagtggggcaggggagcatggtccagttagagggctgttcaataatgcaggtgagaaatgattggggccaatagcaacagtggcacttctcctgaggcatctatcgtacattgccttgttatttgtgtacatattttaaaatttcctgaaatgtcttacctctcttattctcaccaagttgtaaactctttgaagataagtgctagac

SEQ ID NO: 221 - DNA, 2994 bp, Homo sapiens
gcggccgcaagccgtcgccccctttaagagcctgctccgcgggactaacgttcgaacgggccctggcgcccctcctcgggctccgattggccgtgcgcggcgcacgagggcgcgccggccagccccggaacggttggcggcccttcgtgattggcggtcgagaagcctatataaggcgcggggcagccaggctgccctgtttagcgaccggacccgaaacggggaagttgtcttgtttggagaggttagtagagcagcgcgcgcgtcaccagagtcgtttctcttcggagtcttaggtgatcgagggtgtgcccagggggcggacttgtttgcgcctcccgttccctcccaatttccaaacgtgtcaccccggcgccgacggccctgtgcaggggaagcagatggagttcaagctggaggctcatcgcatcgtcagcatctctctgggcaagatctacaactcgcgggtccagcgcggcggcatcaagctgcataagaacctcctggtctcgctggtgctgcgcagcgcccgccaagtctacctgagcgacccgtgccccggcctctacctggccggtcccgctgggaccccggcgccgccaccgcagcagcagcccggggagccggcggccgggccacccgccggctggggagagccgcccccgcccgccgctcgtgcctcttggccggagaccgagccgcagccggagcgctcctccgtctcagacgcgccgcgggtaggggacgaggtgccggtggccacggtgactggagtcggggacgtttttcagggcggagaggcggacgcgacggaagctgcctggagccgcgtggaggggccgcgccaggcggcggccagagaagccgagggtaccgccggaggctggggcgtcttccccgaggtatctcgtgccgcgcgccgcccctgcggctgccccctaggcggggaggacccgccgggtacaccggccgcgaccccccgcgctgcctgctgctgcgcgccgcaaccagcggaggacgagccccccgcgccgcccgcggtgtgccccaggaagcgctgcgcggcgggggtgggcggcggcccagcgggctgcccggcgcccggctcgaccccgctcaagaagccccgccggaacttagagcagccgccgagtggaggagaggacgacgacgcggaggagatggagaccgggaacgtggctaacctcatcagcatcttcggttccagtttctcgggactcctacggaaaagccccgggggcggcagagaggaagaggagggagaggagagcggtccggaagccgccgagcccgggcagatctgctgcgataagccggtgctgagagacatgaacccctggagcacagccatcgtggccttctgagcccttggcccccctgcggggaggaggtggagcagcgggcgtccccgaagtgagggccaggcccttcccggctgcgaggacgcccagagaccgcgggcgctgagcgcgttgggcagactggttgcctctgggcatcgcaaactgcccccgggcgcatctggcttatctggagacctgggagcttgaggctcattggaagaggacgatcgttaacttttgtgtttgtgtatgtctgtgtatgtaagtttgtcttgtggcattaagactattttgctcttctggaatgcaccactccttccccagggtttaagagattgggggcagacagggactttcctctgccggctgcgtggagaaggaagcggctaaaaggtttgggccggggagttccccattcgttctccggggagggagggactttacacctacccctcaccggaaagctagacccgcttcagggccaggagtggcgtttccgcacaggatttcctaagacgagagggatttagccaagagcacagacttggattccttctgtccctccccacctttctctcccaatgaagaaacgtttatatcctgtgattactctaggaaaggggcgtattaacggtcctttgcttccccgcaggggagaaaaagcttgacgaacttcacagaagagttcaagcttggaaataatggagtttatagagaaaagatatatttttaaaagctctaggtcagaagtactacacagtgcttttaaaaagtgtttaatgagagtttacagacagaagcccgaagtggaaagaccttatggttttgtagatatggtgactccagtctttgttgtataaaggttgggggagctgataaggtttttgtacagtattttctccttcgttgtattgatttttgtataaaaatgtaacttctacgtgtctaacacgtattaaatattttgaagcaacgtaactgcctgcttgtctgtaataacctgcctgggttgggagggaagtgggaggagggaaaccagggcctgagctagaaaattgaaggtgtggttcttagtatcagtcattcgcagactgaggacattgtttactgactccactaagtatcaagagagacacgtttaatttttcctcctagatcagaggactgctattagatactaatatcggcgacctgtcaggttctagaaacctgccactacaactgccttttctaaggtcagtttagaccaatttgtcacccaatatgtgggtgtctaatactaagtaatttaaccaacttttgaagccccgcttatccacaaaaatgtttttcagcaaaactttgtttcctgttaagctattaatacgggtcatcttttagctttgtaattgaaaaaaaaaaagtttagatagtagtttaccttaaaagcccattcgaactgacataggaagatgaaagagactgacttgtccaaattgtcaggtccacctctgcatcacagtggatgtcaggatgtaaattttcagtttttctcttacatctagaaagtaaatatattgctgagagggaaattgtttgcatcaaaccagataaggaaggagggctaggcaaatttagttctcatttagca

SEQ ID NO: 222 - protein, 323 aa, Homo sapiens
MEFKLEAHRIVSISLGKIYNSRVQRGGIKLHKNLLVSLVLRSARQVYLSDPCPGLAGPAGTPAPPPQQQPGEPAAGPPAGWGEPPPPAARASWPETEPQPERSSVSDAPRVGDEVPVATVTGVGDVFQGGEADATEAAWSRVEGPRQAAAREAEGTAGGWGVFPEVSRAARRPCGCPLGGEDPPGTPAATPRAACCCAPQPAEDEPPAPPAVCPRKRCAAGVGGGPAGCPAPGSTPLKKPRRNLEQPPSGGEDDDAEEMGNVANLISIFGSSFSGLLRKSPGGGREEEEGEESGPEAAEPGQICCDKPVLRDMNPWSTAIVAF

SEQ ID NO: 223 - DNA, 80105 bp, Mus musculus
  misc_feature (1)...(80105): n = A,T,C or G
agacagagagagagacagacagagagatgcagagagagacagacaaagagagagacacagagagagtcagacagagagagacagagagagagatacagagagagagatagacaaagagagagacacagagagagagacagagagacagagagacagagacagagagacagagagacacagagagatacagagacagagacagagacagagagagacacagacacacacacacacacacagagagagagagagagagagagagagagttaaccaattgcacctcacctgcttggggtctgctctgattgtgttttgggtcctggctaaggtagctaggacgacagcccagccagccatagtccctattatcactctttgcagcatcttgacctcttagcttttgcaacccacagggattagacctcattttctgacaaagcagtaagatgctggagctggggccagggacagtataagacccaagctcagaggtgtgaacagtgggacaatactgggtgcccttcatggtcaacatttctcccacccagtctgtcctatcccacttctggtgtatccgtggtaacaggtttcatttagagcaattcaatccaatctacaggctgaggggttggggtgcacaagaaccactggcttgtaagccaggccagaggctttggggtatggcaccagctccccacgtccagagacccagtgcatgggtccagccaggagttctggggcatctgcttcctgcacctcttcttcttcccatgtcaatagggtcagtgtgaatttggggatggttggtgagagagacatcgaggcacccctagaagggaaagagagttccttgatcaccggcctcggaaactgtcttggcagccagccagatgcagtcctgtagacggaaccatagaggctgtagtggcagctgtctttatttctgggcttcaggcaaacatctcctttttctcccactgcagatggggttgaaatgggagccctcaaatgtctgctattcacctgcccatggccagctttgtagctcttcagtagacaggtccactgaggtctgaggtatgggagggagtggcccccagtaccaaggccgtgatgttgagggagctcctgcttccacctagagcccaaccacaggtgttcatgagctcaggtgctgatggagcagaagggcccacagagacagtctgtccactgctgactcaggtgcacacagttaggtttcgacctcatttgaggagagaaagctcattgattcagaaagggagctggcttacaaatggttgaagtcaggatgatctccagggatagatagatgacatgagtgtatgtgtcccaggaatgcttgccagttcaatcctgtcactggaaggtgccaggggaatgagaccctggacataggggatgcaggccagctcgagcatgcatccctgtgtccctctgtctccctattgttggttgagcctgggctgtggttgggtcagggagaagcctaagtgtttgcacacacgatgtgtaccccaaggggtgggagtgagagacaagaggtaggaccatgtgtccccagggggatttcccacttcagttggtgctcagatcctggcttctccccacccacacggcttcttttccatttgctatatcagtctctcatgtgcatgtgtgtgagtgtgtgtatacacgtatgcacatgcatgtgggggtgtgtgagtgtgtgcatgcatgggtgcgtgtgcatgtgtgtgtgagtgtgcacatgtgtgtgtgtgtgcatgtgtgtatgtgtgtgtgagtgtgtgcgtgtgcagtgtgtgtgagtatatgcatgtgtgcgtgtgcatgtgtgtgtgtaacatgcacgtgtgtgctcgtgcatgtatatgtgtgtttgtgcactcgtgtgtgtggttcttttttttcctggccatgaaagcaagtctgactcagaggagctgctctggaaagtgcaatgtaaactatagagaagccagcgagatctgcagccatcatgcacatgtccctttagtctttatgagcgggtttctgacttcggcctggtggagtgttgtggctgcctatttctcccacatcagtccaactgcagtttttcagtgtgaacccattctggctcaggacacagtccttcatttttttccccccaatcttggagctttcttctggagcctgattctgtgtgtttttctgtgttgtgtgtatgtgtttgtgtgtgcacatatgcacatgtgtacatttgtgtgtgtgtgtagactagagattgtctttggtgtcagattgaatcagtcactagacaagttttctattatttatttattttaaagatttatttatttattatatgtaagcacacggtagctgtcttcagacactccagaagagggcgtcagatctcattatggatgattgtaagccaccatgttgttgctgggatttgaactcaggacctttggaagagcaatcaatgctcttaaccactgtgccacctctccggctctactttttattttttaaatttaattaaatttaattttttattatttttgttgtgagatagagtctcactgggtttcccaggctgcccttaaatgctaccctgcaacccaagcaggtcttgagggctggacccttctgccccagtcttctgagtcccgggaccctcaagggctgccttctgcacccatgggtggggtgctgcgggtgtcgcctagtgtctagcacgctttgaagtgaagcctctgccagtgtcgctgcaggggttgggggtggggtcgtgtagctgtgcagctcagaaactctttatttctaggagactgcgggtgtgaggtagcatttgatgtcctccaggctctttgaagcttctatcttcagcttcctgagcaaccaagggaggggcctgcctgtgtaagtgccaatgaagctaggagggagcctggtccagcctggagcctgtgggctgcccattgcctggtgcagaaacagttctctctctctctctctctctctctctctctctctcacacacacacacacacaattacatctgtctgtctgtctaatctgtgtgtgtgtgtgtgtgtgtgtgaacatgtagcatgggtgtgggggtcagagaacaacttcaaggacttggttctctccttccaccatgtaggtcctaggaatcgaactcaggctgtcaagcttggcagcaaatacctttagcttctgaaccatctcgctggccccagaaccttttctagaagtgggtaggatgcatggactctcctctgggagatctgtgactaggaaagtagcccaatagcggctgctgcttgtagggctcctcaaggttggaggtgtgggtgagatagggtggtagagggggaaactctgggcaggagggcctggagctgctgtgggatccttctgaggaggagaggctgggattcaggggggagctgctgagtgccgattggctgacagaggagactctaagccatttaaggagctgaggctcagaagctggtatgtcaggaagcctaaggcatcctatcctgacaaggctccaacctggggtggacttgaagagatagctgaccaggtgctgccggagacttgaactttcagagtctctctctatggctggacacagggtgctcctttctctcagggcttgttcctgggctgagccttgtctttgggaagaagaagaagtatgcccagcatgctagattggcctctgtggccgagtactggttctgtcttgtctttccatctttgggcactgggctgagtggttgcaagagacatcctcctctcagcacagtttcctgatgtctactcaggataccggattggctttcagagggaggcgggagtctctctagagggaggtgtaggcagagtggtcaagtctagctagtgtctggatccaagagatctctgaggagggctttcctaggcggccaccagaagttattgtggggtgttcctggtgggggggggtgtaactctttgggcaggaaaggagcaaagaggcatggagtcctgcctagcctactttacctctgttctcaagagtgaggatgtagcttggctgggctcttgctctttctgctgagatggctctgtgggtctggtacacagttgatactaaatgggtatcagcataggcctcttaggcacacaaacagcagatcccagcaggcagggaatgtgggcagtgaggaaagcttaacctctggagtctatggatcctgctttctttccgggccgtggctgggaccattgtgtctggttctgagctctgttgagctgccgcctccttcttttcaaacacggaattctgttttggagactcgggttcgtcccttccctgagtgtttgcctacctgcccagcttcaatctcagcccattgccaagcgagtgtggccgtggctccacctgagctcagcgtcagccttttctgtcagccaatggcacctactccatcagagcgtttgagccttaaatcctgagcatcttttccatcacagtacccacccacccctggggtgcttctctgtgtctcaggctcaatccacagctcctgcctcttcggcttctgccccatctgaacaaccctcaggccatgctctctagccaattgggggctagtgatcatatagcctgcttcctcctccaaccctcagacaaacacacaaaattacacatgaacacacatgaaacatgttacacacacgtgtgcatggccatccattcatccatctgtcttggagttcacctaccaacatctcctcacctgcgtagctaaagatcttgctgctctggctgcttctttctgcctctccagactccttctggctcctgctctggtccggctcctgcgccaagcaatcagaccctgcctgtctcaagaacctcctgctgggcctccagatcctctagaatctaccaccacaacttggttgcatacttacttacactgaccactgggcagaggcctcttctaggcagggtcccagagtgagcatcagccaggcgccctgggcatgcgcagagaacggaagagtgatcctgtgaatgagtgattggcctagcagggatggaggagcatagagtagacctggagctggcccggggtaagatgagagggacagagatcatgttccgattaccaaccctgtgctcattggggactcctgaaaacagttctgtgaggttgggggacccagggcccttgtgagaccttctcttgtgctgcctcttgtccccagctccacctaggcaagcaggggtatatgcaggtctgaagttctgggtgagggatatagtggaaaggcagaaaggggaggatagcgattcttccatgtacaccctggcccagctggggcccaggatatccttacccagtgtccaggcaagggacctttcttagacatcttggcttaggcaactgaagacccaccctcaccctgggcctagagtagccccagcactatccatacttctcctctgatggcatggtggtccatattgtattgaatactgtagctaaccatcagccacagcatcccagccccctatttccccccagccccaaattgtcctagaattatgcaggttgggagaagtccatcttccgttacccactacactcctacctcccacttgagctagaggggcctgatagtgctagtctcatgagcagctctgtaggtcccgggggttagaggagctcagtgggtttgccttggagacacccaacatagtattccatctgcttttctagcctgtggctgttccttgcttaggcctggttaccaggaatgccctgaccatgggtccaggatggtacagaagtgttaaggctctggcacacagaaatccctgcccaagctcacaggtgccatgtcccagaagacctatcaaaggaaggggctgtttgggaccagtccccaggtgacttcctttctaggtgcctcagtttccttcacacagaaagctgtggtcaggaaccagtgagatgcagaagagccagcagcacccatagagatacctctgaccctcccagagtgtccttacccctcctccttggcatcaggtcaacacagataagtgtctggaggccttgcccttaactagaggccaggtctccttcccatctccacagtgctggccagtcctggacttcctttcctgggtgccagacctcaggactcgtgtgtgggaagcagaagccaggggaacagagagccgactctgcacgttatcttgatttctgattgagaacgggacgtcttaagaccagatgctggtagagaacgaaacacacactttctaaatttagccagttgagaattgcacatttacccaattagacgtattgatttggcgagcgtgtgcttgctctctccacggtgccccggctgcgcctcttgctgcctctctctgagcatccctgcggggcccatgtgtccacagtggtgaccgctggctgaaatcaaggtctctaggctgttctcctgccctgggccatctgtcttcatctagagctgggccctgctgtcagcaggggagtgtctcagggtgaggggtggtggggccaagcctaggtgtgttcttttccaccaagttgggacagtacctgaaggccctccaaggctacgcctgcttggtgcatatggggaaaaaaatgggcatatggctctccacttacaaggaactcatgcttgtacaaggaaaggtgacttaaagtaatggcgaggccatgctctgggttgtcatgaaaggacaaataaccagaaaggattcccaaggtttgggaaagaggcagaaaggagggacataagaaacaggaggcagcaggaagtctcggcatcacagctttgaggggagggtgtatgacagattcagtgtcccaacagcccagtgggtcttttggagaggccagcaggcctggtgaggatgagagtgagggctatattagagacctcaggcaagaaggcttactgggacactgggtcttgggaagctcttgggtttcagacagtggtgatctaggaggcaggctgtccatttactttggctagaattacatgcagagcaccttactgtcacaggaggtgcatatacctgggatactctgtgtgtgtgtgtgtgtgtgtgtgtgtgtgtgtgtgtgtggtgtgtgcgctcgtgcacgcgcatgcacgtttatgccagggatcctgcttctaacaactggcctcaatctaggagagacctttccctacctctgacaaagccatcactatctggtgaaggcctgtaagtgggcatggtctggaatgtgctgcctatttcctgggtctgcacccagctctgggggtctctaagcttggagaggggtgctttggacgatcacactgaaaagagtccttggagtgcctggggacactccacaaagcacaaagggaagccataaatgtcagtgccagtggttacttggccagtgccctgttacaaagttgcagaagccaagaaacattggcgccacaggtgcactcatggaatgctcgtggtgtccctgcaggaatctcatcctggcctatgtctggctcttgttagcacctggcacataccacaaggatctgcttggacaagagactgggactcaggtagccttgcagcttcaagaccccctgatttcttctcactcacgcatactttattttactttaaagattttatttttaatagtgcatgtgttcacgcgagtgcaagtacctgtggggctagaaggagatgtacaattccccggaggtatcagtacaggcatttcagagctgtccgatgtgggtctgagaatggaactcaggtccttttcaagagcagcacaatgtttacccactgagccctctgtccagctcttcatgcatgctttgttaatctcttatgctctcctggtgtcctgggacagctcatgctgtcaaggtgggagcggaagatgtgcttctggcctggaaagtgggaatacagagaagttcctggagcttgcattacagaaaaggaagccaggtgaagtctgagggaatatgtgtaactgtgaggccatggcaggcagagaagtacagagttagtaccacaggcccctgggaaggagttctgataactgcctccacagcatggctcaggaagccatggcttttggagcatagctctggtcggctattccataatgatgatgatgatgatgtcaagggtttgtggctgtggtaggaatgcctggtgctacttaccctgggcaatctgagcacaggcatccttagccagatgaggtatcccagaagctatgcctaatagagcttaacagctatggtgtgtggatgtgtgtgtgtgtgtgtgtgtgtgtgcacatgcacgtgcgcaagagagcctagagagcagagcaccttggagttcagctgccccgtaagtgtgatggatgtgtcatctctcatgagtcagctttggtcacaggatctgtggcagagctaaggaatcaatgggtgacttgaggagagtcaaggatctgtagagactagtgagtctgtgtcaggggaaactaaggctgaagaggaggtactgaggtctcatggatctgtagaagctgggacacgaacccttaagtcattagaccaaggtccctgagtggagaagacatgccctgggacaaaaagagcagggggcattggtctcaaaggacacacccttccatatatgaggcaccatgcttcatcctggcttagaaacctgctcccagtatgctgagaggggcctcatctcagattcagtcttccttctgctgggtagcattcagggttccagtctcctcattgcttatacctccttcttggtctggctgggatctcccactccattttgaactccccaggtcagaccacaaaacatagggtccaggaacccacttggtgtaaaagcacacagtacagagaattgtacacactacagagtaagtgcttagattctcagtggtttggggctggagtggctggctggcgcgatgggaccctatctgggccatagttgttaaggtgggctgaagagaaaattgcttctcagccccgaggcaaagcatacccaggagggggctgaggactctacagacacaggagtgtgcctttccccctctgcctctccaaccctgcctgcttacagacagtgggatgcgggcagagctaggggctgctgagaagcctaacttggcaaggaggtgccaagatggtctactgttgtagacaccctctgggacctgataaagcaagaaggggctctgtgggaagccaggggctggtcagagaggggccaggactttacttgcatctcctaccctggtcctctctccaggcccgaatggcggtttccaagacagcagcaccaagccccatcccactctgacccagaaacacttctcctgaagggagctaagggatactcctatccagctcttggggctgggctattaccctttctccctggtcttgggactttcagcgctatgcatgtgctccctgatctctgggtcccggggagaggtgacctagaccctcctcttcaagcacctgggggcgaagagcaatgacctcccgctcagctctttgctttggctgcgtggagcagcctcgagatgtgggaagtgctctcggccccgccccctcctggtccgaggctccggccacgcagaggcgaggggggaggctgcgggtgcatctttgcagaaagagtactttggttgcggcggacgcggggcgggtgctggccccgctgtcctctcggctcccagtctctgcgcgttgcgcttgcccgcggttccacgtcgcgccccgctctacgcgcagcgcagccgagggccccccggccccctcccagcgcggggcgggcagggggtgtggtgcgggcggcacgagtgacagcgcgctcctcgcgcggcgcctccacggggctcagtgtcacagcgccgaacgcgctgcgcgcacagtccgccgcgggccgccagccctggcgaagcgatgtcctcggaaccttagcctcagtcagagccaggccactgaccacccgagtccgcgccctcgtggccacctcgctgctgtcaacgcggagacaatggacgcgggagccgccccgcagaagcacagtaggtgccgctcctgttgctgcagacgcagggctggggcgggtagacgcgcgggggcgccgctgctcctggcccgggtcggggctgtgctcagggagggggcacttgcggttccagagccgcatgcgggggcccagctgcttctcttagccgtttgggcacgggtgcgcatgtggaatcgcagcaggacaggcagagaggtccaaggctctcttggtggcctcaggtactggatgagggatccaagagccaccnnnnnnnnnnnnnnnnnnnnnnnnnnnnnnnnnnnnnnnnnnnnnnnnnnnnnnnnnnnnnnnnnnnnnnnnnnnnnnnnnnnnnnnnnnnnnnnnnnnnnnnnnnnnnnnnnnnnnnnnnnnnnnnnnnnnnnnnnnnnnnnnnnnnnnnnnnnnnnnnnnnnnnnnnnnnnnnnnnnnnnnnnnnnnnnnnnnnnnnnnnnnnnnnnnnnnnnnnnnnnnnnnnnnnnnnnnnnnnnnnnnnnnnnnnnnnnnnnnnnnnnnnnnnnnnnnnnnnnnnnnnnnnnnnnnnnnnnnnnnnnnnnnnnnnnnnnnnnnnnnnnnnnnnnnnnnnnnnnnnnnnnnnnnnnnnnnnnnnnnnnnnnnnnnnnnnnnnnnnnnnnnnnnnnnnnnnnnnnnnnnnnnnnnnnnnnnnnnnnnnnnnnnnnnnnnnnnnnnnnnnnnnnnnnnnnnnnnnnnnnnnnnnnnnnnnnnnnnnnnnnnnnnnnnnnnntcccctcccccttcccctcccctgcccccctctcctctgccttccccttccctccctctcttcttccttcatttccagtccctctctatgctggctggtgacagttgacacatatgaaatgatcatagactacataccaaatcaggcctttctcccatgatcctcttgatgccttaccatggaaaggtaccagtgtgcctcctggctcgctaatgccctggattctggagcaatgcctagctattcccgtgactgacccacagtacccaaaggaccaatctaggggtgcccactggtgtccttccaggatccctgaacaaagtcccaacttaagagctgcagaggggagtctgggtacggtgggcagcagggggtgagaggtcaagcctgctttctgagctgttagtggctcagaagctgacctgtatatccttcccttccccaggccccggttaccccaacacattacctctgcacccattccacagccacactctccacaagtccccatgggaaggaaggactggattttagctagaacgagagagactgagagagactcacgcggcagctagtgtgtgccatcaacttacctgaggactccctaaggcccagccttttagtgtccttgtccagtgtaagacagctgacccctcacactcttgggacaggagaggttggagttggccaatagtggctggacagtgtgcgcccgccatttggagctccaggggttggtttggtagctttgacgccctgcaattttgcccatccaggaggccgagtaagcctgagacggaggcaggcctgctctgtgtcaccctctgtaggactggtacattgccattaggtaacagccgggtgtgggtccagagagtgtttagtaagggtgggttctccactggggaactaggtaggaattctcctccttgctgcttaggctaggcctctgggtcctgggactcctgcaggtcttgctccttacaagtgagagaggcctcctgcaggccctcccagggataggaagccctggtgcctggggttctcagcaccaccaccagtagttcaggttacaataatcccccaccccacactcggcttgctgtaatcggcagcagccaggttcgacaatatgagttgtaattggattttaatttttaatgcctgcaatagatgaagagctacgggccaatttgtatagactcagttactctgcacctaacaggactacttcattatctgccaagcattgcacccgccctgcctcctgctcccgggagggaggggtagtgagcctggtccagagtttgtgccagtaacctgaaggctgcctgccacctgctgcagtggaggagctgcagagggaacgggccacctcccgtacctcagagtgggctggagaccagtgctgcctacccctcttcctgtaccactgcagctcccagtgtagctttctgggctctgtctgcccttggctgccgggttgtcctctagggcccaggcatcaatatgtccagccaaaactgcagctgccatctcttggccaggactcttgaccccaagatctgtaggcacaggtggccgtggagcctctggactccctggtcaccctgagctgtggatggggaagggaaccaggattgcatgcagtaggtctcccaggtgctagagatgggggagccacagggcagagggcacatggcctccacacagactgagtcttgaataaggagcacagcccttttccagtggttcctcccacctccccagctggaggggtcccagggcgaggcgctcatctgcgaccgccctttagattattcttaggtctgttgtataacaggcagcatcgcaggcagacggaggaagggctcctggagacgtctccagtggcagcagctagccagccgggagtgagcttttgtcctttctgcctgcccaacacaaagggacaaaggaggcgtgttctaccacccagtcctgccaagggctagccatgctgggcagtggggaaggattcagagttgtggggtttcagtgccccttggcctcccagagttctctgggttgagggtgaacctgacaaggagctttcccagactcctgcttctgtagccttatgtgcaaatgtgtgtgtgtgtctgcgtatatgcatgtgtgtgtgtctgtgtgtgcatgttctgtgtgtgcatgtctgtgtctatgtgtgtgtgcatgtatctgtctgtctgcctctgtatgcgtctgtgtgtgtgtgtgtgtgtgtgtctgtatgtgtgtgtctgtctatgtgtgtgtgtctgtgtgtggatgtctatgtgtgtctgtgtgtgtgcctataccctcctcccagggctgtgctgaagcgggagtctgaggacggagcagcagtgcccaccgtggcacagagcttcccaccccttgctcttgctcctctcttccttccccatctgttctgttctccttgcagctttcaagctcatttctggggtctccaccccaacacattggagcaggctccccacacctggtttctgagctcctgctgggtatcagctcccagcgggcagggcatggcaggaggagtcatgtcttatgacaaataagagggactttggagagactgaccggctgattagactatggagcagatgcttcatgccatcagagactgctggaaaggcccccacagatcccagttcatctgcgtcctgtgggcttatggcctgtattacctcatctttcctctttgctagatcctctgggatgcatgcacatacatggatacatacacattcgtgagtatgtgtatataacctacacacacatgcataatctacgcagacctacttccaaggcagaggaacagccttgtgaagaagtgaactggatgttgttgttgttttgtttttaaaatcaagacagggtatcattctgtagctcaggctggccttgaactccagtcttcctgcctcagcctcccaagtgcagggatttcaggcatgtgccaccacacatgctggctctagctggctgacattcttttttcttttcttttcttttcttttcttttcttttcttcttcttcttttttttttttgatttacttattgttatatgtaagtacactgtagctgtcttcagacacacctgaagagggcgtcagatctcgttacagatggttgtgagccatcatgtggttgctgggatttgaactcaggacctttggaagagcagtcagtgctcttaaccgctgagccaccagcccctggctgaccgttttttgttttttgttttggtttttcgagacagggtttctctgtatagccctggctgtcctggaactcattttgtagaccaggctggcctcaaactcagaaatctgtctgcctctgcctcccaagtgctgggattaaaggcacacgcctggctcctggctgacattcttgagacccgttttctttcctgagaccttgtgtaaagagtatgagagaaggaagctgggcaggggctgtagctccaggctgccgagctgttcatgccccatgatcatgactgattcgctgaccttggagagcctagaacgcatgggaaccctgggggatggtgaaggacaagattctgagatgtttctctgtttgcttagggagggcctaagcacctgagatccataccagtacctctagcctagcctcttctcttatcatggagcagcctagatccggactggggtcacttgccagtctggcccttcccgggtcaccaccacacctggtagttgctctgtcctgtgagtgttctccagagctgacacagaagtgttcagaggcgactctaaggacatatgtgcagcccatagataaccttggagttctgtggataggggtggggatggggtaggggatcggtgctctctgcacagatcactctaacaggctatgagcgtcagacaggtcacttagccatctgtgagtccctttgtcttctgcaaaatcgcatctgcagctacctgctccagtggtactgcaagtactacttggactccttagggaagcacatggctctgcgctagactagggcagtctcggagacctgtggtcactgaggacacccccccccccttctcttcatgtcagctagcctgtactctcctcccctggactccctgttgtccatcctagtatgaggattattatctaggttgccggaacaaactgctacacactgatgatgtctcccagcgatgcaccctcacacagacccaggggccacaggtctgacatgttaggtgtaggcgggtcctgctctttctgaaggctctgtgggaaggttctatttgttatcccctggtcttggtcttctatggcacctttctctcttcgcctctctcttctgtggcctctgctttcagctttgcctgctctgtctcctgaaccttcccctttcttttgaggctcattgcttccggtagtcagtgcttcccatacacaggagatgccatggccaaggctcccgagcctcttgccctgatctaccttaccctgccccctgatgccccctagaacgccattctttctgcctttgacatgtgaacaagagcctattgttggaccgggatggctactgatacccttggtctccccaagtagctgtgtagatgctcaggaccctgaagttcccaagcttagtcttgtttacagagatgctttctgaatgcagccgtgcttgtaggttcctgggacacatatgcatatttgttgtccttcagcccacctcagccgtctaccctggtatccccctgcctcagcactgctgagccagaatcagggtacagatctcctgatgctgagtcccacaggctcagaacaggacccggtgcagactggcacatgccgatggtataaagctggggaagtcctctctgccctcatctcatccctgattgggctgccactgtcttcagaggctagcgaagagggctgagccctcccaaatgttattgttctcaggcctccaatcaacgtctatgtcgatagacaggttcagggactacttggcctctggctgagcagctactgcagaatccacttctgtggaaatagtgtaggtgcagtgggccagaggcgcagaggccaggtatacatggtctttgttgttcctgggcaaagtcatgcagctgggtagtaagtagctttttcaggaagatgggacgggaccagcagggtagagacttcaagcccaggactggacagacaggctggatctcagtaatctgagccttgatgccatctcttgtgtagtggactccaatgggcatagctgcccacaccatggtccttgagctcccccaaattcaaatctttcctgtgtggccttagatagctgatgagcagctgcagtctccctcgacccatgaacatgtggataggagagtggtgtcggcccggatggacgctggtatcctgggctctggtccccttgagcccagccctaaggtcctgctacttactgggagaagtggggtggttgttttgcacacggtgtctcagcagctccactgggcctttctgaaatgcccccggaaagccggtggcacctgcccagctgagctgtgtctccgaggtttgtccaggtaggctggctggagccgagatggctcttctggtggcttcccatggtggtgactgatgctggaggagtgggtggattcagtctgcagtggtggcctgagtttcaagttcttcctgaggtttttcaagtggttctctcccttcctggtggccctcctctgtggggcaacagtcctctgggctcctaattaacagatcataaagtgttccactttcctgaagctctgatccactggtgcacacagtgaagatgcagagcaggcataaaagggaccgacgaccaagctgatccccggtgtctcttcttgcttcagaatccccagacttaccattctgttcctctctcagactctctcaggccggctgggtcttctgagaccaagttcaaggtccagagccaccagcctggactcaagttgtctgccactgcctgacattctccaagctggggggttcataagcaaagctttcagtagccatcgcctttgacagagtaggtgcagggacatattgcctccgtaggccgttccaagtggttttgacaggcccctgaggctcctcagtgtttttaaggaggcacaggctggacctgtcttcctctgggaagcctgattccagccctgctccaggctacagctgcctcttacttgccaggaagcaaggaaagtacaggctagcctatcccagggccttctggccatctcagcagaagcatgtgttctggacctctgggagctccacagggctggcaccatggagggaaggtaggtggggtggtccaggggccaggcctacaacataatctctgctcttactggagggaccagttgcctaagactcagttttctcatctgtaaagaaatggatggtgctgtctgtgagaggggattagttggctgtagagaaggtgaaggacctgctagaagacacgggcgttgccagttctgggtttcctggttccaggggaggagaaattagctccaaaaagacaggcttcactcgagccttccctctgaggcctgctgcttggatatttagcgtataatactatcaaccccctggcccctgtcctgggatagactttggtcaatttaatgttgccaaggttccaagacaccattcaactgcctctgtcctgcccagatgacaagctgctaggagttgtgctctaggtcctagctaagggaatcctgtctttctgtgccttctccacccgatacagggatatgcaccctcctcctccaggggtaagactttcagagacaggtgaaaaattgcagccaagaacatggctaatgaagatggatccaagggctgtgccaatccatgcagtcccctgggaagcctggttagctcccagcagcgggaggtgacttccatagacccctgttttcagagcgaggcttttcatcctgttccttcttcgctttctcagccccaaggagtccctgtcaattgatcctacctcattgctgtagctcacagccctgcaaagggacgcagcctaaaagtgtgagaaccgtcccagaacctgaaacctatggccggccacactgatgccagcccttcgtaggggcaagggggatgggtcttaccccccagaatcccacgggcagctggaccacaatgtgctcttggcctcgtcttggctgatgattcagcctcgaactgcaggggaggcactgccgccgtcgtccacatgctggtgcggaagtgtctgttcatattaaaaaaaacacacacattctgagcccgggatctttgtcatcttcagaaatgccatgcctgttaagtaagggctgtgttctgccacaggctgatggggtgggagatgaacagagcctgccacagtctgggcacccagcctggccgctcacctgctccacagcaatccccttacacagtggaaaataaaggggatgcctccccaaggctcctggttttctggttgagtggaggtggggggtagaagtggggggacaaccctcactttgctgccaaactagttggagtatgctctgctgtccttcaaagtcatgaggagcctcacatttgttcaagcttacagaaagaaaaggctgggggtaggggggagcgaggtaggctgtggaccctcagggagcaggccggagtctccctgggagttgcggaggcccccagtccctccactgtgccttgcccagtgggtgagcaatgctgccgcggaagtatctcgcctcgtttcaaaggcagcagctgttgtcttggagtgagccagtgggaaagggctgtgtggtggagacttggagcccttgatcctgcctcttcctgcctggcccaccctgcctgccccctgctcccacaagatctttaggagtggtactgtgagcaggtaggaggcaggggctgtagcctgagattggggctaatactaaagccagagaggctaaggctgggactggggtctgggctattacagaaggctaggctacatcaggcagctaggtcaggtctccacttgcttctctgagaggtgtaggacagccacaggcgagcttcgggaattgcttcagtaattcataaggacaaaagacccattggttggagctccccaaactggggctagaaataagcttcttgggtggtgcttgacccctccaatgcctgttagtccatattggttttgggaggggagggtccttggcagctccctcactcagcctcctgggttcctcagatagtctttctgtggccccagccttgttcatagcaacacacagcaaaaactgttctttgcccagccaggagttccacagagccctgagaggggcttccctcagggagcctgtctgagctgcgctgcccaagggcagagccaggaagatcatcaccccacccccttcccttagattgcagctgagcgagtgcttcatagctgacccgtccaccccacctcctcgggtcaggcccactcccacctcacagtatgactgcaacctcctgctggtctccgatcctgagaggcagctgagacaatctgtcaaagcaaagtatgacaggaacacccctaaacctcacagcaccagagctctctcttctcagggccatgatctggggctgccacactcccctgatggcacacacaccccttcctcacgcagtacaggagacagagacccttgtacatatgtgtttacagctggtcctgtcttgacccccatctgatgacgagaaacttgaaatgggagggagaaggacttgctggggtctcaagccgcttgtggaaggttggacaaggttatccatgtggaagaggcacttcctatgcgcttccctttgtgcccaggagagctgtgggggttgggcatgctgaaaagcaagcagttctgtcaaggatgccctcccacagtgtcaacgccagcccctgtggaagggcatggatctccttcctctatcacctcttctgtctgctcctctgtcccagagctccattcttcaaggagagaagagctacacacagcttctcgctcttgctgtcttttttccagggaccttgaagtgcttggtagcccttggccaccgtgtctccctgcagcaaactcttatcagtggacccaactggtacagttcagttaagacccaggagtcctcacttaggactatgtcccctgcacaccccatgttggggtgcatggctgtgacttctggtgtttcaagattgtgggggaacagaggggcaacggctgctacgaagcccttgttatattctccaggtttgagcagagtctggggtcccctgagcctgcagcaggagggccgtcagctgcgtgatcagaggctcaaaggctgagcctcacgcactgcactgcggctgcaggtccgacaagacacccgctatgaagcctatttcgtgatctgccagtttctgagcaacagttttcaggtcaggcctgtggctcacttctccgaggggtggggctgtcgctggtcacagcagaagttcagagcagcagaggtccctgtggcttgggaaggtgaggggcgagtgttaattggtctgttggcataagggccctctggcctcacgtggggcaggaaaaattctggaaggtcagtcttttcaaaggtaaagagcctgtgttatccaccctgagtgatccactcatgtctgttagccttctctttacagtcctcacaggccagcagtccctctggctggtgccctcagtgggttttggagaattggtgaacagcgataggtctgatggccagtctaggtgtcttattattggactgccactgccacaggtgacgctgtagaaggagctgtcttggctatagagccccgctccaggcccagccaagcattgccttcttctctagctgctgtcagaagcccgctctgctgggctgttccttctttcttccttcctttccttcctttccttcctttccttcctttccttcctttccttcnnnnnnnnnnnnnnnnnnnnnnnnnnnnnnnnnnnnnnnnnnnnnnnnnnnnnnnnnnntccctccctccctcctttctttcattctttctttctttctttctttctttctttctttctttctttctttctttctttctctctttctttaaaagatattttctttattttacattttaaatgttattccctttcctggtttcccctctgaagaccccctgtccccctcctcctcccccttgcccaccaacccacccactcctgcttccctgtcctggcattgttccttcttatctttcagggctgttaatggacccaggaggagactcaggttcctggacctggccttctctcccatcacttgtttgattggcatccaggatcccccagtggccacaacagagagccctgtggcctatataaggccactgggggaaaactgtgttgttcccaccccccctcttagtcacttacgcagaggtagctgggtggcctcccgtggtgtggtggtgtgggagccctttggagttggttgtaaaggatcaaggccacagactatccatttcctcaggactgaggctgaggctgcacaccttgagtggacccccccttgagtggacacctcctcccctttactagggggagggggatggtctgatgattaaccctgagctttcctgatggggccctgctgggccttgctcccttgcagtctgggggatgggtctaatgagttttcccaacagctcccaggggtcaggagaaatgaatgggcttgtcacttgcaggccactaagctggcccagcctcctcagcatcccgactcttgctcagtaattctaggcaggggcacatctttgaagatcgctggcctgtctctgtgccggatttggatctgtgcttattggcaatgttggtgtgacagagtgactttaggctcctgggagctatatgtccttgtgatgaatagggagtgtgctctgagagcctgctcttcaggctggagtgtaccgctatgtggatttcaaatggggaaaccgagggcgagagagaaggtcgtacatcggttcctttccacaggctctgtggggtagactgctttgcctcctactatacacgactgtgtaccagcgctgtgtgcagcaccctggagccagcctgcccaggtccacatagtgtaggagctaaggaatacctactggtggcctgatgcctcagaacccatcagccggtctgtctctgcctccaactctaagagtggatgtgcagggatgtctctcttggcctgaaagcagcctagagctaggctagcatctcctttggtgcactgctccatgctgggtgtgtagggctgagtgctctcaagtgagcggattctggtcaggagtctctaggacagcaggagtgaagaatatggtctcccttcctccctttcgccttccacctctctctctctccctccacctctctccctccctctatccctccttccctccaccaccacccccatgtccctagcctcaccctgcatacctgttgaacagagcctgtgggtggaggcaaacatcctcgcaggcagctctcacgcacacgcccgtgtttgtgtgtgtttcggtgtatttttaaaagcgacttgcagctgtgtttgagtcagtcccattctcccctcaagctcggcaggctgcacactggggtgttattttgggcttggtattattgggaattattatattccgttaggaaggagacaatgcggctagggggaatcatcaggctgggaagtggggacttgatgggagttaggaagtggaatccagagcgaatccacccatacccctccgggtcatcagaacaagattttatgtccgcattcggtcccacatcagatgcctcttgcagggtttcctctggtttgaggcacccctcactgccaccagatgatagaggagcagagggggattgccagacttccctcttcggaagtatctggaggctggccccttctaaagggcactcccagccacccagcaaggcctgagctacctcatccactgccaggctgcaagcacaccactcctggtggccatcttctgtgtgacccctgtaggatcgaaggacaggcttctgcctcagaaggaaactcttgtggtgggggggaagggggcagggcgcgagagcactgcactgtggctggtgtctccatcccatgttctctgccgtgggttcctgcgtttcctcaaaaaacctaaattacccctgcagtcagctgagccttaaaaagctgcaggcgtgactcagacgtcactgctgcctctgccccaggaacacatgaggtcacagaggtggttcctcctggcagctcaagccaaactgagctgtgaaccttagatgacacccgacccactcaggtcaaagggcaatatggacaaggtgatggaccaccttgggtggatgcctagatactatacatttttaccatggctagtgacctcaagcaaacctccatctctggacctccatctctccctctgaaaacagagagctagacttttctctgaatgggactcacgtaggagtcttagtgtagggctaacccccacagtgagtacaacaatccttccgcccttcccagaaaagaggctaccagagaccctccctgggaagagacctctgtgtcttgactccagaactatgagggatggccgaacctctcccatagtccttggcctggctttgggtgcaaccagagtcccagactattgcttcctttcttagaggacagagctgttcttaaaacctgcctgctatatccaagcctcaggtgttgaggtgcggttgcaaggccttagggccttgctatggtctagggtcacctgggaccagaagtttccagggctaccagggagccaggctggactggctgatgccttgcgtccccctcagcaccagcagcaggcataggaaggaagtctgactcttgtgggcagttcttccacccccacgaggtacactccttgtggacactgtggggtgtctcctcatggacaccccattgtgtggcacctcctgctcttctgcttgaggtgggatcagaaagactggcccacaagcttcacaagccacaagagggtatgagcccctctgcctcagccacccagcaatgtctcctctcagtgccctgtaggatcaatgcaggctttcctgcccatcccccaatactgcgggggcctgtggcagtcagacaagtgtccccaaaggtggcagctttcttagaatgtctagccatgggggaataacaagtttaccttgagtggctgccagagccagacatctgcagcctcgggtagagttggggtgagaatagttttgcttctgcccgcggctgctggggctgctagggctgctggcctcagccttctacttgaacgctctcagtgactcacaggatttcttttttcttttttctttttcttttcttttctttttttttttttcactaaaggaaaaaaaaaataagcatttgcctctattgtactgggtggctgctgggcccacactatctgcaggtgacacggggctgggggtacagagggcaaggagaggggctggcacccagggtatgcaggtcaaggtcagagtgccccagtggggagtagttattggccgtgggtgagtgtctgcacgatgtgtggtgacaatcatgtctcacccagacccaccacccacacagcaaagggcaaaggttgagggctcagatcagggcaccaggcctcccaggaggcaggatggagcaccctgctgccacctgctaaatacctgaccctggtgagactgaggacagatgtgtttgtggaaaacagcagctttgcccaggcctgtggcttctgggaaatgagggaaggatcaggtcctattggctgtggatggttagcacctcagcaatggttcacaggcctcaaggaaggtacgaggaacatgagcaccacctcactgagctgtgttcacactctccctgagttgtgttcacacccccttcctcatctgtgttcatactccctccctgagctgtctgttcacacttcctccctgagctgtgtgctcacacccccttcctcatctgtgttcacactccctccctgagctgtgtcctcacactgccttcctcatctttgttcatactttctccctgggttcgcactcccatcctcaactgtgttcacactctctccttgagctgggttcacactcttgtcctcatctatgttcacactcccttgctgagctgtgttcatactcccttcctcatctgagttcttgctcccttactgagctatgtgctcatactcccttcttgatctgtgttcacactcacttcttgatctatgttcacacttcctttctcatctctgttcacactctctccctgagctatatgctcataatctctccctgagctgtataaacactctctccctgagctgtgtgctcataatccctccctaaactgtgttcacactcccttcctcgtctgagttcacactcccttcctgagccatgttcacactccctcctgagctttgtgctcacactcccttcttgaaaaaaaaaaaagatttatttatttatttatttatttacttaatttatgtatatgagtacactgtactgtacagatggttgtgagccttcatgtggttgttgggaattgaattttaggacctctgcttgctctggtcaaccctgcttgctccagttggtcccactcgctccagttgaccctattcactccagtcaaccccaatcgctcagtccctgttctctctggcccagtgatttatttattataaataggtacactggagctgtcttcacatacaccaggagagagcatcagatctcattacaggtgttttaagccaccatgtggttgctgggatttgaactcagaaccttcagaagagcagtcagtgttcttacccattgagccatcttggctgccctcacaatccctttctcatctgtgttcattctccctccctcagctgtacatttgcagatcctccttccctcagctatgtgttcacaccttccctcagctgtgtgctcacactcttcctcagcaatgtgtttatatgctgtccctgagctgtgttcacactcccttcctcatctgagttcacactccctccctgagctatgcattcacagatccttcctcagccatgttcacattttccttaacctgtttgcttaaactccttctgtgagttgtgtgtttacactcctaccctcagctgtgtgttcatactcctatcctcagctgtgtgttcatactcctatcctcagctgtgtgttcacactcctatcctcagctgtgtgttcatactcctatcctcaactgtgtgttcacactcctacaccagctgtgtggtcacactcctatcctcaactgtgtggtcacactcctaccctcagcagtgtgttcacactcctacaccagctgtgtggttcacactcttctcctcagttgtgtgttcacactccttccctgagctgtgtgttcacactcctatcctcagcttgtgttcacactccttctctgagctgtgtattcacactcctaacctcagctgtgtgttcacactccttccctgagctgtatgttcacactcctatcctcagctgtgtgttcacactccttccctgagctgtgtgttcatacctcccaaggacattcacactgtgttggtgctggccacaggtttgttggcaaactttgctcacgtagtaagacagttccattctagctcctcttggaagatctgtaggtttgttttctggtaaagtggcaaagatttgccatgtgggtctggatttggggaggtaattccacaaataatatgaaagagctggttgcatgtcaggtcacatgtagtgtggaaactggctctgacttccagggaagatccaaacagaccctcataccacgtggacacagcctcttcaaagacgtctctccagaaacggctccatggctaagtttaattcccttctcacactcgcagggtctttagtctctgttttcacatcacaaagccattgtataaataggtgagggtgtggggatggcacagtgtatgccaggatatgttgctgtgtgcttggactagggatgcctctccagcaagcccagagcatgatctgatggcactacatgtccttggtatcattgaactactggctcacagggacccagtcaccctttgtaaggcgaatcccactctctgcagtcactctggggttgggactcaggtaggcagcagacagggacagcacttgtagaagctctagctctagcatctgtgacctcgtgggatgtggcagccagtttcacactgtccacgggcaggctgtggcttctatagactgtttttgttttgagtctgtgagttgccacccagacttttaaactctaccactgaatactggtgagctctttccaaaggaagtgttggggtttgagctgtgaatggctcgggaggcttgggaggcaagcactggagaacactttcaggtgaacccgatgatggtaggtgaaactcgtgagggtaggtgaaccccgtgagggtaggtgaaccccgtaacagtaggtgaaccccgtgaggccgaaagcagcatccatccatggcctattgctgtgcacttccctctggcctgtttgtgctctgagtgtggctaagtcctgagcccagtattcttccgcactggcggtagctttgtccctctggcaatgtcacaccctccttttcctcacctctggcacacaacccgtacctcagtctgtattgagattccctctgtacaggtcctccagtgcccaccaacctccaggcaaggggtgtttttctcccggtgtctctggtgtctgtattaccctacactccctgtctagaacttcctcaaggaggaaccgccacagccctgccctcccaggccaggggttccctaggactacctctgatggacttgttactgcctttgtagcctcaagcaatggctgaaaacagtaggtgcttaataaatgctgactgctgagggagaggcagaagggagaggagcaagaagagacactggactggccaattctggtcctgagatagggctttgtgtggcttgaagggcccctctggccaaagaaggagaggaaggatcatttgcatacatttgcatacatttgcattcagggtacaaaccccttggttttcaaggatttttcattcatgtaagaatccagggggtataaggcggcgcacaggcataaagcctagattggccatatggtcctgtggtgcaggttgggagactgaaggctgccagtcctgtaaaggtcagctgacttgcctgtgggcagaggctgtaggttttcgggcagtgtctgggactgttggagctgagttgaggagtggttgtagcaggccttgtggcttcacagagtcttgggcacctcgttctaaccacaggactactagaacgggagggaggtaacagaacaggttcaacctcctcctgtcttctcttcctccagcaggccctgaggtagggtccagaccagagagtagaggccaagggctcctcagagcttctcaggccccagttggggagggattagaaaaggtgggcagcttatacagaacccacagcaagcgtatcttgggaccatgctagtgtccatgtggtcgcgctggctccggattctgcctacctgtctcagtgccaggctggctgcagctctgcatagctgctgcacacgggcgagtgcagaatctaggtcaggctggtgcagggaggcagggtgagctgccagggcagtgtctgctcactttgcctctatctgggctattgtagcttcaggcaggactctggcccattgacctaggccagagacccccacctcttcctttggtgtctgagcaggctgagaggtcctcctagggagtgagaagccaagcaataggcgtgtgctgtggctcatggtgtctgaagatggcacggtgaaggcaagatgctgtctgtctattcggccaggtctctgggcacaaggaggccagcacctgtggctgtgacaatttaggccaaagcctttgtaaaactcccagaagttccagctgcccaggcctccgccctctaccatgttctccatgatcacacagaccgtgctgatgcctctgttctctgctacccacgggctctgagattgagactgggtaccagctcaagggcctcagttgctgccctggcaatacagggttgctgtggggacagtgacagcatcccatctccttctgctgtgtcccttcagcacatatccctcctccgaccatttctgctttgtctgctttggaatcaagtgacacttcttttggacctgactctgctaggtttggaggtagggcaggcgggcatgccagacctagaatggcagtctccttcttggttagtctgaagcagctgtggtgcctggggcatttgtggtcactggggcaggtatggtctgcctagacagccagggtcactgggatagctgcggtgacgcctggagaagtcttggtcatgagagagctgtggtcgctctgagatatctgtggtcactggataatggtggtcaggccagttccttattggctggtctttttgaggccatatgtccctctaaagtgttcatcctgagaatgatgagctagctcaactcagtgttgggtgtgactccatgaagggacctgaagaccaaaagatcagtgtccctgcttttactctgaattctgcattctgtcacctgtcacctgccacccaggtcaggaggttgtgtatctaggcactggtatctaggatgtgccagggttgtgggatggttggaggctcctagatcatcctctgaaacagctttgggtcctcactagaggcagtaacattgaactctcagacaagggtagacacagcactacattggatttggagttaaatagttaataaaatgtcttaggctcgggttgctgctgggcctgtgtccctccctgcagcacagcagccagaacgggctcaacacctgaggggcctacacttcaccatccagcacttctgaggtgattaaagtgttccaagccagcagacccttgcacctcagggttcctcagggtcagagtgactgtggggatcagtccaccccagaaggcttcccactgtagaaaacagattgaagttggtggcttttggagccctcctgtttggggcattctgagacggtctcacaggagcagaattggggtcacattagggctcctaaactgtgcttgtccccgccccccccccccatgctgtggccaggctgctgtactgtggccatcaagatacagtgagctgggcagagtgcagctgctcactggaagcgtttccttggagatgtatgtaggacagaagttggaagtccagatctgaggtgccccacaaaggcttccgaggtgtgaatcactctgcagagactggggatgcagcgttgtcctggccgcctgtttctggggactgttgcaaagtggatgctgttgcccatctacaggcagggcttatgactcccagaaccatggagcctcagctcaagggtccaggctgtccctgccctcattcccccaacacccccccaccccccgctctcccagactgctgatcctccctaagtgctccactgggaagcaggccaaaggggcagtataatccaattgatttctcagaggtaacagctaggacttgaacctagctgtttgatgatgtggcaagcagttccttggccgtgatgtttcctggccaaggaactgcttgtcctagcccttcctggctgagtctgactctatctatggtgccattcattggcagctctctgatatttcctaggatatatcacccagcctccatgctccctttggcccttagcccaaggatccagtgctggtgggctcatggtactggcttctgctcccaggtgctgctcctggtatgctggggggggggtgccctggttagaagtaaccaaggggctctgtctctgggtctccaagcagctctctctcctccatgcttagctggccttctcagctgtcccttatgctgcctcctttattgccacatctctaccttcagagtggtttccggctcagtgttatacggcacacaagcaagttggccagcctaagtcatgccttgagccacccacacgtttcctatgacactggagggtagaagcacccctgtgtaggacttagaggggtctacttcatatccttcaggtaaactatgaacctaagtgaaaagcagcatgggtgaggggcagggcctggctgtggaacactaaggggccccctggcctctcacctctgtcaaacctataaggcaaaaatgctttaccagccgagagactagaagcaggccctttggctcctggggtggcctgtgagatgtgtataatacagctgtgcagggatgagcctcccggcgcgcactcatgaacaagggacagacctggggcacgtgtgcacatacgtatggtgtttgtgctaaccaccggggagactgaggcacagaaaggaacaggctgtctcggggcgtagcaccctcctgcctctctctaacaatgcctctaaggttaaaggcaagggaaggagagaagcagccgcttagattcggagggtgagaactggtccccagggagcagagtccccttacagtagcagctcaggtccagcagaaagcctgtggcctgtgaacatgtggaagccctaccttacctgagtatgtggagcccgctctggaggaatagccccagcagggacccctgggtgtttaccccttacctgtctacttgttgatgtcttcaaaggagaagactaaactccttgagtgtcttaaactcttttaggggccacaggccctttcttgcctgcttatgaccagccaggccacacactttcagagtgggattctgcttaaatgcccagaaaagagatcagaattcgagcaaattaacatgtgcctggtggattttaatcaccgcttttaatcgcggtctcggagctggaaatcgtctcctggctgcgtggggggagggggagctggctgtgtgatggattattcattacgatgtgaacttgggtttcatggcctctctagactcaggggcctcttgtccaccagggagaatgcagccccatctggatcgctctccagggaccttgtcatctgcctggctcataatgtgtcccccccactcccacccccacggtttttggcttttgtctccttgtccttttctctctcgctccctgcctcagtttctctttttctgaggaggctgacgaccagttcctggaggaaacacataaaacccagctgtgggcacctccctgagattcttttcttatggtcccccatcctctggtgcccctgattggctgtcctggtagcccacctgtgctttaatatgacctcatcagtcgatgtgtactcaaaggaaaggctcctttcttgcctcggatctgccggtgggatagacatagaccctggagttgtgcctaggctgtgtggcaatgggagacatagtatctactcaaagggaatctcctatagtctagaacagggctactctgagtagcagtagagaaggaggctgcccctttaagggcaccaagcagcagggccaagggcctttcctggcaggacccagctggtactactgactaaggctctcctcccccttcacacctggggccctgtgcagcaggaggctgtcacaccttggaggtggtagttcagagagcccagaggtggcccaagtcctccccactgggatctgtgattgccaatggcctgttctcctggatacccactaactatcccaggccccctctagatgtgggcctaaagccttaccacttctcctaagctggagcgagcaggctggagaatggagctttgcccagatgctgtacacagatcatgcaggtcccagagaggtgaacccaggccgaacccgaccatgtcattcctctacactccgtatcctccaagacctgccccagagcaggtgacacaggggccactccctgtcataccaacagccaccattgtccccaagaccccacaaacctgtgcagccaagtagcaagggctgaacagtggaggcagacagaagaaacttgggtgaacacgggggtggagcttttacagaactagccctggctcagcctccccgaggctagacacctccagtcagggaaaactgatggactggcaccttagcccattttggaggccttgggggagtgttgatcaaaagggccctgtggtcatcaggaacagccaggctcatttgtttgttccttgaaggtgcatagctacccctgtggtaggagggactagctttgaaagaaaggtgggtatattgagtggtcattgaagccactgttggaatttaaagtagccaggactgcctccccttctggcccctcaaaagtgctggctcagtgcccacatgaaactccctccttgattcatactgatacttctggatagcagccaaagtgggccaggaaccggatagccaagagttaagggcaggcggggctcccgtgggaggggcggtcccagtggcagcgaggccccatcctgcccctcccctctcctgtctttcttcgctagcaagcagcagtaacagctagctagctagctagctgcagcaagctttgaaccggtatgggcgctgtgtgcggggcgccttggatcaggttacaactttggggacactggggaccagcaaagggtcccggccccctggggccttgccggtaacagtgggtctggtgcctgtgggccatggaagagcctgggccccctggtgggcttagccaggaccaaggtaagggcgagtaggagggtgtctggtagagggctgtgactctccctgctcagctcagatctcagggcaagtgctgtgctgttcttcatcttagggttcctgggagagcagtcggtgaccccattccctgccagcacagtgtagcacccaccccgtctggcatcttgcaagtagatgcctaccttgcaggaaggctctgaggtcctgttctgcagggtgaggtgttcctgtccagcagccactgttcctgatttcaagtccaatccaggagatgtctggaggagaggtccggggctgtgaggggctgtgggctggcgggagagagggggcaatgtcctgaagtctcgtcagcaccatggacagaaacaccacagcctgccttcctggttgccccgaggttccctggaattaaactcccttgcttagatctgccccactttcctgtgtagggaactggcattgccctgggcagacagcacgggccagcaggggtgcacgagtcctccaggctgcccgcaagagcagagcgaggcggtcgggtgtgaggagaagccattctcttgagttttctgagcaggcatcttcagtggcgggtgtggaagagtttcccctgagctggatctctgtctgccccaacgcaaagcttggtttgggccagggtgggagaggctgagagggaaagggacctaatgttatggccacaacaggagtgatctgagctagacatcaggaaaaacttcctgatgaaagccccgagttccaatgagagtagggtataccttcctgatttgtttggctggcttatctgggactgatctgatctacccttgattgacttggatgttaaacttgaaagcctgtgcgacccccacactgaggacccccacccaaagcctgcgggggaagggaaaagacagtgtgggggccacctaccgggtcaacttgcgagcactcagaaactctgtagagtgccctgccacacttggcctgcgtggctgcaccacgcacaaatgcctgctcctcccctcctgtcccttctttcctcccagcctaaggtgtcctttgtgagctggggacagcatgatcaaggtggtcaaggctacgggggtacactctgctaatcccttgtgggacccaatggcacagtgtttggtgattacaccttcctggcctcaacccctatcctagtgtggcagtagggttggttgacctgagggacaccaggctggcctgcagggtgcccatggagtctttaccctggatggctcctgggcttggtgtacctgctttgttgaaggggcaggggctggaagctgccacatagccctgaggccccagggtctaggggactggacatggacacacacagggtttccggctgcttgaaggaagagccctggtcttaggaggagaggggtggtggtggaaggcctccaagcctgtctccatcttctggtggctccaggggagatgtgcaacggcagagtcctcgcagtctcaggatgcagctgaggaaggagcagatgggtcgcagtcctgggtctgggcctccatctgcaccgctaatgagctgatgacgaaggttccctagctcctggcaccttccctagagagccaggaagcccctgcccagcaaagcacccccctcttctctcaaagcaggtgtgggtacagggccttgtcctgggccagggtctgtggctccaactcaaagagaattggctggggggagggcccggagtaagtaatgagaggaatgagcctgtttatccccgggagtgtgcttccggcagagcgtgtgggctcatggctggctggacagacttcccgtgtggagaagggaaggggcaggtgggggaggtgagcaacagccccaagatggggtgtttgcttagatttttgggaagtcacccccctaggtacaagagccctttactggctaggtgtgggtgatactagctgtgggtgatagcctcaagtgaatgaggcaagctgttgggataactcaaggggctacgagccttgagatctcttccagctctcccaggagggcagtcaggtaagcctttaggtatgagacagtcctgacttggaagaaccggccagtccaccctgggaggaggccctcagcttgcagcccagggtccccagagggctggggcgtatcaggactccgggatggtcaggacacagtcagccctgcagcatccgcggcttcacttcccgctgaagctcttccggtttctagcttccagccctgtgattgagacgacttaggtcttagcagcccagttcttagaggcagcccatgctgttttgggttaccaggggtgaccccaggaaacatcgcaggagggccagaactagcgagagcctcactcagtctcaactgataccaggaagcagctagcatagagacgaccagtccagaaagggttggggcaggtgtcttcaacctcaggacacagacacacacacacacacacacacacacacacacacacgatagggataggaagtcacactgggagtcagctctgtgtgcagaaaagtgctttcctctggggtcactggccagttctctggcaccatggggcccttgttgctcaatgctgggtacttactcagtgctcagacctcttgtttcttgtctctggcccctgcttgaatccatacccagaggccacctaccctgtcaactgctgctatctctccttgtcccatctgggctccaggggagacagcagggcaggtctggctctcattattacttgtgctcttgaggggcatccccacccagatctgatgactacagcctgattccagtgacagcgcctacaaaggtgtcctgggcagtgactttggggtcagaatctgttctagacagtggctgatcatttgccttctagagccaagcccaaatatgcatgggtgctgaccaggccctgctggaagaggaagagagggcagctgtgccctcagggaagtgagtggctggtggcaaagacaggaacccccagggacacgggaatgaggaccacatgagagagcggaagactgagagatgggttattaatagagtcttcttcctagcggggctgtcgaatgtgattgaaaacactgctgtgagctgagctgctaccagctagtaatagccagggatactgagagagttgaaaggtgcttgctctgctctggagggaccctgattgtggccttagagcctagaggaagcccagctctgctggagatagaggaaagccaatgttaagacctctgtgggctaaaggaaccaggcccccatggcccctgcaggcatttggaggcaggattggagggacctggtttaggcctgaacatgtgtggatatctctaagtgaaagcaccgggcagtgaatactgctgacctttgagagtgccctgtttatttgctgccactgtggctgcaaaggtgagttcctgacccctgaccccgtcacatacagcttaatggctttgaacctggcttcatcactcctcttggctaatagatcagcaataaggccctgtaagttcactctctgggctggataggggttaagatcttgaagctggtaccaccagcagtcgacgggccaggctgctacccaatctctgcagtccagggccaggtccccaagctgtggggacttctgagagaaggtgacagctcaggtcagctcatggatggaccagttcgctagtgtggcgagtggatggtggatggccaggcagaatccgtttctactctctaggctgccccaggcatctgaacacagggcagaacaagatctgagtggcctgtctcagtccccctttggccaaccccactgctcagccagggtcagggcaaacgtgatgggtcaggcccccctctcacaaaacttgcttcctcctgctagaagctagagcttgcatatcacggggcaggcactgctggaggaaaagggcatatccacccagcagagcaagcctgctgttccatccccaggacagcctcagacctgttcagattgtttctacttccttaggtcccgtcttggctcaagtgcccccaagcaaccagccccttgggtctggatggggagggcaggaacgagccggctcacactccctgatacagtaaaaatagttggggaggaggcgcccagacgtgcgggggggatgcgttgctgttctcagacgtttaaataagcttggccatatgtgtgtgggcctgtccctccccgctgagtggcatgggaccaggggccaggctcattccggtgggtgctgtggagctggggcagtacggcatcttccttctttcaccctaccccaggcaccatctaagtgttcgggtggcctgcagattgggaagcagcctggggaggatcaaggctgtgggggaagggctgggggagcttcattctctaatgtcctatgctgctgctctttagagccctgctcactaggtaacagctgcaagtcccatcctacctgtgggataaaggcccttgtacccaaaggtgccccccgtgcacgtgttcatgcttggcaaggcctgtgggtactatttgtaggcttattgggagggtaaattgattttccggctctccccggggagaggcaaatccactgaatggctgttggtctcttgctcacagcagccatcaagctgggtttacccactgtgtgaggacaagatcgatctgcctcacagtagtgaaatggtaccaacactgcccacctctggacggcacggcacgggatctttccctttcagcagctgtcagtgtccacgggccccgctggggctgtgaggacatgcctttcatccgaaggggagctgaagcaccgaggtgacaaggatacccaagctgggggagtacccgtgtcacagcagctgcctggccgggccaccatggtctgcagctatgaggccgagctgaggggagtcgtgatgtcttccagctgggctcccctctccacctgtgcttccaatgtgtgtatctgagcaccaggacttctgggcctgggctgcagctggctggactctagggagactaacccactaattctagtgtggcccgggtgtgtagctgcccatagctcccagagcagactaagtggccgtggctcttcttggtcatccccatccatcctgtctcttgtttgctgcttctgggtgaggctgagacggagcagagaggagacccttgggagcaggcaatattctgtgggggagctgtgtgggtcgataatggggcaggggaagttaggacagaggagtccaggagcttcctgtcctgggggtgggcagctgggggaggtgagcctcttctggtaggcaaccaattcctttcccacataagactttgtggggctgatacatggtgtcaagtcggggaggtgacaggctactcctgcctgagccacttgggtgaggaccatggtagatgtcttcccctttctggaagctgcacatctttggctcctggggaccctcctgaacttctggggaagcagggtgctctagagcctggttgtgaaggagagcagatgaagggcactctggggccccagagtccctctgtgactttaatatgaggagctgactacctctggcctctgagaatgacccaatcacccaccagactggacctgggtcctaagtatagctatgggcttctgggtggccctgtatagatgtgaggtcctggaagcatcaaagggaggcagggtactccttccatccattacaggtagctcttctgggaatggctgcccttctctctgtggcaggggctgggggtatacgtctgagcttcccacacggcttaggtggccaggtggtcaagttcagtccagctgttagtgggcttgagtcctgtgtggccagttacctgggctcttacttggacaagctgcccatggtagcttgccctctgccgtctccctcagctagggtaccggtttgctcagtggctgaagtgccatgtccacctgtcttttgcagtatcagaagtgggcagggttaccttggtcctcaggacagtggaagaggccttactgccagaggccttactggtggccgggtgtgagggaggattagctgggcttctgacagcctagtatgcacaggattatggcctggggccacccaccagaagggtcagggagtctggagtgcagtgctccgagtcctccactgggggcactgttgcttctagatctgctcaccctctgaagccatctgggcagctaactcctagagaacggtgggagactgactggtggatggctaaaagcagatgggggagagggcagaagtagccagctctggagagatttgggaagcgtgagtggccctagactgggctaggcccagacaagggaagagaaggtgtgtccaaaggtagggtacctagagagaacaggacatctggaaattctggtatacagtggtgtgtgtgcgtgtgcgtgtgcgtgtgcgtgtgcgtgtgcgtgtgcgtgtgcgtgtgtgtgtgtgtgtgtgtgtgtgtgtgtgtgtgtgtatcaaatgggaagtgcagtggcatggtcactggaggcctagggagggctgtagggatgtggacagcataaatgtcatccagggtgaagcattaagaatgcctgtcccatcttgcccagccttagcagcccacggttttcctgacacctggatttaaaaaacaaaaacaaaaacaacaacaaagaccccagcttttatccactactcactggggatcccgggcttcacctacacaggtgaccatgccatcaggtcaggatctcctgtggcctgtctccctggggagcgccagggctgtgctacttcctgtcctggtggtaaatggttccttatgctaatttgtggcagagagggcaggctgcctgtccacctccagccagcaaggcctctggccaaggctcctaattgggtcctgggtttggctgtgagttgattatattggatctggcccagtgggtcctgattccttctggctgagcttcctgttgtccaggacacatgaacaggcaggccagggtcaagagggtgggctggacaggggtacccaggctactttgtgaagcagggtgatgtggctattggatgtggagtcccccctcccccggcaaggactcccaggatgagctgtcccttgccagaaacagaagcctggttagggaggaagctggggtgccgtgatccagaggcggtgaagctgagatgaaaccccacctccctttcttaaccatctctcctgtctctgcttgccctgagtaaaccatgcaaagttgaatgcagtgatgagcacgtcttagatgctcagtggccccataggctggtgtggagtggtggccggtgtcctggcagatgatcagggtcctctctgggtcaggagactgtcatgagagatctggatacccggatatgtccagccttgggtgcagagtacagtgataatgtgccctgggtagtgggatatccccacagctttggttctgttgggcatgggaagaaggcagctggggggtggggaagggctgggatttggagtggaatctgcacaaggctcagggaacctacattctccttcccatactggatgtcaaagtagaaaggtctgtcctgtcttgcctagccttagctggccctgcgctggcttagctctggcctccagccaaaggggactgggttcttggccctggggtttgggacagcatgcgtctgctttttttgtcccatctgtggaccagctcactaccacacagtggggatcaagttggaagtccttatacgtacaaggatttcaagtagcaggaagtgagagctcaaaacaaagacacagataccagctctggatgggcagggttaggaagacagcctcatgtaggaccacacctgtggacagacagactctcctggggggcagtgtcctcacagaggccctcactcctggtcttgtaagcactgttttatgtcccaggagggtcccatgcctaacctgttaccttgcctcagcctcaaacatgagtctggtggctcatgaagcagcctgctctgagctggcagctgggccctcccctggcctaaatcctttgtccagctgggctgaatccagcaggattactgggcggattggccaaggatggcagggtgaggcttggcagctcccccacccctggcattcatcttcttcaaataggcctggaggttctagaggatgggcggactggcctggggaccatccagggccgcaggcagcagttgggtcaatgccagtgggacctgggaacagcccttgcggggcttcagtgggctccaaggaggaagacgaagaggtagaggagagaaggggatccctgaggagcccctgtgccagctgacacctcagcttggcctgtcgctgagggtcccttttggcttgggggactacggcttggatatgcctggtccccagccgtctgctgccagccagaccacaggagccgtggcttgcctggcagaggtactcctctgggttggagggagcgtggtagtgtcaccaagatggcagctcagccttgtaggtaagaaagggcaaaaaccaagtccctcctagggactggccaagccctatggggccacaggatgcatagcttcctatggaagttagggctgcctctggggcctgggatccttccttcgccacaccaacatcccaattcctttgcttcttcctctgggatctccaggcccagaaacattgcctctttgcccccagccagaaatcctgtccacctccttagcagagcttggagggtgaactccaagtgggaagaaggcaaggcagaactggagccagaaagccctggttgaatgtgctgggggtatgggggtggctcatgtggcttcagagctctttctgaggggggtccttggaattttgtggggcaacaataccttcagtgtagctatggaggcatgcaggtgtagacacaatggtctctagatggtgtcagggaggccctgtactgtgaagcactggacagaaggaaagggctgttgggtggccagtagaagggttcagtgtgtggagtggcggaggccctggtcagggatgcctggttcacttgctgctccttgctccagcagcagaaggtgcacattcagtggcttaactctagaaccacatcagggttctagagtagtctctgtccccaaacgctacctcaaatgcactaagcaaccacgcttgtgtccccactggctgtgtcccctagagagccctatctaccttgactttccaccccatgcctacagttcccctctgcttatggccagtaagagcttcctccagaaagccatctgacctggcaccactgtggttttctgcacctcccgtctgctgatgtttcattgctggcactcaggagatttgtccccctggctcctgggtttcctaggcatagataggcttgggtctggcctgaagtccttcccctgggacagaagttgacaaaggaggtggcaggtggctcaaggggagaggaataagctatggacttgaacccagcacctcagcctcccagctctgtgcctttctatagggtttctcgctgacttggctgctcatgagacaggtgatgttcctggtgatgccacagaagggtcagtaggctgtcaggagtggcccatggcacaggctagctgccaggtttggtgcatggtgcctaggtccaccttgtgcccatttctgggagctccctgtacagtggtctgggctttggtctttgtctctgactatttggcagtctgagcaaaggccacttaggatctcagtggtttcttggactggcccaggtgtcaggggacaggccagtgccgaatgtcttccctggtgcctcaacccacctccagtgggcctgcgtccagcagagaaggggtggtaacctgtctgtctcatgtttggacaggaccacacaggcccttgggagtgaggtgaaattaccagggctctcatagcttctgtctatctgtctgtctgtctgtctgtctgtctgtctctgttgcgtgtccacctgtgtctagtggagcgatgcatgagtgccatgcaagaggggacccagatggtgaagctccgtggcagctccaagggattggtccgcttctactacctggatgagcaccgctcctgcctccgatggcgtccctcccgcaagaacgagaaagccaagagtaagtcagcaacccaggggagggggtgggtaggcacggacctgggagcacaggacagggcagcctccagagaagacaatgacacagggttaagaccctgctgagatgctgtgctggtcatccttagactttagtggtctggggtttctgcagtgagctctggaacaaggtcagatggcccttgcccagctgagttctgggactccatggagactggatatcttagtgcattgccccatatcaaatgcagagggcagagagggataaagagctatcagaccagccaagggggacgagtctgtcctgaaaccacagaagcctacacagtcaggagcactgaaggcaggctgggagtccaaggccgtgtgggccagagcacttgatgtggtttgcaggggtcgttcaagttgcatagttctcgtggagtggagagtcagagttggagaggatgagtcgggggcccctctcggagagacaccagagtcttacatgctgtgagaagcaaagttctaaggtccctctggctttgccaacagcaggaccaggtgtgccagggtaggcttcagcccagcagttaccaagggtaccactatggagtcccaggagacagttgctctgataggaccctggagggcccatgtgagaaagagtcccaaggtgaagtcatcctagagcaggtggcttctgctggctcctggagccagtgtagactggctctgccttgggcctgagggagttgcctccaggctacacaggcagagcctggtgcctagccaggagttgatcatccagggagaaccttgacaaggagatggcaaaacagtctatttcctggtagctgagcattgatgagccatggagctccctccccctcctccccagggccctcccccaagtaactggaagaataaactgaggaataagaacgttttcagctttccatcttgaccacccctggaggcccagtgggtacagaactcagtgcagagaggaataggtgaaatgttggtccctggaccaagctggagcccatctctttgactgccacactcatgccagagagcttgagaaaggcaaaagacagaacaggggacatctggtgcccagaaggagacactggccacctgtggtctgcatctctgtgaggagctcctaccgagacatcgggacagagtctaaaggcaacaagcggctcatcctctcagagatggatctgagcagagggtcccctgagctggtatgaggaagagacttcatcaggacatgctggcacacctgccacccagcacacctgtgagttgagctgcagctgccggctacgtacacctggcttcttgcctgcagtgctggacttgttactgaagcagccgcaggatctagccgtacccggtgcaggggctctttgaaatggagagatgagctggttagagtttgacaggtagagtgggtcgcttttgacgtcttaatgtgcaccagaagaagctcaatcctgggatagccaggtgcctagactgccaaaggggacgagtacctctctctcattttccttggtgctcatgcgtgtgtgcacgcatgtgtattttatccctaaaggaggaagagaaggcctatagtccgcagagcaggatgaggggggttagctaagcatactggagggtagaggggcattaggggtccctctgagcatgggctcagtgaggaggtgttaaattgaggtatcagccatcgagaacaaggctgcaatctgcttaactcagggtgttctgggcctaaagagtcgggggacacttgggtcactggtgtctcggaatcctccgacttgcctgcagtttccatcgactccatccaggaggtgagtgagggccggcagtctgaaatcttccagcgctacccggacagcagctttgaccccaactgctgcttcagcatctaccatggcagccacagagagtcgctggacttggtctcacccagcagtgaagaggcacgtacctgggtcaccggccttcgctacctcatggctggcatcagcgatgaagacagcctagcccgtcgccagcgtaccagggaccaatatccttaggctccaggggtggggacagaccccctccactatccgcctgggtagggtctcccagtgaagggaagataagggggggtgcttgggctggggactcttgctccttgcctcctaggctggagggaggagtaggccaggtcaggcccatggactgtgttggcccctaactcagccccaaagtggctgaagcagacgtttgatgaggctgacaagaacggggacggcagcctgagcatcagtgaggttctgcagctgctacataaactcaacgtgaacctgccccggcagagggtgaaacagatgttcagggtgagtgctgagcatggcggcttgagtcccctgtgggaacaccttccgggactacagatgggaagctgggggtggccattcaggcctgagctgtgggaagtcaccacagggggcatggtcacctcacagggtaggtagtcagggactttggggtgtcacctcttggcaactgtgccaggtgctgctctgctgattgtcgggcagggctgagcactaagcataggcctacctaggtagaccgggcacgtaaagtaagcactcagatgcatccagtcactcgctggtctccaataatccccagccttaaagacacacacggcccatcaaagagctggaccagcatgcagcagctctcattagccaccccactttgccatgacccccaaacaccctgctgttaggagttatgaaaatgcatcctttattgtctgtaattacttctgtcttttgggaacctccatgggagagaaactcttacattagcaactcccagtttgggggcagggatgggctgaggcagcaaacccagatctttgacctcatttcctttctgtagcctagaaaggggtttctgtgagcatggtgccttgtttgtccctaacacgtgcacgtgtgtccacacatgcacatacacatgcacacactcactcatggtctgacatctttactgtgtctgtccccccacccccatgcacacaaaggcacaaacaggcacgcacacacacacacacacatgcataaacatgcacatacacacatatatatgctcatggcctgacagctttgctatgtctacctccccatgcatgcacacacacacacacacacacacacacacacacacacacacatgcacacacatgctcatggtcgatagctctgctgtgtctttcccccctcccacatgcacacatatgcatacatacacacacacacacacactcatagcctgacagctctcctctctctctctctctctctcacacacacacacacacacacacacacaggcacacatgcacacacacacacattgcctgacagcttggctgtgtctgctctccccacccccacacatgcgcacatccatacacactcatggtctgacagctctgttgagtctgctcccaccacaccccacacccacacacatccacacatccacgcacactcatggtctgacagctctgctgagtctgaccctcagaggttcttgcgtgtgcagtcatgctagacaggcagctatgctcaggtgaaacaatgacaggtattagctgggtctctgtgtgagtgacagcagtggacaggactctcccagactgcccactgaagaccatgggagtgttcattgcccttctgatggttcctgttgggtcagcagttgaacagcggggcctagcaggtgacttgcatccaatccatcctctactgcctacactgggccttaacccttagcccttccaggacagctctgggctcagcatgctttgctcaggctgagaatgcactaagggccaggcagcaggcaagatgggactcagtttggagcagcctgagagaaagaggaggaaaacacccgtggcgtgttgggagagaagggagggtttaagctctagcccttgatagatctcagaatttgtgttttctgagtactgagtactgagtccctctgggtagtcccaggcctagctcctttagattgccaataggaagccctggggagagatgaaagaccatactagatgagaggctagcaggtggtagcaggtgtagatgggatggagttacaggttggtatgtacaggaagctgtggggttatgtcctggagacatgggtcttggcacggttcagtggtctttacagagtacccagaccctaaaagcctgatctctcagcccatgaagagtcgatttaggctaagacctcacagtgacctccataggcacttggagccctaggatggaaatgtggccttctgcaaggctcgggccactctgaccatcagtatcagggtgatctggaactgtgtaattagagcagagacctgcgtagcagatgcagcggctttaacataatttcattaagtctaagatacgattggaatgtggggctggttagcacactggtcctcaggtttaatgacccaagagaacccttgggctaatcagagcttaactcgccagggggcttggtggcatttcccttgccacctgggctcccattctggctctcttcctgtcttccctggggacactagggggtcagcccacggatggccagggaaaaagaagccagtgggttaatatgagtgcccaattgcagatcctccgtgaggccctacaactttggtgtgacagatttggtgccagttgtagatagtttctgcgattgtgtgacatttagaattctgggggcttttcagaggctataaaactgctagggcccagagaagcatggttggttgctgttggtcgcaatttgttaagtagtcatgtttaaagaagaagaaattagctatcatgagggcaaagatctaacttgccctaaggaactctaaactcaaatgcccctaatcagcataaagtagtctaacgacaacatcacccccctcccaacccctgactttattcagggatctctttctttttctctttatccttctttctctcctatctaatgtcaggggattgaaaagatggaagaaaaaagaacccacaaagtagctaaaggcagctacactgtgtaagctgtggcatgggtctctttggtccccatggtgatcctgagctatcagggccatcccaatcctgcatccaaatactgagtactgtcactcaacagtgagcatccatccctttgggataaaccctttacagtgaataccaattcagggctgttacctccaagcaaatgtgggctcacccacctcatctagcaggtccttacagaactaaagcccagtctttcgagctcatagacctgaagcaacccctcccacagagtccttcctgagccactcccgagattcttggggccactatgaagccctggcacccttattttaagagtcttcccctggcctgggcttggggtgtacactgcatcctgggtaatggcgcccgtggtagatgctccttacgtctgtaaaggttgggaagacatcatggcttccttggacatccctgtggaacagtttctggggggtatcttatatgagtccttttctctgtaaaatgaagatagtgagcaagagcacgtctctggatacctgagccaggacactgctgggccctctggggccccaagtgtctcttgtcagagggcaggtggccaactgtggctgcagatgtaggcacagagcccaaggtggaaggagctccagtggaagacttcacctcacaaggcagggtgttggtaactacagtgtaggtgaccatggggtttggttaccggttggccttgcaaggcgtggtgtaagggagcggtggctccgatctgtgctttcaagggccacagtgcttttctggtgggagaagagagaggggctgttggaggggtgctgtgggtagtggcagaggaagggaagctgggcttgacactgggagtagtaaggttgcagcacggatggtgaccccaggttgggtgtcacaggaggcggacacagatgaccatcaggggacattaggctttgaggaattctgcgccttctacaagatgatgtctacccgccgagacctctacctgctcatgctgacctacagcaaccataaggaccacttggatgcctccgacctgcagcgctttctggaggtggagcagaaggtgaggccctgccagaagctgtgtggctggtgggtgtggcctcaatttcagcctcagcttctgccaccatgtgttctgagcttcctagcagagtagagttgggcccttgacgctgccaggtaagtgaggaagcttataggttcttcgcagacagagggggcctctggtcagctccattctggcattgggtcccccacccaaagcctccagggggtcacccctccccttggcaaaattttcatactgagcatttcatgggctggggttacattgcccgatctttgggaaccactcttctggatgttgatgcagcaatgtgttccgcctgactccacatgtggcctttctgcagttaccagtccattcagcaaacacttaaatacccctagcattttttacctcggccctaggaactcagtccaccatgaaggaatcaacaccaaaactgtgtttctaggcactgccctgctgcctaccccactcatgtgtggagccccagagacaccatcccctcaccttagatcaggtctgggcatggacaaggtactgcccactctgatgacagggagatgggaggcccagccctctggagagaacacttccatagacaatagggtagcatgtggttccccactggggcactttgaggaacagcttcttggacttatctgccagggtcttcctggatcttttcccaggaggagggcatgctttggggattagttactggctgggacctgctcacagccctcagttttttccagctacatgctcagagtccctcttataatggtagaccatgtctcaccacagcaggaagaggactaggtagctgaatagcagctgtgggcttgggatttgaggtttgagtcctgtctctgcccagggttacctccacaacaccatggcttacagggttattgctagaccccacttcactctatgaggctggcccaaatccaacatcttggattcttttctgttgctgtgataaaatagacaggcaaaagcaacttaagagaaatagggttaatttggcccacaattccaagttatagtgcactgtagccaggaagtcagagtcaggagcctgagggaactgggtctcctgtaaggaatgcacgtgtgccatgcttagctggaattctccgtcgtatggtccaggatccccttcctgagggaacagaccggttttagggttttactgctgtgaacagacaccatgaccaaggcaactcttataaggacatcatttaactgggcctggcttacaggttcagaggttcagtccattatcatcaaggcaggagcatggcagcatccaggcaggcatggtgcaggaggagctgagagatctacatctttatctgaaggctgctagtggaagactgacttccaggcagccagaatgaggatcttaaagcccatgcccacaatcacacacctattccaacaaggccacacctccactccctgggccaagcatattcaaaccatgacaaggcccatccacaacatgggtcttcctccctgattaatataatcaagacagtccccaactcttgtccccaaaggccagcctgatctagacaagaagtctcacggagacctctttcccaagcaattccacattttgcgaaattgcccgttaacgctcatcattttaccacactacccttgggatggcccccacctgctttcccaccctaatgtcattgccagatgccaccctatggcagagacaagggcaagagatggtgacactggtgggaggaagggggaactgcctgactgacatagactacagtccatgctatgaatgagctagcctgggcttgtgcctctgctttggcctagatgaacggtgtgaccctggagagctgtcagaacatcattgagcagtttgagccttgcctggaaaataagagcaaggggatgctggggattgatggtgagtgagtgcttccctcggttctgctgtccccggggaatgatgggaaactgctgcggcagcttgcacagaggattccacctgcggggcaggtagtcgtgagccgagcccagtgatggagatacaccacggcgctcctgtgtacaccgcaggctttaccaactacacccggagccccgccggtgacatcttcaaccctgagcacaacagagtgcaccaagacatgacgcagccgctgagtcactacttcatcacctcgtcccacaacacctacctcgtgggtgaccagctcatgtcccagtctcgggtggacatgtatgcctgggtcctgcaggccggctgccgctgtgtggagggtaagaacatctggtctctgccctccggcaccaaggagcagcgtctccgctgtagacggcacctccttcaggaaatgggcttggactaatgccacgggggagtcaggagcgggggagagtggggtctctggcagggtcccttttgttcaccactgagaggtcagacattgcccctccccccatgcttggagcccagggactaagcctccccaggttcacacagccaagcctccagggctaactaggatctatttgcctacagtggactgctgggacgggcccgatggagaacccattgtccatcatggctacactctgacctccaagatccttttcaaagatgtcatcgaaaccatcaacaaatatgccttcatcaagaatgagtgagtgactgggtctcctgaggggtgtggggggtgctccagaggcaggcaggggaaaggtatgcagggtctggatctcttgtctcctccccttgtgtttcccagtgggcagtgactatgttatacaactgatgagttttgtttagaggttgttctttgaggagagtggcaggggaggaaatccagccatggggggtgggagggaaggttacagtatagtaagaatggcaggatggtcacgtgactatagcctacccacatacacactgtggcaatctctcatctcagtcacccatggaagtgacggctctatcactaattacccccaggaagctactctgtgtccagactcaattcgctgtcactcagctgtggctgtggacactgttgaaaaaaaaaaaaaaatccaatttggtttctggaaatagaagacattaccttggctaaacaagactccgaagcggaaaaggaagtggtgaagtggagagacagatggatctaggaaacagatgtggtttcagggggtgtagcaggagggctcttgggggtgcaactgaggaggtgttggggctcagggacagctggaatatacagatgtcctgtagccgacagggggctgcttctgtgagccagcatcatccttccaggtatagtgttccctgtaaggaccccagggtcgtccattgtgtagatcaaagagattatatttcttacagcttatccactattccatagtatttcatgatgccatattcaaaccatgactttttactttcctagagtttgtggtcacctttgatttcccccccccccatgctttctttacttgtccctaaaatttctcagcttctctcccacccattttatttaatttttcagagttattggtggatcgcctcttagagcagacggcagatcttttacctaattacttaattacctataccacagtcaatggtacagatggcctgtatacctacaggtgtggggcttagtcagcctctgaggtcatggccttctcccactcctcttgtcttgggaccacaggtacccagtgatcctgtccattgagaaccactgtagtgttgttcagcagaagaagatggcccagtatctgactgacatcctcggggacaagctggacctctcctcagtgagcagcgaagatgccaccatgcttccatctccacagatgctcaagggcaagatcctggtgaaggtgaggtttccaggaccagcatcatgacggctctggcctggggccaagctggagaattacagtatctacgggcagactgggcgggagggaggttctcactctcaggatggccgtgtcaccttgagccacttcccttgtgtgccgctgcgatagcaccaactggttgcacagttacaacccacttgtggcctggagttccaagagggaactttacaaaggcctcctccctatggcggccgctcctggtgggtaccggccgctggattcccgttatctacctcttcccccaggggaagaagctccctgccaatatcagtgaggatgcagaagaaggcgaagtatctgatgaggacagtgctgatgagatggaggatgactgcaagctcctcaatggggatgtgagtgggagcccaggctctgcttgtagggaacctggagttggcccccaacacccaagaccaattctcagcacaaaggggatttatttaccccagagggagagagggcagggagtcagagacaaagacaggagatggagggtgagggagaaggggaagggaacaagggagggggcaaggggtatctgtcctggggggcggggggacaaaggactgcctctggatagagaagagacagacagacagacgtggcccataggcaaatggtggtttacaaatgtaaaaaaataaataaatatgagaaaccccgtgttaggatgagatgtttgattttaactaggcctgttaattaggtgagtcaaatggggcttttgattgcgggacttcagtattgtgatagttggaccttggtggtcagcctcaagaggaggaagtggccaaaaaaaagggaacagaccttggtggctagccttaggaaagtaatctaatggattttatcaaggcagagggaactggggagaagggcaaggcctgccagacccaggctggccacgcttaggctggctggagtcccttcaagggtgggaaacctatggatgtgaggagcagcctcttgtcctggtcaccaggatcagtgaggaaggttggcagcaggaagagaggacatacggtaaatgctgtggtgtacaaagcctcaggccctagggaggcagaggaaggtggatctctgtgagatcgaggccagccctgtttacaaagtgaattccaggacagccagggctattgcacagagaaaccctgccttggaagagaaagtaaggagtggggagtgggggaggggacggtggaggagggggagggccctcgtgtctattacgcaggccagccacacacctactgtttcccccttctggtttccattgctaagctgaccttggattttgtctgtgacgctgagacttaacactgagggggttccacaccattcccacccatacccacacctgttcctgccatgctttaactcagagcaccccagctgcctggccaaagtctgctggctgctcaacacatatggcggacagtgtgtgggtctcagatcctgttatcttctgacgccctgacctcctcctctggggcagaaccacactactttagggattgcacatatctgggtttcagtgctgtctacagctgcccggggtcaatcacagtctctgcgctgagagtcacagggtctgtatagggactgtgaggaccgcaatgctctcagtggtcagtgctcatgaccagctaccccatgccctgcaccagaaccaactccaagagccagctgcagtgctgagacctcctgtgtggcaacacggacatcccacagagcagctggcctggcccagggctgagggctgaggagggagcctgagccgtcggggttggtcctccgggagctgagtggaggaaggctttgtaactgacatctctcttctgggcattgctcatccactgctttcagccactatgaggcagcagagactttattgtcccccaaggagtcatcagatgggaaaataattgtgcagaaggcctccgggccagcgctgcctaattgttttagaaagccctgagacagcagattcttcctgcttccggtgtgcctgctcatgtctctggctggcccaggatggtggcagaacttaggactgacatccttagtgggggttaccctatcctgagcatgcagggggtcctgattgtcccagactgaggtcctccctcaagtgttccaactacatcagggtctcactgagcttgtcctgtcggagagtgatgtcccagactgaggtctcccttaagtgctgcaagtacatcagggcctcactacacacagcttgagttagaggtgcctgtccctgctggctgctcaacatttatggcagccgctgtgtgggtctcagatcctatgttatgttccgaatgtcccgacctcctcctctggggccacacaactttagggactacacgtatctgggttttagcgctgcccatagctgcctggggcaaatcacaggctctgtgctgagaatcccagggactgtatagggactgtggggctgttctctgggatggggacagacactaacgggctgacctgtggcaggcctccaccaatcggaagcgtgtggaaaacattgcaaagaagaagctggattctctgatcaaggagtcaaagatccgtgactgtgaagaccccaatgacttctctgtgtccacactatccccctctggaaagcttgggcgcaaagcagaggccaagaaggtgagccctctgctgctgacatgcatttttccaacacctcgtctgtgagctgggtgaggaccccagaacatgtggaagtagatagatgtctatgcacatacagaactggttgcagaggtatgtctacaaatctatccatatacacacctgtacctttccatgtgccagtacacacacatagccctgcacttaaacacacatgtgcataatgcttatacatgtgcatacacacctgcatgcacacccatgtaaacgtacacctctgcatatacctacacgcatacaagtgcatatgcatgcttgtgtgctcataccacacaacactcacatgtgtgcacatagctgcacacatacctgtacacacatacctccctgcacacacctatacaacattcacacacccacatagatgcctgtgcacactcatgcacactagcacagtatctgtatgtggacaagtatgctcttagggacctaaggtttctcttggagggactttgagcattgcataccttggtgagggtttcatgggtgatggagggatggatagacagcaggatctcagggtccaggcagtcctgagagctatctgaagcatcttagatatgtgtcggtgtgccgctgttggggagcagcaagccaggcttgaaggacaggccagcagctggctgtggtggctgtggagctgaccttgcagctgagtaaggcatctgcagggtgagatgtctggagaaccatccctccactcccctgcccttccttgccactggctcgattctagctgtttccaaggctcttgggagggccggaagaggacctcttccagaagaacagggtctgctcctgctgtgtttttagaggtgtgtttgtttccacccacagccctagagagctcagcacagctgatatgatagttctgcaggtggctcacacgggtcccgtgcacacggccttctctttatttttagctcccagacatttgggcaggagagtataacctgcctgatgctttgcccagcctccattagtagggggctgagtggaggtggggccctgtcactggtccaaccctggtgaaagttaataggatctctgcttttcttggccaacaagaaggacacctggggccaagagcacagcttggcccttgctatctcatgtatgaataactgtgctcagagaaagcgtcttggagggagagagggggaggaggtaggagaggagggggagagagggagaaggaggaagagctctagtattgagatacccaggttggagaagaagtttgtaccccaagcctgacagtatcaccaagagatgggcaagagacaggcagaaaggaaatgcataatgaagcttgctgaactaggggcttaagaactaaggaatagggcactggtcatccagggagcttcctggagcattgtccaggcagaaaggagaatatctgtgtgtacttctcttgatttgtgtgcatattttgatcattcaagtcatggtgatggcaacaatttggacattacttaaataatttagatacatgtcagcctcatgggattcccaacacatgagtgaagctgctaaggcctctcccactacacgtccccagattgagaggaaagtggactaccattgctgggggctatctgtgcagggcacagatcagaatggtaccttaggcactgggaatctgcctctggctctggatctgggaagtctgtggactggaagggactggttaacatggctactttgggcattagggaaggcccagcacatctgctcctgacccttgaagagggtagaggagggattcagggtgaaggcagctggcaggagcttccgaccaccatcacatcagtaagatctgcaacagtagtacctggtgatgccaaggcagagtgacttagacaggagagagcatgggaaaacatcagctgttttctgaggccgtggtggagaactgagatttctctgtggtccaggaccaaagtaggctctttatagcatctctagactgcccacacacatgtgcaagggtgtggataagtgtccatagtgcatgcaggggtgtgtacatactgtgtggtatatacaagagtctataatgtatatgggagttcacagtgggtgcagggatctgtgtgtatgcaaaggcccatattatgtgcagtggtccatggtgtgtgcaggtgtctgtggtatgtgctgtgtctaagttgtatgaagaagtgcccatatggatgtataggagtgtccttgggctgctgtgtagggctgtccatggtgtgtacagtaatgccagtgctatgtgcagatctgacctgtgcataccaggggattcacaccatggtgtgtggacagttctcacctgtatagcatgggggcgcatgctgcatctatgctctcaactgatccccatctccagcagggttccctagctatagctacacggatctagtgtgtgtgatagaaactatcctctccccgggctaggtaacaagatgaagtgaggaagccctgactagagctgtcctgggtttccaggcatctatgcaggagtcgtgtggagtgggtagtgataccataatggtctgagagaagccagtgtgcagtacagttgctcagtgactttcatgtgaacaagcggatggggtcctggctaggggtgtgcctaccctgtgcccagtgcataggcagtcctgccctgtgctcctcagagcagtcagctggctgtatgcgggattattcactatttgtgcggcagtaacaggctggggcatcagggcttcaaaaaaggattacgtaagtagactcggctggagaatattccagatgcaagctgcatttattatgcagtctctatccacgataaagaaattcagaactgattacttgagtttaaaaccacacaccatgggaggcccaactcttcgggcctcttcctggcagctgtgcctgaccctcccccccccccaccccaaatcagtaccttgcctccaggcctggtcaaacccgcctccttcagaaaggctttctggggccaccagggagctatcctgccttccttaggtggttagaggttgggttcaacttctatctgtctctcagggtcagagcaaggttgaggaagacgtggaggccggggaagacagcggggtgagcaggcagaatagccgcctcttcatgagcagcttctccaagcgcaaggtaagcagaggccctggctcaggcatcccatgtggctctaccaccatccctgtttgttcgcagtggttggggtcaggtccctaaggtaggagctctggctactgccttcccttggcccatactggccagtgtctgagattccgaccccgagagtcccgagagtcccccagggccagggcactgcagatatctctgtgggccaattgggtagaagcccaggaacctaggctgatagcccctaccccgcacctcctggtcttttacatgtcctggcttggtctcaggccacaattccacttccccacacagaaaaaaggtagcaagataaagaaggtggccagcgtggaagagggggacgagaccctggactccccaggaagccagagccgagggtcagtgccctgcccagtgcgtgtgtgcatgcgtgcaagtcctgcccagtcccagggagctgtccccgagtgctaagcagagatgggtggctggtatgggaatccgtgaacacttaagcaggtaatgagaaagtggaactgtccaggcagcagcagaaagcacagggtgagcctagcttaggtactaggccagcagggctcctgagggtccctcagagtctcttgggcataggcactgcctgactaaccagaccttagctcccacctcctcttacaaagtgctccccccccacccccagcttcatgttccctccatgggtagagtctgtctatctctgtgcctcctataccctacgagagtgtcaggtattttggggtagcaccagtctgcttgcttcccacagcacctttgtggtccacactgctaatgcatcttggagctcgtcttccccacaggagggcccttctgatcccatattccccactcctgcctttcccctccattttcctctccaggccttgctctcacatctgtctgtctgtgtcacacccagtctctccccacctacgtgtctgcagtcccagctgtgccttgccacactgctaagacattacattccttgtcactggcctgcctcttctctatgacctagtctttctagtgcgtgccttcccagaacctttcagaagctcacgtttttcagaacatcccttggctgagcaggaatccccagcacccatctggttcatgttcaagggcacccagggtttttgttccaaagatcccatgatggcatcagagcagcccacacctagctgtcacatctctgttacctcatcactgatagggttggcctgtcccagactcctgtgagattaccttggataccagggtagtagaaacactgaacagagcagagggtcaagctaccaggacactggaaggttagagtagggggtacctgtctgctgggagtgcaatggatcttaactattgtttacaagtcccaggttgcctgggacatatgatttggggaacagatggacctgtacaggccctggagcctgaatcgaagaacaggaaggctggctgggactggctgggaggggcatagccacagggtcctgaatagccttgccgcaccctcgtaggactgcccggcaaaagaagaccatgaagctgtcacgagccctctcggacctagtgaaatataccaagtctgtggggacccatgacgtggagatagagggtgagggccacgtgtggggtggggccaggcaggtcggctgtggggtgcgggccgtgtgtgctcacacctggctggtctgtgccccagtggtatctagctggcaggtgtcatccttcagtgagaccaaggcccatcagatcctgcagcagaagcccacccagtacctgcgcttcaaccagcaccagctctcgcgcatatacccctcctcctaccgcgtggactccagcaactacaatccacaacccttctggaacgctggttgccagatgggtgcgtgcaggcatgtggttcagggtgggatggtgaggagagccatctctgaaagcctttagcaaccagggttgggccttccagaccctaggctggcatgagaggcatcctgtctgcccctgcacttgcagcatgtatgctgggctttcagccccagaacccatacagaagagcgtatgaacatcactgacctgcctgggtttctgtcttcccttcagttgccctgaactaccagtcagaggggcggatgctacagctgaacagggccaagttcagcgccaacggtgactgtggctacgtgctcaaaccccagtgcatgtgccagggtgagggactcaggctcggggggtggggtgggggctcccatgagacgaccctggatactggggtggtgggtaaacagagcagaggggagggtcagtctgagactgagctgcctggatactggagagttagaatggggtacctgcttactggtgtgtgtgtgtgtgtgtgtgtgtgtgtgtgtgtgtgtgtgcagtgaattctatgccaaggacccccgagggtgggagttaggaagcgcctctgttgggccctggaatccaggctgcatgagacttgggagcagcacttgtctgaggtcctggtatgctccaggagatgcaggtccaggtgctggaccttagtccctgaaagggactaaggatgctcaggagccatttctgtcccatgggctttccccggcgtgctgtacaggtttctgtctgcacagcgccttttcattacacttcttggctgcactgagctgtgtttccatgcatggtacgcccttgacattagcagcctgaccaccctgtgatccgggtctcctgcccactccagtgcagctatcatgtcccaggccaaagctttctgacccttccctaaggctctttttcaccagagccccacagaccaacaggtaggggtgtggtgtcagctgtgtacttggctcacacctgcatcctctcaggtgtcttcaaccccaactcggaggatcccctgccggggcagctcaagaagcagctggccctgaggatcatcagtggccagcagctgcccaaaccacgggactcggtgctgggcgaccgtggggaggtaggggcaagcctgcgtgggtgaggtgggtggtgggagggcttgggaattccagtgccacccctcaccctgtctctagatcatcgaccccttcgtggaggtggaggtcattgggctccccgtggactgcagcaaggagcagacccgagtggtggacgacaacggtgagggctcccgccaaagtgggtgagggcttcagacaccagccagtgcccaaggctgataagtccctcgtaggatacgggcactgctgggtgcccagtgccctgtccactctgcggctccttaggtgccagtcgtctctggacctgctgatcctttcttcgctatctccaggattcaaccccatgtgggaggagacactggtgttcaccgtgcacatgccagagattgcgcttgtacgcttcctcgtctgggaccatgaccccattggacgtgacttcatcggccagaggacactagccttcagcagcataatgccaggtaaggaggctgggcgaggttcagtgtttgccagcgttccccatccgtgttccccaggagctcctaactagcttaggacacaggaagggggcccagcctcttcctcctatgcacaggaggctccctggtcctactcaaggcccagacacctttgaggaaagtgtgggttggcagggtgaggagatgttggaaccttgatgactcgtgaccctattgctccaggctaccggcatgtgtacctagaagggatggaagaggcctctatctttgttcatgtggctgtcagtgacattagtggtaaggtgagtattacctcctgggcctcacatagccacagggaggataggaccagccccctcgttcccaccctgtccccttctggggctatggcctggcattcacttctctgggtcccttccttagtttgtgatgtggggtactgggggatgctgaccctggagccttctagtgctatctccatgtcccaggggggcttcgggaatccaagtgtgctaagtgtccccgtcctgggatgggacgccctggccactgtctccctgctgtcctgggatggggtgccctggtacctgcctccctgtcctctgtctgttaccagtcctagtttccctcagtagcctctgatgtcctgtacatctggggacgctgactgcttggattcttggcaagggtagagcgccatgacccctcccgtggctttccttgtcctgagtgacacatccctctgcatttctgtttcctcaaagggatctacatacatttatttgcccactacctggaacctcaggtccctatcccatgtaccccccgccccaggccagaacagaaagtgttctcagtctatggagtctagctgctagggctctaagggaggccctggggtacaacttggtgcaaccaacccttcggggcctgtaaccacacagtgagtgagggggtcctgctgggcccagcaccagctctctggtagcaccatgggtccagaggtactaaaagtgtccccttacttgccaccacccatccatctatcctatgtctgcctctctctgagggccatccctggctgggtaggccctgctctggccaccacggccacctcacctgccttcactctgtctctttggtcttgcagtgggcttctctatgtcccaagtctacttttagaagctcagccttgttaggagtctcaaaggtacccggcgccgcgggacggtgtagcccgccgccccacctgcatgccaggccgcgcccattagcatccgtgatacttggtagcattttggagactgtcagctcatgtgacatggatcatgacacgtttctggggtcccctgggccatcctcagccagagagtggcatttacgaggcagatccaggattcagccaaagccaaggacctatcctcctatcctgtcctcaccctgtgcaccttctgcccttccccatgactgtaggtctctctgcacagccttgcagctcctctgctgtcctgtcctctctacctgcctacactgtcagttactggcccctctagctctctcctctgtgtatgctaggatctgagttagggttgggggcaggggtacccagcgggcgctccagctcgaatcctggatctccttctaaatggctttccaaccacattgaccaaattgcactggatttgggatcttgaatcaggaagctgattcaagtgctggccactctattgcctccgcagaggggcccctggccgccaggccctgggctgctccaacgcacgagcacggcccgtcatgggggtgggtgggcgttgttggtgggatgcaggggtgtgtggcatgtaaggatccctatggcctctgtcctcttaagaggtggccacagatcctctccagcagtgatctatgcagaggggaatgcaggaggggactgggcagaagctggctgtggcctgatgctggttatgtacgtgttgagccagttgagggcctcaggaactcatggggccccgagtgcaagctggcctggaggaaggagtctgcctgggggagttcaacaaggcttcctagaaaggcagccctctaggagggaggagaggctcctgggaagtagggaggcagaggccaacggagagcaggccttccaggctgctgggcagggcacggtgagtgcaaccatggtgatggcagaccccgacttttcttccccccagatctggggctacagtcctcagttcctcaaggctgggacaagtgggtggctacaggtccatggtagctacaggtccatggtagctacaggtccatggtagctacaggttcagaacacccgctggagagccagttccccgcttgaagcttgaagccacacctgggtcaggtgggccaggcaccggctatgtgggctccttttcttgcaggtcaagcagactctgggtctaaaaggtctcttcctccgaggcacaaagccaggctcgctggacagtcatgctgctggacagcccctcccccggccctccgttagccagaggctcctgcggcgcacggccagtgccccgaccaaaagccagaagccaagtcgcaagggcttcccagagctggccctgggcacacaggacgcaggctccgagggggcagctgatgacgtggcaccctctagccccaacccagctctggaggcccctactcaagagaggtcaggcagcagcagcccccgaggtaaggcaccaggaggagaagcaacagaagagaggacactggcacaggtgcggtccccaaatgcccccgaaggccctggacctgcagggatggccgccacatgcatgaagtgtgtggtgggctcctgcgccggtatggacgttgagggccttcgaagggagcaacaacccagccctgggcctgcaggcagccacatggccatcagccatcagcccagggcccgggtagattcactggggggcccttgctgcagcccaagtcctcgagccaccccagggagaagcaaagaggcccccaagggtcctagggctcggcgccagggtccaggcggcggctctgtgtcctcggactccagcagcccagacagcccaggcagccccaaggtggccccctgccagccggagggtgctcacaggcagcagggggcgctgcagggagagatgaacgccttgttcgttcaaaagctggaggagatcaggagtcattcccccatgttctccaccggtaaggcctgccgttccgctgcatcccatgctctctacacctggcatgcctaggcggtccgtgcctgcctgccgctctctgcttcatttgtccgtcagcttagctgtggcctgtctgcctcagatccccacccctgccctaatggccctgtactttgtgggggcgggggtgggggaagagggctgctcgagtcatcaaggcatttctgagagctgcttgctgaggaacccagggatatccagccagccctcagcaagggcttccctggtgcctgctggctgccctgactggctgctctgatggcctaccttcctaggtctgaaaagatcccagctcttagccctgcctcccccccacccccacccccaagggtcagatgcaagaatgactctgcctttcggtcctatgggagcctgctgtcaattggtggtggtacctaagggtatcccctcttggagactcctcagagaccaggggagaaggtgcttagaactgaggtctgggcctcagagcttagggggagcagcttccagggacctgcattgtccaaatgtcactaagcctttttgtgaccctccttcctggctgacacttcctgaccttggagtgtgagggaactggtctgagctggttactgagctctagcctgggcagagggaggtccctggagtctgcctgcttccattgtattccccccgacccccgctcctgcccagcattgttgtccatctgtccatctgccagtgccccaccaccaccaccaccaccaccaatacactgactgtgttctcctttctgtccctgctccgtgctgcttccatagttagggattgagacctgcgagtgccaggtaacaaacaggcctgagccctatgtgtccccatgatgtcccagtccaaggaggactaggcctggcctgcccttgccccatggagcctgtgtgaggcccaggcatgactccagccttagcggggtggggtactcttgagtgtcacagtacatgtgtataaatggaaaagcctggttgctgggatatcctggggtggactggtggtccctacccttggctcagggggtcaggatcgggtgctgattaatgagattcatattcccccatctctctcccccctccctccctccctccctatcccttttctgtttcttgattctccccatgtctgtctttaatctgtctgccctttctatatctacctctccgcctcttgtctcccgtccctctttccccacagatactcgcctcttccccctgcagcggcccatctcccccctgtgcagcctggaacccattgccgaggaaccagccctgggccctggcctcccgttacaggcagctgcccccacaggtccatctcaggaagggtcccagtgccctgtaggcctgggagccaaagtgaccagctcccagcagacatctctgggagcttttggaaccctccagctcaggattgggggcggtagggaaaacgaagagccacccctcaggccacacaatggtgggatctccagcgggccacgtgaggggacttctggaagacagacagacagcaagagccgctcccgggtcccgggccacttgccagtggttaggagggccaagagtgagggccaggtactctcggagctctctcccacacctgcagtgtactcggatgccacgggcactgacaggttatggcagcggctggagcctgggagccacagggacagtgtctcctcatcctccagcatgtcctccaacgacaccgtcatagacctatcactgcccagcctcggcctctgccgcagccgagagagcattccaggggtctctcttggacgcctaacctcacggccctgcttagcctcagctgcccgtcctgacctgcctcctgtgaccaagagcaaatcgaaccccaacctgcgggttgcgggtgggctgcctactgcacccgacgagctgcagccccggcctcttgccccgcggctgaccggccaccatccacggccaccgtggcatcacctcaccctggtgggcctgcgggactgcccagtgtctgctaagtccaagagtctgggagacctgacagctgacgactttgctcccagctttcagggcagcaccagcagcctgagctgcggcctaggctccctgggtgtggcgcatcaggtgctggagccgggaatacggcgagatgctctcacggagcagctacgctggctcaccggcttccagcaggctggggacatcacgtcgcccaccagcttgggcccagctggggacgggtctgtagggggccccagcttcctgaggcgttcctcctctcggagccagagccgcgtgcgcgctattgccagccgagcccgccaagcgcaggagcgccagcagaggctgagaggccaggactcacggggtcccccagaggaggagcggggcacccctgagggtgcctgttctgtaggccatgagggctgtgtggatgtgccaatgcctgccaagggagcccctgagcaggtgtgtggtgctgctgatagccagctgctgctcaggctctgaccctgcctgatgattccaactctgtaccttccctgagactgcctgcaggggggagggggtgggggctggcctcaacccgacctttgctcaggaaatgaagccactgggtccccaaagctgttacgcccattcttctgtctgtggaagacccagtagcctccccttcaaccttagctgtcctcttgtctctgatcttgggaagcaagaaacagcattgtccacctgtccttctgggtggttcccacgttttaagatacataaatagatatttaactttttagaaccaaaacttacagtcaaatggctctgcgtccttccccactggtctgcctggtgtctggccctgtggtgtgtgctgagtgttttcttctacctgctgtgtgcttgtatcccggaatgcctgtgacacacccacaactgctaggatgtttgtccctgtcccctactccactgtgcaccgggcttgttttgaacaaaccacacagcaattgtgtaaatttgggaacacaactccaataaacgcatcaggcctgttctgtgtggctcacctgctccgctacggctcttacagccgctctgtcctcacggggcagagaggagtcttctggggtaggcctaggtaactccccaagggagcatgcttgagtccccagccaaagtctccactgtgggagctgtgctcctggagctagaggacaggattccagggccattcatcttcctggaagctgtggtgcccttacaggcaaggccttaggtcctgggaccttgaaaccttcggttgactcaggcagctccacccagccctgctaggcaaggcctgcctctgcctctgcctctgcctctggggaagaggacttctctgccctcactgttctcctgatatgggcagggcttgtgaccaacggtttgagctcaacaaggggggggggggggcagggaggcggttagtgctgcttgtctggagtccagcaagacctcttgcttttttttttttttttttttttttttttcgagacagggtttctctgtgtagccctggctgtcctggaactcactctgtagaccaggctggccttgaactcagtaatctgcctgcctctgcctcccaagtgctgggattaaaggcgcgcgccaccactgcccggtcctcttgcttctttaacctgttgtacatcaggcatgtggccactgtggcttgagcagaaatacacggagggcagacttgctgcctggggccagtgagaggcctcagcctgaagaatctcggtgccagcttgacgaccagcatcttacagtggggtagaccccatgcgtatgacagggctgcaggcaaaggcagggtcatgggcctggtctttctttctgctggctgagaaagggtcaaaggttgcaggttgggattgttggtggatatgatcagggtttggcggcaggctggtcccctcctcataataaaggtagctgaggtgggggttcatgcaggccccctggggaaggatacgctaggctcgcataacttacgatcagagccctagcatttactactgtctgctcatctcttatgagggccccgctaaggcaaatgggagactcagggtacactgtgaccctgcccagggtggcctgtagtcaccctaaaccagggctgggtgtagaaactagttcagcttcccagtttggacagtcccaagccccagctgtgcctgcctgcctgcctgcctggaatttgagaaagacaggaagtctactcaaacagggagggcttcctcatttgagctgaggaccagggagcatggtctagtgtgcagatggggacttccgataatcagatccctggcatgaggtctacagctacccaaggtgatgacttgaggccacttaggctaggctggaagatgggtagataggccctggactcaaagactgctgactgcggtatcggagaatgttgcttagtggggtgcctgccgccccctggtgcctatctgtgggagggccaggcctcaattctatctataggcacttcttatgaaaggtgcactgctgggtgaccggtatctggctgtgcctctcggcggaccacccgatggtgctggtgtgggattcaggcagtaagaacaaaggcctactgtgggaaatggagcccacggctcctaccccgaacctgtgcagtcctgtgaaccatgcctgcctacgtggccccaccacacactctcaatgcatggctatacgcgtgtatgcgtccattcctgggagacatgtcagttagggaaggagtctaagagccttgggtacacctgaggtgtctcacagcacacggcacacagatgccaagccctggggactggaatcaaagccactctgcccagcagcctccaagagcccttgaaggtccttcatgacagagcttcctctcttccagctcttgaaacaggagtgctgcttggtagcttgtgctgtccctaggaacatgaggggtgagagccggctcagcagacagacgtgctgatgtttgctccttctgaggcaagaagcaggaatgagagaaaacattgggacccaaggaggggacacaagaggattggaagtttagcactgactagctccaggtggcttgggtagtctgttggggcagctatagtgcacttggggttgtgggcgtcttctcagcagcagagaaagcggatctggtctctaggagacccttgtgctagacactgcttctcaccagatgagcacatgtgtatgtatatatttatatatatatgtatatgtgtatatatataaaagattatttaacagttaaatacattccaacactagtgtcccacaggacaaatgctgggttgggtgtccctggtacacgcactgtcagtcaatactccggtgtgaacacaggttcctcgaagtaaatcacattcctgatgagggatatgcagacacgtctggcagagtgggtatctcacttggtaggaacctcgtacttgaagatgacactgaagagctggccacctagacgctctgccagccaagcgttctttaccactgccagcttcagactctcgcagcgcagcaatgcatggtagttggtgtggatggcacggcccattccctcgatgacgaccaggtcggcaccacgctctcgcaccagcacagccagtcccttgtctagacggcttcagggaagaagaagatggcaccgaggttgggcaggggacagcactaagcacaccttggtggacaccaacctgtttccttggaggtggcgaccagcaagaacacagggacctttccccagcaccccttgctaactgaggcatgtccaaacccagactcccaacagtggccttccccctactggccaggaactgaacttccagcaccacctgcttttctgatgctcccatgtctgacatttcctttgtctactactgtgcacctctttgcagaaagcactgaacaggccagcaggatgctcaatgggcttaggcacttttctaccaatgacttgagtttggtccacagaacccacatggcaaaaggtaaaaccatgcaagttgttgtccgagatgtacacaagctgtggtgcaagagtgcatgtatgtgcatgggcgggcacacacacgcgagcgcgcgcgcgcgcgcgacgcgcgcgcacacacacacacacacacacacacacacagagtaaataataagtgggaaaatgggacagcttcctgccacaggtctgtcctgtagcagggagcctgggtcagttgcccatcagccctacaggctacaggaagaagtggccacataggtcacatttagggcaagcagcagcatggctggttttggtgccttgcagagcaggatgaagaaaagctgggttacctgaggtctaggcatggagagctggaaccggtctgcaccagcagcagcctatcttctctcagagcagtgctatagaaaagcatgcggtcagggcccagccaaggccctgtgacactgaccctcctcagcaaccctttgtgagtctcccagaactggttgggcccagcccctgcctggctcaacgggggtagccagaacctaccagatgatggggtccatggctgcaatgcgttctgccacaatgagagactcactgtaggtcacatcgttcagggcagggcctgagttgcatgccaagatgacctacggtgggggagggagcagcagctctttagaacctgggctgttacttatgtggcccaagttcaccacagctgaccctggcaggctccaagcagcagccaactgctgggcagcagagccccaaacaatctcagggctctgtggcttctgggcgaagcagggctgtgcctagaggcctttactgcctcccatccatcccatcctcagcctgcctcctggatcaggctaacctctcactattctcaagcttctgggtcaagccttcccaggaaacaggaagcagggaagccaggccttaagctacagcccgcacccaacaggcccgggcgctccgtgtcctcacctgcactcacctgccacaaatgtaggagctctgaccaccgccagaagcccacaggaacgccaaccccaccaacagcggagaagcccagggggagggtcccgcccacccagccttttcactcacctctgtccctctaaagagtagctccctgacaaaggggaagactcccaaaatgatgtctattccactgttatctgcgaaaattaaggcacatttatgagggggcccctgtaagacaaaaccaggacgttcagttgggaacaggtgcactcaagcgtttcacactccactgcactctacacccccaactccctgggcgcctgggtccagccacagggtctcagagcgtgggaggcaacagggacagggcagttggtcccatgggcagatgacccagccagtggtcattgccggggctggggacggaacccagagcctcatacacaccgaacaacctactgttcttttctctgagtcacacctgacccggggaatgggaatttctgacatgagactctcagctggtggcttgtaagttctaagaggtgggctacaggttatacctgtgtcccaggccatgtgaatgtgctgtatgtgtcacacccatgtcaccgtaagcccaatgactttggtggccaccctctctggctaggtccagactctgtgctccaacccccaagggcagatgcagcggcaccttacatacctttaacctctggagccacttggtgtaggaatccacgagccagggccgttctgtgaggagacaggaactctagtcagggaagctgaggcctagtgtcaggggcttgtttcaccaaggctatctcatctcatcccctgagcaacacggccacatagccaccagaactgccccgtccgacctgctgcttaacttctgcagagccagacagagcgccacagagcacacagtgtccataccttgcaattttctctttgcttcttcaaacccaaactgggggtccgattccaggacactgtagaaatgagaaaattgacacaaagcaaaaaccacaaacaaagcccaacctcaccattcctccctccccacagcgagggatctcccagcagcactgcgctggactggccacacctccccttaggagccagtgctgctcacggaggagcacgcttcagacaggaacaaatcctttcagtatagcgttaaagctcagacctgctcagggcgatggagctagctccttctaggactgaccaccacatactggggtctgcacctcaagtgggcggctagaatgagggtgaggcaggagagtgaacaaccctttgcaatatgctctgacaccagtcaagtagcatggtcacccagggaggctggggcctcaggtggatcaccatggagacagagactctacagttgctctaggagaggaccctcgatgccccttaggaacacacatgtcccagtattctgcaggtgccagcaccttggcaaagcaccttggttacatcaggcaccaaaaaggatcaatccctgctgtatttggtaactacaaatttgggcttttaccctgaaaatgtcatccctaaagcacaaatcagcctccccatggtgcctgcccagatctccgcagcacaaagacctatgacttcatgtgtgctcttgctcatcactgtcagggccagccaacccagagcaagtggctctgggtctagacagcctggtggcagaatagcatacttctgcaacagaaccagttccaagccacctcagagggagaaggagcaggcgcgcacacctcagatacctactcagacacagccttggctccccagtcaaagacattcccagctaagagccccttcaccagggccagctgccgctcttcccagcctagtgagtccagcgagcgcgtcacgctctgaaagcattttagtgcgaggccgttttctttctgcttcacctgtgggaaagacacacaggcgttgctttattggtgctcactctgaaggtaggcccacaccactccttgtaccctctagggaggtctctgcagggcagcagatgaaggggcctcaacgaggactgaaaacactaaccagggagaagggggcatttggtgtcgtgctcccgagaggtgacgctcagggctgggtaccaggctacttactgatttggggcagtcctcaggtctacctggtgttgggtgaagcagggaggcactctggcccacaagacttagtggagttaggagggcaccgggtatgcacccccagaggccactgtgcatgggcagctgaggaagggcaaagtggctgacaacagggaaacaaggggcccacggctcctagccagagggatggaggagtgctaacacacgcctagagtagagctgtgcacctagaactagccagtgtgagcttagacctcctgaggctggcacaacaaaatgctactgagtcctctgcaccctacttgtagtctacatggctcaccttggagtagggatctgggaagttgaattcattcaaacagtgttctcttgtgtccaacaggctgcgcacagtcagtgtcccataagcactggggacaaaaccaggatggagtgtggctgaacaagataggtctcacagagcccaggaaagcccagtgagacctctgcacacagctggaaaagaccttgctgcgtgggcttcatcctcccaccatgccagtcgaggtccctgtgctaagaagggaacccttcctcagtggccacaggcagggactagcctggggtcacaggactcacaagggctggtgccggagggtctgcagtttgccccagtatttctgccggaatttctctgccctctcaactgcatccatggactctggctggctggccacagctcgcttcaccacctgccaacagcagaggtgccaaataagctctgcagagacagcacaggctgagggcaggcacagcctggtggggctctgcccagctacactggggcacacttgcacagctacaaccacagtaacagtgacagatcgtgctgttgtctggtatttcagctttcaaagacaccacccttgcctacatcctgccgcagctttgggagacataaagagaccgcggtgcttccctggcagctacaaagactaaggctctgatttcttccaagagttgctacttgggacccagggctgtgcccctcattcaccacatacccagatgtctgaaagagggctgggaatgcctactgtggccacaaccttcgagcctggtggagctcgagatctagctgctgcagccctgccccaacacctcccagaagccggcactgccactatacacagagctggcactggaaaaggtagaaaacgcacaaggaggcgtatggtttgaatttgaagtgcttccccaaaagcccatgtgcttggtactcagaggtgggcctttggaaggtgagctttcactgatggactcaaaatattacaaccattgtaaagcagaatatgggaggtggggcctggctgaggaaaaaaaatcactaggggcttgctgtgtgagagagagagagagagagagagagagagagagagagagagagagagagagagatgtgtgtgtcctgaggtaggatcttactatgtagccctggttggtttgaaatccctatgtaggcaagactggccttggactcactgagatctgcctgcctcgccctcctgggtactgggagcaaaggtgtgcgccaccataacagccttgaagggttaactcgtgttttggccccttccaatctctccctctctgctcctggttgccacagagtaggcagctttgctgtagtgtgccctgcctcgccacagggtcttcctaccatttctgtcagaatctgacacagagacagaaaaaaaatgaacaaagaaatagccccacaaagcaacataaaagcctatttacatcagaatcacaacaggtgcctggtgtggtggtgcaggctgcggtaatcccagcactcagcaggctgaggcagaaggatcatgctgagtacatccaatcctgggctacagaggaaaaccctttctccaaaaaaggccaaaagcaaggagacccatgtgatggcttgcctgctgaaaagctgtaaatagtgaaggcacgtactgccatgaagaggccatgtcactatgtcacgcccttaccctacacactgtagagacaggcatactctttccttactaagaccatgtgacctcttggaaatgtccctgccctctttcccttctttcccctgttgaccctcatagggatggagccagctgagcccaagagcagcccaggttttgggagaccacacgctctccacttgctgtgtcttggagcctcaccccatccagggcctcctcaaagcacgtgagccagtactgacgggccagagcatcatcagtgaggtctactgtgtcaggcacataggaggacgggtccaggaggaggggcaggttgaccaggggcctctccagccggtccatttccagcaggtcaaactaggaggacaagaagaggtcagtggagaggctactgtcagaaaggtcacaaccctaacttaagctctggctttcaacatgaatgcagcagctccacccttcttcctgcagcaccggccagacttcctggattctgtccacggcttggctgtggagtgtgtctacacttgaaagcttcagatcagggtagctccctaaactaccgccccttaaccccacagcagcctgtggttcctaagctggccctggctgctcgtacaccggctcacgctgcctccctcccagcactcagcctgagttccagctctggttctcaacagtgctggggagttgcagggctaagtcccagcagccctttggctctcggtctcgtctgcgtgagttctggcagactcgctgctggtacatgccttggcttctgtcttgtccagctgatgtgctgtctgcaaagcactacggggctgctcctcataccctggccccgagacgcagtcaggaagaccagatacttaggtggccacatggaccgcctagctaacggcagtgcaccacagtgaggtgagccgtgctatgctgttcgtgcccagcagtggctctcgccccagagaagtgtgacctctgctccaaggccgcctctttttgatcttgagtgtctatctgccacaccacactcctgaactcaagccccttcagccaggggatttcaactgcaatgactgaacatgaactctgggttaagactcacagcttggacagagccacaggggtaaatgcttgcaaaccctaggaacacataccggtggcaaggttagcatgaaaggtctgagaaactcccaagctgaccaaaaatgggcaggggttatctacataaccactggctcaccactgagcgtcccagcctcagagccctctacgcacgagaacacatagctctccagcttcacgtcactagttactatgctaccaagtttcctgttctgaaggtcttgccattgccagggtctcggtggcttagttctgtctctcttggcaatatatgcctctaatgactgctcagcacctgggctgtgtcagctgtgtctctgtgacacaacatcccagcacagcactacaggctctgcaggctccaaggtgtgggacagagctaggcagtgccactcaccctgccgtgttctactgaggaagcatgggcctcctttcagttcagacagaaggacaactttgcttgctgttgtctccatcttgggagccatgtggcgggcctcagcagggccacttgaattaaaaaccaagggtgggagatgcccatttcagagcaaccgttccccacccggcctggtccacagacaaatgcccaggggcacgtggagcgctctcactgcagaggcccgggctcactaccaagggctgctgggtcgacaccatgcctgcagctgggtcgacaccatgcctgcagctgtgtgcgaggtggtggattacgtcctgcttctagaaatagccttt

SEQ ID NO: 224 - DNA, 5365 bp, Mus musculus
cagtgtcacagcgccgaacgcgctgcgcgcacagtccgccgcgggccgccagccctggcgaagcgatgtcctcggaaccttagcctcagtcagagccaggccactgaccacccgagtccgcgccctcgtggccacctcgctgctgtcaacgcggagacaatggacgcgggagccgccccgcagaagcacatggagcgatgcatgagtgccatgcaagaggggacccagatggtgaagctccgtggcagctccaagggattggtccgcttctactacctggatgagcaccgctcctgcctccgatggcgtccctcccgcaagaacgagaaagccaagatttccatcgactccatccaggaggtgagtgagggccggcagtctgaaatcttccagcgctacccggacagcagctttgaccccaactgctgcttcagcatctaccatggcagccacagagagtcgctggacttggtctcacccagcagtgaagaggcacgtacctgggtcaccggccttcgctacctcatggctggcatcagcgatgaagacagcctagcccgtcgccagcccccaaagtggctgaagcagacgtttgatgaggctgacaagaacggggacggcagcctgagcatcagtgaggttctgcagctgctacataaactcaacgtgaacctgccccggcagagggtgaaacagatgttcagggaggcggacacagatgaccatcaggggacattaggctttgaggaattctgcgccttctacaagatgatgtctacccgccgagacctctacctgctcatgctgacctacagcaaccataaggaccacttggatgcctccgacctgcagcgctttctggaggtggagcagaagatgaacggtgtgaccctggagagctgtcagaacatcattgagcagtttgagccttgcctggaaaataagagcaaggggatgctggggattgatggctttaccaactacacccggagccccgccggtgacatcttcaaccctgagcacaacagagtgcaccaagacatgacgcagccgctgagtcactacttcatcacctcgtcccacaacacctacctcgtgggtgaccagctcatgtcccagtctcgggtggacatgtatgcctgggtcctgcaggccggctgccgctgtgtggaggtggactgctgggacgggcccgatggagaacccattgtccatcatggctacactctgacctccaagatccttttcaaagatgtcatcgaaaccatcaacaaatatgccttcatcaagaatgagtacccagtgatcctgtccattgagaaccactgtagtgttgttcagcagaagaagatggcccagtatctgactgacatcctcggggacaagctggacctctcctcagtgagcagcgaagatgccaccatgcttccatctccacagatgctcaagggcaagatcctggtgaaggggaagaagctccctgccaatatcagtgaggatgcagaagaaggcgaagtatctgatgaggacagtgctgatgagatggaggatgactgcaagctcctcaatggggatgcctccaccaatcggaagcgtgtggaaaacattgcaaagaagaagctggattctctgatcaaggagtcaaagatccgtgactgtgaagaccccaatgacttctctgtgtccacactatccccctctggaaagcttgggcgcaaagcagaggccaagaagaaaaaaggtagcaagataaagaaggtggccagcgtggaagagggggacgagaccctggactccccaggaagccagagccgagggactgcccggcaaaagaagaccatgaagctgtcacgagccctctcggacctagtgaaatataccaagtctgtggggacccatgacgtggagatagaggtggtatctagctggcaggtgtcatccttcagtgagaccaaggcccatcagatcctgcagcagaagcccacccagtacctgcgcttcaaccagcaccagctctcgcgcatatacccctcctcctaccgcgtggactccagcaactacaatccacaacccttctggaacgctggttgccagatggttgccctgaactaccagtcagaggggcggatgctacagctgaacagggccaagttcagcgccaacggtgactgtggctacgtgctcaaaccccagtgcatgtgccagggtgtcttcaaccccaactcggaggatcccctgccggggcagctcaagaagcagctggccctgaggatcatcagtggccagcagctgcccaaaccacgggactcggtgctgggcgaccgtggggagatcatcgaccccttcgtggaggtggaggtcattgggctccccgtggactgcagcaaggagcagacccgagtggtggacgacaacggtgagggctcccgccaaagtgggtgccagtcgtctctggacctgctgatcctttcttcgctatctccaggattcaaccccatgtgggaggagacactggtgttcaccgtgcacatgccagagattgcgcttgtacgcttcctcgtctgggaccatgaccccattggacgtgacttcatcggccagaggacactagccttcagcagcataatgccaggctaccggcatgtgtacctagaagggatggaagaggcctctatctttgttcatgtggctgtcagtgacattagtggtaaggtcaagcagactctgggtctaaaaggtctcttcctccgaggcacaaagccaggctcgctggacagtcatgctgctggacagcccctcccccggccctccgttagccagaggctcctgcggcgcacggccagtgccccgaccaaaagccagaagccaagtcgcaagggcttcccagagctggccctgggcacacaggacgcaggctccgagggggcagctgatgacgtggcaccctctagccccaacccagctctggaggcccctactcaagagaggtcaggcagcagcagcccccgaggtaaggcaccaggaggagaagcaacagaagagaggacactggcacaggtgcggtccccaaatgcccccgaaggccctggacctgcagggatggccgccacatgcatgaagtgtgtggtgggctcctgcgccggtatggacgttgagggccttcgaagggagcaacaacccagccctgggcctgcaggcagccacatggccatcagccatcagcccagggcccgggtagattcactggggggcccttgctgcagcccaagtcctcgagccaccccagggagaagcaaagaggcccccaagggtcctagggctcggcgccagggtccaggcggcggctctgtgtcctcggactccagcagcccagacagcccaggcagccccaaggtggccccctgccagccggagggtgctcacaggcagcagggggcgctgcagggagagatgaacgccttgttcgttcaaaagctggaggagatcaggagtcattcccccatgttctccaccgatactcgcctcttccccctgcagcggcccatctcccccctgtgcagcctggaacccattgccgaggaaccagccctgggccctggcctcccgttacaggcagctgcccccacaggtccatctcaggaagggtcccagtgccctgtaggcctgggagccaaagtgaccagctcccagcagacatctctgggagcttttggaaccctccagctcaggattgggggcggtagggaaaacgaagagccacccctcaggccacacaatggtgggatctccagcgggccacgtgaggggacttctggaagacagacagacagcaagagccgctcccgggtcccgggccacttgccagtggttaggagggccaagagtgagggccaggtactctcggagctctctcccacacctgcagtgtactcggatgccacgggcactgacaggttatggcagcggctggagcctgggagccacagggacagtgtctcctcatcctccagcatgtcctccaacgacaccgtcatagacctatcactgcccagcctcggcctctgccgcagccgagagagcattccaggggtctctcttggacgcctaacctcacggccctgcttagcctcagctgcccgtcctgacctgcctcctgtgaccaagagcaaatcgaaccccaacctgcgggttgcgggtgggctgcctactgcacccgacgagctgcagccccggcctcttgccccgcggctgaccggccaccatccacggccaccgtggcatcacctcaccctggtgggcctgcgggactgcccagtgtctgctaagtccaagagtctgggagacctgacagctgacgactttgctcccagctttcagggcagcaccagcagcctgagctgcggcctaggctccctgggtgtggcgcatcaggtgctggagccgggaatacggcgagatgctctcacggagcagctacgctggctcaccggcttccagcaggctggggacatcacgtcgcccaccagcttgggcccagctggggacgggtctgtagggggccccagcttcctgaggcgttcctcctctcggagccagagccgcgtgcgcgctattgccagccgagcccgccaagcgcaggagcgccagcagaggctgagaggccaggactcacggggtcccccagaggaggagcggggcacccctgagggtgcctgttctgtaggccatgagggctgtgtggatgtgccaatgcctgccaagggagcccctgagcaggtgtgtggtgctgctgatagccagctgctgctcaggctctgaccctgcctgatgattccaactctgtaccttccctgagactgcctgcaggggggagggggtgggggctggcctcaacccgacctttgctcaggaaatgaagccactgggtccccaaagctgttacgcccattcttctgtctgtggaagacccagtagcctccccttcaaccttagctgtcctcttgtctctgatcttgggaagcaagaaacagcattgtccacctgtccttctgggtggttcccacgttttaagatacataaatagatatttaactttttagaaccaaaacttacagtcaaatggctctgcgtccttccccactggtctgcctggtgtctggccctgtggtgtgtgctgagtgttttcttctacctgctgtgtgcttgtatcccggaatgcctgtgacacacccacaactgctaggatgtttgtccctgtcccctactccactgtgcaccgggcttgttttgaacaaaccacacagcaattgtgtaaatttgggaacacaactccaataaacgcatcaggcctgttctgtgtggctca

SEQ ID NO: 225 - protein, 1601 aa, Mus musculus
QCHSAERAARTVRRGPPAKRCPRNLSLSQSQATDHPSPRPRGHLAAVNAETMDAGAAPQKHMERCMSAMQEGTQMVKLRGSSKGLVRFYYLDEHRSCLRWRPSRKNEKAKISIDSIQEVSEGRQSEIFQRYPDSSFDPNCCFSIYHGSHRESLDLVSPSSEEARTWVTGLRYLMAGISDEDSLARRQPPKWLKQTFDEADKNGDGSLSISEVLQLLHKLNVNLPRQRVKQMFREADTDDHQGTLGFEEFCAFYKMMSTRRDLYLLMLTYSNHKDHLDASDLQRFLEVEQKMNGVTLESCQNIIEQFEPCLENKSKGMLGIDGFTNYTRSPAGDIFNPEHNRVHQDMTQPLSHYFITSSHNTYLVGDQLMSQSRVDMYAWVLQAGCRCVEVDCWDGPDGEPIVHHGYTLTSKILFKDVIETINKYAFIKNEYPVILSIENHCSVVQQKKMAQYLTDILGDKLDLSSVSSEDATMLPSPQMLKGKILVKGKKLPANISEDAEEGEVSDEDSADEMEDDCKLLNGDASTNRKRVENIAKKKLDSLIKESKIRDCEDPNDFSVSTLSPSGKLGRKAEAKKKKGSKIKKVASVEEGDETLDSPGSQSRGTARQKKTMKLSRALSDLVKYTKSVGTHDVEIEVVSSWQVSSFSETKAHQILQQKPTQYLRFNQHQLSRIYPSSYRVDSSNYNPQPFWNAGCQMVNYQSEGRMLQLNRAKFSANGDCGYVLKPQCMCQGVFNPNSEDPLPGQLKKQLALRIISGQQLPKPRDSVLGDRGEIIDPFVEVEVIGLPVDCSKEQTRVVDDNGEGSRQSGCQSSLDLLILSSLSPGFNPMWEETLVFTVHMPEIALVRFLVWDHDPIGRDFIGQRTLAFSSIMPGYRHVYLEGMEEASIFVHVAVSDISGKVKQTLGLKGLFLRGTKPGSLDSHAAGQPLPRPSVSQRLLRRTASAPTKSQKPSRKGFPELALGTQDAGSEGAADDVAPSSPNPALEAPTQERSGSSSPRGKAPGGEATEERTLAQVRSPNAPEGPGPAGMAATCMKCVVGSCAGMDVEGLRREQQPSPGPAGSHMAISHQPRARVDSLGGPCCSPSPRATPGRSKEAPKGPRARRQGPGGGSVSSDSSSPDSPGSPKVAPCQPEGAHRQQGALQGEMNALFVQKLEEIRSHSPMFSTDTRLFPLQRPISPLCSLEPIAEEPALGPGLPLQAAAPTGPSQEGSQCPVGLGAKVTSSQQTSLGAFGTLQLRIGGGRENEEPPLRPHNGGISSGPREGTSGRQTDSKSRSRVPGHLPVVRRAKSEGQVLSELSPTPAVYSDATGTDRLWQRLEPGSHRDSVSSSSSMSSNDTVIDLSLPSLGLCRSRESIPGVSLGRLTSRPCLASAARPDLPPVTKSKSNPNLRVAGGLPTAPDELQPRPLAPRLTGHHPRPPWHHLTLVGLRDCPVSAKSKSLGDLTADDFAPSFQGSTSSLSCGLGSLGVAHQVLEPGIRRDALTEQLRWLTGFQQAGDITSPTSLGPAGDGSVGGPSFLRRSSSRSQSRVRAIASRARQAQERQQRLRGQDSRGPPEEERGTPEGACSVGHEGCVDVPMPAKGAPEQVCGAADSQLLLRL

SEQ ID NO: 226 - DNA, 43865 bp, Homo sapiens
gcttctcgccagggttccccagccgcctgctccccaatgtctcctggccttcctcccgggacgctccttgggttctgagatctgctgagatggggcctgtgtgttgcgggacggggccgcacccaccctgggggagcggctgagctgctggatggcctcctgcctctcaggggcccaacagcgacctgcaggcagtcagggaggactccctgaaggaagcggtttcctcagtgtctgaccacagggcagtcacaagttccccaaaggcgaaggtggctcaccccgagtcctggctgcaccctggtacccacagcctcgtgtggaacatgaaccatcccggtcccaggaggcgcgtgctgggagcggctcccagcccttggatgatctttcctcttgcctaatgggcaggctgctttcttttctgttttagacctgaaaaaaaaaaaaaaaagcatttgccagcatagcactgatggccacccggcccatgctgtccaccgggcgggtggtagggagggcagagagcaacgtgcgggcctcaggcaccaaggaggccgcacaggcaaggggctggtgggcgctgggctcactggtgcatccctgcagggctgactggccccaggctgtgtgtgtgagtgggggtgggccatgccgtcactgtgggcacccaggcctgtcctcgggagctctgacagcacagggaaggtggccggctgggtggggactcagggcaggacaccgggctgcctggggcggggggactcctatcagtccccgtaaggccctgctcagtgcccggcccctgtgaggctgaggatgggacaagggtgtgtcctgccgtccagacactgggaccttgtgcaggcatccagctgccttggagcagatggcagagaccctggagcagggcactagcagggggctgggcacctacagcaggagccctcagccgggacccatgacacaggaagggctggaggctgggctggacagtcccccttgggcactggcctggcctgacctggacatgccgagtggccggggaacgggtgccaggctggcccgagtggccttcctgctttcacaggaactggcaggccgggtggacccagtgggtccagcaaggttggtgtgacccctgcttcctgggcctggggagaagctgggctccatctgtgcccctggagcagccagtggctgagtggccggaggagatgcctgaggaggctctggctctgccctcagggacgctcccgcccagaccgcgcccatacaggcagcctgcccccagtatgggcagccccccaaagacccatctgcacagggatgatctcgaggccacgtttcattcccacttcagcctcctgtactcccgagtctcactggcttctaatctgcacttatgcaaccatggtaaaaagtgactacatctggggatgtccccgtgcgctgtgatgtgtgcttggccgtctctgcaaacgggggcccgaggggctggtgctgcttctcagcagcctgggccacgccggtcttgcagcgtggctgctcctgggcactcttgagtcactgcctcgtagtgacctggccccctcattgcagactcagccccgaatcctgctccccggtggctgggttgcacccatctggaggtggggctcaggaggcggccttggtgatgccaggtggtcagtgggtttttgccatccgccaggagcttcactgggcctcccgttggccctgcatgggacatggtgacaaatgccacgctggtgacaagccctctctggcttgtttattttgtcttgttggagatgcacgtgccccttgcagccttgccggtggtcttccttgccagtggtcctccttcctggtggtcctccttcctggtggtcctccttcctggtggtcctccttcctggtggtcctccttgctggtggtcctccttcctggtggtcctccttcctggtggtcctccttcctggtggtcctccttgccggtggtcctccttcctggtggtcctccttcctggtggtcctccttcctggtggtcctccttcctggtggtcctccttcctggtggtcctccttcctggtggtcctccttcctggtggtcctccttgccggtggtcctccttgccggtggtcttcctttccggtggtcctccttgcctgtggtcctccttgcctgtggtcttcctttccggtggtcttcctttccggtggtcttcctttccggtggtcctccttgcctgtggtctgtcttccttgggctgacactgagccagcgcttatctgaatgcagtgctggcgcgtggggaatacgctcctgagtaattcacacgcaggaccggccggccgtggacggcgggcagtgtttggaggccagtttctgctcagcgcctcatggtggggctgtttccttggcaccgtgaggggccggtccatgcggccagtggaagcgtccatcggcccctcaccactctgttcgctcccctctggcctgtttggctccaagcgagcaccctgagctgggacctgggccaagcgctcttctgctccggcagtgactgtgctccagctggcgctgtccagccctgcccaggccctttctgccctccggttcctccccttgctgctctagcctggcctaagggaggggcccgtgcccccatgggactggcccttcatgtccccaggggccctgctgtccaggaaagcagcccattctctccagggcttttctaaggccatgctgccccggggtcccaggccgggttcccccaagagctaggacccctgaccactgctctgtgtctcccagaccagaagccctctgggtgcggggcctacctctggtttcctcacttcctctccagctctaagccatgcccacacacagcaggtggttagtaaaccccggctgatggctaggggtatggaacaggtgggctggagacaggcaaggaaggacgcagagggtggcaggtcttggccccggggcatgggccgtgtgggctccctctggcctgagaaccgagtctgaggactgggatcctgggagccaaaggcaggggcttagtggcataaaagggacactgcttctttttcaaggattttcatatttttaacgatgcaagcagctgggaggcctggggcggcacccaggtgtaagctgggctgctcgggcctgatgaccctggtggaggctggtgaggctgaaggggctcctggtcctgggggtggggactggcctgcctgtggggccaaggctgtgggggcctttgaccagcagccaggggctgacctgagctcaggtttcaccgtgactgaccgtgtggacttagcaggtctcacagcttctctgagcctcagacccctcagtgcagcggcaacactccccacctgcagggcaacagctgcgggttcgcctcttctctctctgcccttccttcagcaggcccttgaggctgggtgccagcctggtggcgtgggggctcaggagtgtgcccagtgcccctctctggggccggatctcacacccccacatggggagggcctgggtggggccaggtggccagcagctcctgacagaccctgctgagggtgtgtgtcctgggacgtggctgcattggtggccatggggcagtgttcgtcctgcaatcctgctcactggactccgtgccaggctggccaaggctctgcatggctgctgcatgcgggcacagaatgtaggtcaggctgttgcaggggggtagggctgggcagccagggcagtgcctgctccctcagcgtccagtggggctctgcagcccggggctggacacctgacccaccgaccttggccagggcccttctggtggtgcctgaaccccctggcaaggctgtccttcagcagggaggagggaggcatgtgggcacctgctgtgactgtggatgctgctagcagggcgggctgagctcggtccatgtgggacctggcccctgggcactgggaggctaggatgtgtgggtcctgctgagatgattcagggcagagccttcccgaagctccggtccctgtggctggctcagctttcgctccctgctgggttacccagccctggggcctcggctcccctccagcccgcaacagggaacactgtggggacagtgacgcccactggacaccccatccccatgcctcccgcctctgtgggcctcaaatccagctgtttcttgctctgtcttctttgtttcttctgcgcctctgccttggcattaacaatgttccctttgaacctgtctgcaactcccccaggcttgggggaaccaggagcagggctggggcctttgtttggggaatggcaccatggaaggtgggcagggcagctggggatgccagactcatcccccccagggcctctgcatctggccttccctggccatccacccgggaccccctgtcccatcagcttgtgtttgcttgagtcccactttcttggggctgcctcccctggcgccccctctctggaactctgcctgcactggctgtgccactcggcagcccctctgcctgacaccccctctgcctgacacctcctccacctgacaccactccgcttgacaaccctccacctgacaccccctccgcctgacacccctccgcctgataccccctccgcctgacacccctacacctgacacccctctgcctgacaccccctccacctgacaccccctccacctgataccccctccacctgacacccccgcctgacacctcctctgataccctctgcctgacacccctctgcctggtaccccctccacctgacacccctctgcctgacaccccctctgcctgacacccctctgcctgacaccccctctgcctgacagcccctctgacaccgcctccacctgacaccccctccgcctgacacccctctgcctgacacccctccacctgacacccctctgcctgacacccctccatctgacacccttccacctgacaccccctctgcctgatgcgtggtcttgtccccatggcctgctgtcaggtggtcaccccaaggcatcttggtccatccggggcaactacggtcagtctgggtggcccgtggtcagtctggccaggtcctcactggtctgtcttcctcctcagccaggcgatgtgctcctctgtgaccttagagccccagaaccgagctctgggctctgggcatcgctggggtggtttcacatggggccctgggggctgaggcagtaggggatctttgtgctggggacacagcagggccttagaggggcatcccttgccttactctgtgctcccaccccctagccactgcccaggacaggaggtcgctcagcccatcctggtgccaagatgtgtgtcggggtggtgggggtggatctggcccttcgaggcccccacagtgggcttagtttcctaaccgaagccgtaacatccatagaactcttaaaccaggcaagaaagcaacacggaattcgctttgatgttgaataattaatgaaatgtctgaggtatgggcttctgggctgtgtctctcccagccgcagagctgtcagcaccgtctcgtcattggaggggcctgcatttctgtctttaaatgtgcgcttggcacctctgagaggtaattaggacgttctgtgcacgatgaggaggctggggtgctcacctccagggggctgcagggccagtgcgactgttgtggaccagccccggagggggagctgcagggtcagctgggctgtgagaccccgggcaagagtcccctgcctcagtttccctatctgaaaagtgaagaggttggatccaggggcctctgggggcccgtcgaactcagacattccaaggtggtggaggagcagaatcagggacacatgggggacctcgctgtgtccccaggtcgccctggtgctggtaggcaggctgcagagcccctgcctgctgaagtttgctgaacggggctgcagccgagaatctgtttactgcagcaggtcatcgggaagcgtttccttggagacatatgtaggacagaactcggaagctgaaaccgaggcaccccacgaaggccccacaccgctggcgggaggcggtttctcagggctctgctcctggaggctgctgggagacagctgcagcccggagactggtcagagcccgcgacccgagaacagggctcctagcccctcctcacagcagtggccacccagggggatatcacacttggacctttggtgcaagaatgtcccccgccagaccgcactgaaggtgcccactgccctcctctgggaaccctcctccccatggcctgagccaaggcaccagctggccaggcccttggagaactgctggtcctccctggttcaacacagggaaactgaagccggagaggcagtgaactcccatggggcacacagagtcgggcagagtcagggtgtgaactggggtctcctgagctggccggagcactgcccttcccggctcctgtctacagtggcattttctggaacacactcagggcaccccttgctggcagccccagaggacatggtgctgggcttctgtgcggtgggatcgctcggcagctggttgcgggtgtgaccaggccactggcctccctggcggcacagggtgctgcccactgtccaagagagggctctggggctcagaagcagctgggctgtgggaagtcctgggggtggagtctctttccatggggttcgagtgttggcaggggggcttcacgagcttctcccctccccactctgcccttactctggtcttcccgatgtgcatctccatctttccatccttggctttctctggggctgtttgtgctcaaacacagggtcacctgcgggctcagaattggcaatcctgacgcaggctggtgcatggagtgcttatctggcccctgggcatgcacacgagtgcacagaggtcctcaggggtgcctgggagcctggagcaaccctggcctatagtggcccctgtctttgggctggccgtgtcttcctgaacctgtgccctggggcaggggccacctaaatggttttctttggagatgagacgtgaaggaacttttgctgcaggatggctgaggaggggggccacctcctgctcccccaagccaatggagaaagcaggaatggaaggtgcactgcagggaagccggggcctgggctctgtccggactcagctgcctcccacccctacccctgtgagatgctgggtggtgccctgcctgcttggggcctctgtccagcctgcagggcaagaaagcccctccagctgaaagagatgagatggagacactgcggactctggggtgggcagcatggaggtcagggcagcacctggttcaggtggcctcgggctcacggccagctctcagtcaactcacacagactgaagacgggaccctcaggctcggctctgcaggaggcgttaggggctcagcaggccctgaggctgggcttggtgtcactgaagcccaagagggcaggggaagtggctgcctttgtgtgcagagccagggcccggggagcaggtgtgcagtgtttccattgcacatcaaggaaactgaggcacaggggaagggggatcagctctgcccacctacaggcctagctgagaacctagggctgtgggccaaggtctaggctcgccctgtctcagggtgtggtctcctccggcctctgtcctggcaatgcctgtgaacccaaggagagatccagccagggctcacagccaaatccagccttagactgtggggacaggggcagcctctcagacccggaaggcaagaaccagtcccagaaagcggggctgaggagacacagctctgggcctacagggtggggaccctctgccctctgccctccaccctccggccaaggcagaagctgggtctggtcctcccagctgtgccggcccatgggcaggggctctggcgggctcacagctggctctgcgtccctggatgtgcttgttccttccagtcgccttcttcaaacgaggagaaaattaaactccctggggcctggctcccctgccaccatggtgcctcctcacctgctgcccgccgcctgccgcccgccacctgccacccgccgggccaaatgctctcaaagacagaattctgcttaaatgcccagaaaagagatttaggagatcagaatcttaagcaaattaacatgtgcagcgggcggcttttaatcaccgcctttaatcgcaggccgcggtgacggaaatcatctcctggctgagtggcgggcggggctggccctgaggatggattattccttagaacctgaacctgggtttcaccggcctctggaagggggctcaggggcctctgtccactccaaggaggcgtggctgggtcgggacctgcagcccgcacacccctctccctccttcccacccttgggcgtgtctgtggctttcgccttctgtctcctctccccacctcagtttctcccttctgagacttggggctgctggccctttcctgagtggactgtcccaggggacatgcagagcccaggtgtgggggatgctgggacgcctgttgctcctgggccactggttgcctctggcacacgtgcactgcagtgtcattgcctggacagcccccattgtggcctggcctcccctcagccctgccactcagctcagcaccgggacccactgagacctggggcccagagggagggggccgcccctcccttctcgcagctgtgcccagccaggcggacacaggccctgggaccctggctgtgccgaatgggtcgtgagagagactgttcattcacgagggcaggtcccaagagcccagggcaggggctggtccagccgagggtcctaggccacctgagtggtggtaaaggcaggaggcagctcctttgagggtgccaggcagctgcgcccaggggccttccttggcaggacccaggtggtgactgcagctgctggtggctcccctccccctccacacctggggccccgcatggcaggaggtggtcacaccttgaggtggcagcggctcagagagcccagaggcggccccacatcctcctgcccgggcctgcgtgcctgcctgccctgcccacatccggggctcagtgtccacacaagcctcccaggccgcactctgggatgggggctcaaggccccttggggcagaggtggtacctttcagaacaccccccatgggtggacgtctcttttgtctggaaaatgttacgtccctcagatgctgggagcagcgcgtgcagggggaggcagaatgctggctcggagagggagaggaccccagcgcgggcagctcagcactggacagacagggcagggaggcgaggggctgggagagcacaggaaggggtgtagcagcacgcagggctgcagccgtcaccgtcaccatcaccaggagctactgctggaactcggcctcccccaacgctggacgccccccagggcagccagtgaaatgtcacctcaatgacccttggcagtgctcagcccttcccagaggccctcctggggtgagtggctcttcttggctgcagcctgcggggcctggggtgtaatgaccagagggtccctgtggtggaggggcagccagccagggagcatttggctctggtcctgggggtgcagccacccctcagtaggaggagccctgccgggagggagggagggagggaggacaggatgaacggtgggtggtcgctcaagctgctatgggaagagccagcagccaacccgcctccccttctggcctctcagcggagccagctcagctcccgccagagaccccagcccaggtgtcctcccttcccactccagcagaggctgctgggcccgggctgggcagccaagggttaagtgggcggggctcccacgggaggggcggtcccagcggcggccccgtcccgccttcccctcgccttcctcaccttcctcacgggcgggcgcggcagggcagcgtgtggggctgcgatcggcatgggctctgcgcgcggggtgcccctgctcgggctggggctcaggggacgccgggggccagcacagggcccggtgtccctcgggccgtgccggtaactgggattggcacccgccggccatggaagagcctgggcccccaggtgggctcagccaagaccaaggtaagggggcaggtgggatcccagaagggggttgtgatggtccccgtagggagcccaggaccggacctgttcactggtgacccgcccaggaccggacctgttcactggtgacccactgaccccccgtgggcagtgcagagctcctcccagcagggtctccgggagcacggcccaatgaccccattacctgcacatccctcagactcggtcccagaggagggatgctgcccccaccccttggcgcccccaccctgcctcatctgcccctgtgctgacacgtgaaagcgagagggtctgctccctgcaaagggtccaacacagtccaggtgggcggtgggggaggcgccctcagccatgccagcacgggtcctgacctccagcttgatcccagcggatgcacactgctcgggtggggggcaggtctgggggtgccaggggctggtaggctctggcttttggctctgggggctctcctggcccaaccccaccccagcccctgatcgaggttggcaaaggtggccctgagctgcagtcagcaccatggacaggggcagctgctgctttctctggggggcctgcagttgctgtgcgtcctcagggttccctggagttacactctggtctggcccatcccgctccgctccgggttggagatttcttgctgtgatctgtcacgctttcctgacctgggagccggacattgccctgcgcagacagagcggagcagcaggggtggcggaagccccggggctgttcacagcaggagcttccgaggggcatcctgggcaggccccttcagcactggctggggcagggtctacagctccccaaacacagcgctagctctgggccagaggggcagggtctccagctccccaaacacagcgctagctctgggccaggggcggggagaggaaaacgtgaagggggacagtggccacggctgcagaagaagtggctcaggccagacaccaggaggaactcctgggtttccagggacagtaggagcttgcctcctggtggtttggaacctgcttgttctgccctgtgattggcatggacacgtggggtgggacatggcatcgctgctgggcagactggggacgggttgctggtttttgcctctgataaaccgtgtgacctcacacaagggactgagcctctctgagcctccatgggcaagagggatagcatggggcgctttcacagggtggctgtgggcattcagagcaagcctgtctgcagtggtcatgccgtgcctggcctgtgcagctgctccagggtgcctgtcccctcctctgtcccacccccagtggaggtgccctctctgaatggagaatagtgtggcagatgtaaccagggctgctgggcagacactgtttgtaggatgggctgtatattcaggtcactccaggtgcacccactcgctgaccgcagcccccatcccagggctctcctgggcacgttgtccctggttcctgcctgtctggcctgcagagagctccctggagtcactgccctgtgctggccactgggctcaggatgcctgcctgctgtggacaggggctggctgctgccgggtggccccaaagccccaggttccaggagacccagcacacttggggtctgcagctggccagggaagggcctagtcttaggagggggcagtggtgggagtggctctgagcccaccctccgtgcctgcgtcctctgggcagagggaggggagccagcagaacagtccttacagactccacgtgccgccgaggacggagcagatgggccagtgtcctgggtccagccctccatctgcacagctaatgagctgatgacgatggcgtcccagttcctggcaccttctcctggagaagccatgggctggccctgcccgggcagtgccctttgctggggcaggtgtgtgtggggtgcctggggccctctcagggacccaggcccagtggctccaccttcattgagggtgggcagggggaggggttggggaaggggatgagtaatccaacgtgcctgtttcttcccgggattttgctcccagcactgcatacgtgggctcccaccggctggacggacttcctgtgtgggaaaggcgagtgggcgcgggcctcccgtgtgggggcagggtggagttggtggacaccatccccaggacaggacgtttcctctggctcctgagaagtcactcaccgtggtggccgcaggcatggctccatgctagctgggtgaagaccccgagagggggccttgtggctgacggtcactggagacaacagtgagccactctggtgggactgtggaaccccctccagctctgccccagagagcagcacctgggtgagggctacaggaggctctttcagcaggcaggtcccaggcaccatgatgcagccctgacttggggacggtggccacactgtcctgggagtaggtcccttccaccgctcagacctggcgacccaggaacacacctctgagggacttgagtggtcttgatttcacattgatcaggcccctggctgctccgactttcaggcccctgttgtggaggtttcgggcggcccagttctcaggggcagccctgtgcccttcctgggtcagctggtgtgtgggtgggggccgacccagggagcacctcactggctcccaaaaggcaggagtgggagacagggcagccagcccagccccagggccagcttgagcagggaggtccagacagggacggaacgactatacaagatcccagaaacttcaggcagggaagctcagagggccagctccatctccaggacaccctctctgtctgagactctctggcagagcattcgtggggctgctccccggcctggcagtggcccggggtgctctggccgggaagagcagccccgtgccgggacggatgtggcgggctcagcctcctgtttcctcgcctcctccgtggctccatgcctgctctgcctggcagcggcccagctgccaccctccctcccgcgcctggctatgggctgggggcagggctggctctgaccacttggcccgaggaccctccccttggagctgcagccccctcccctcactcggcaggagctccctctctcccagctggcaggccaggctccatctggtgacttttcaggaaaggctcccccaccgtggctgccacgagcctggctccctctgcagctcctctggggtgtcctggacggtggctgggggcaaggccgtgcacctgccttcagagagccccaggccaggtgggtgcgatgcccctgctggccatgccctgctcagtgagggcagagaggcagccagggcctcagagaaaccagtgacttgtggcagggacaggagcctccagggacacacaatggggggggcactcgcgatggggggaggaagctgtgaaatgggctattaatagggtccccttcctgatggggctgtcaagtgcgattaataccgctgctgtgagctgggctgccaccagctggggatggctggggacggcgagggggcaggaaggggagcccactctgggagggacccttactgagatggggacctggccctggctgtcccgaagaggccagagaaaggccagatgttggggcccccttggccatagcgggccagctggagagtgtggaggcctgggctgggcaggcgcccacctgcacaagaagggctgcactgggggaaggtacgggtcacctggcctcagaggccatcctgtccacttgccactgccggctgcttggagggtccagtggcctcaagttcctgcacctttctgtgcaactgggactgctttggacacctgtgaccatcacaagtcctcctgtccatccctccacaccgggtggccggatgacagaagaaaggtgtctgctggccctccctctgggccctgtgggagctggatccttctagcagcagctgggccaccaggggagcatgagcctggctgctgtcctccccctgctctggggccggtggaaggtggagggcaggtcaggtggcgcggccgatggagtatggctggccatcgagaacctgtccccacgctctaggacactggccgttccagctcccccagggctctgtgcacacggaccaggagccacccaagggggcagaacaaagtcaggccccagggccccctccggcctgctcccctgccgagctgggtactgccatggggtcaggcccttccctccacaacgcccccacctcctgctgagagctggagtggctgccacacggagggcgctgccagaggagagggcagagcgtctgtccctgcggtgccctccaggtgtgcctagggtggccccagccccacaggccccgggcacttgcccttggttcccctgcccttgctgggacccctcaggcccagcctgactctgggatccctgggctcctagcacgaccactctggggtcctgcctgtggggagggctcgaggcaccgactcacactcctgataaaataaaaatagttggggaggaggctcccagacgtgcggggggacaagtggcttctctcagacgtttaaataatctccgccatatgtgtgtgggcccggccctccctcccgtgcggcgccagtccaggggcccggctgatctccagtgagcactgtggctggggcaaggtggccacttcctcctccctcccgtccacccaagcacagcctcagcccctcctgcatgctgggccggcccttgggggcagcacgggagggggatgctggggctgcgaggggcaggggggcgcggaagagccagggccaggaagggctgcaggagcatctggccctcatgcctcactgctgctgaggtcctttgctctcctagccctgggatgcggctgcctcagggactcttggtggccctggagggtgggtaggctggcctgggggccattgggacagcaggtgacggtcaggccaatgccagccgggcccaggcacagccctgtgggggcttcagagggagacacgggtgggcccagggaggtcctttgaaatgtcctgctgaaaggcagcaagcgtcgggagaggagggggcttagaggcagccagggccacctctggacaggcctggaagaggtggggcccctgcccgtcccgtacacgctcgtgaagggaagaggttggtggaggggcatgtgcagtccccatgcccctgtcgtgggaggggctgcggtacccaaagctgccccgggtgtgtgtgtacatgccgggaggcctgtgggtgtgatttgtgggttttgttggaagattcaattattttccagccttccccaggggagaggcggagatgctgagccaccgctggccccttgttgatgacagccgcgaggcccatgctgcctgctgtgttaggacaagatcgatctccgccataaaaacaaaattaagccaacaccgccctggcttctgacagcgcgcgctcttcctctaatcagctgccacccgcccggttccagccttgggaagaaaggaaggggctgcaggagcaaacctctcacagtggggaaactgaggcactgagacagggaggacaacccaaggtcggggggcaggcccaggacccctgcttcccagcagccaccagggccaggcagtcagggtgggccggtgcagcccaggtgcgggggctgagcccaggggatcacgggcgcattcctctgcgtgtcaccgtggggcccgcagagccctcccatgcactctccccaactggggtgcagccccgtctgcccgtctgtccacccatccgcccatctgggtgcatctgtgtgggaggcttctccaggcccagggctgaagccggccagacccttgagagctggaccctggacaccagtgtggacactggctcccgtcacctcctcagagcaggcctggtggccttagctgcctctgtcctgcccgtccctccctgtccacctgtgtccagccagcgcctgctacgtgttggatcatggcctcacagggacagagcagggaggaggacttcgaggtccctgccccagggatgtcccggggtcaggcagtgctctgaggactggggagccccactgtgctgtgcagggacctgggggagcagcaggtgagccagggccctcctctccccgacggagcctatatctgcccgaccaggactgccggcccttcccagtctggcctctggtgtgggcccacagccaggtgcattgctacaatcccacctgagctcccacatcaggtgtcctggctcaggctcacgggaggggccgaggcggcctgggggtgggtgtggaccatggctgagggctgggcccctgtgtggaaccacagagcagagcgtggcttcttcggcctccctgtgggctttcaggatggccgggccctggctcagggcaggcagggtgagcatgagggcccgtcagtgcaggctgtggggctgggctcgcctgccggcatgggggtggggcagccccctccgtgaccttgtgtgggggctgggctgggccctgggccggctcacaggcagcacgtggggaggggttcttaagtctctgggcctgggcccctgccacgtctcttggcccggggcacccccggcttcacgctgcagctgcggttctgtgtctgcctgagttttggaggggagtgggcggtccctttggacctcagggcaggcagggcagcccccggcagaggcctgtgtcaggaaggattagccaggcctccacccgcctggacagttgaggattccagctctgctgctgaggaggtcagggggcctggggtgcaggagcctgggacccacgttgtggggctggggccaggcactctatgtgtggctcctctcagaacccctgcccaggcagatggcggcctccaagccctaaccccagctgatgggggatcagctagtggctgagagctcaagggagggagggagggagcagaggcccagccttggggagcttcaaggagggatgggtgagagacgggagcacccccagctggggccaggcccagggtgagggaacagcaggtgtgtcccaggccaggaggcctctgaggtgcaggaaggagaactggaccccctgggtcagagtggaagcccgcagcagcccagtatgaggtgggcaggggccctgggccagggctatggccgtctggtctgtctccaggccctcaggccacctcctggcccctgcgctgccccttacacggtggccttccccgaggccctgtcttcctgaggacgcccgggactccagcccctctcctctccctgcagctcatggctccctaatctaattccacggcagagcccagaaacgcctgctgacctgcttccgccgagagcagcagagcctgtgacggggcccctggtgggggcctgggttggctctgtgctgactgcatctgatctggctgggtgtggccctggttgtcagtggtcagctggagacgcatggccatctcctcagggactgccacctcccacgcctgaccttggccccggggctctgccaggatgcccagccctggcacctccctgtcctgggctctgcaggccaaactcctcccctggtatggggggaggcgagcagctgcccggaaccttccagtccttgttgctggagccagtagagcctgggcagtgggtgggaagaagggcggggttctccccagtgtggtcacgaagcatgggcatggccaggacacaggtggctggtgttcagccggggtctgcccacctcccattcccacagctgcccctggtgtcccggcctggacttggggatgggagagcctgtgctgtcctgtagtgcggggccagtacacagggtgggctgtgtggtcctggtggcagtgggacctggagtcctttcctcagtgggagctgagacggtggggtgggtcctccttgggcgaggcccctgtccaggtcagatggctgtcatccctgcagggcagaatgtggggacaaacgtgccctgggcatggggccacctcctccgccacagctcggtgaccgtggagaaaggtcaggctggggctgcagctgcatgagggagacatggagagcccaacccaggctcagggacccacatcctgggcctgggctgggagttgtcgctgtaagggatccggctcggctcccctctccagccacaggggctgggcgctgcggggatgaggtgagcttctgcccctgctctgggccacctgcctctggactttggggatccactcagaggtcctcataagtagggatgcggggtgagggcagggaccactccaggcccagcctcggcatctgtggtgggcgcacagcggggaggcccaccccacacagggtcctcggaggacagtaccctgcaggccttccggttgcgttctctgggtcccaggagggccctcccgttggtcctgctcttgtcccgcagccctgacctgggtctggtggcctggggccttgggaaactctgttgcctccccagtgccctcccatccccagctgggagttccctcggcctaaatcctccaccagctgggctggagctgggattagcacagggattgggcctggggctgggcggggctgaggtcctttgctcccccagccttgggaggcggctgcgtcagggattccttggtggccctggagggtggataggctggcctgggggccatcaggacagcaggtgacggtcaggccaatgccagccgggcctgggcacagccctgtgggggcttcggagggccctgaggaggaggaggaagaggcagaggagagaaggccccacggaggtcctgtcgccagcgctgccactgcctgacctccgctgcccgaaggccggtgggcctctgtggcctccgtgaagcaggcccggctgtcgtcaggccatgtctggtccatggccctcccccgacagccggaccaagggaacggtggcctggctggcggaggtactcctctgggttggagggagtgtggtgctgtcttcagagtggcagctcggccccctgggtaagaaggggcaggcgagtggcctgggctgagtgctggccctggccaggtgactggtgggtgggggctgttcctggaggtgggggaagcctgggcctccatcccatcctgcactcgcctcccctgtcccccgggtgctctagggatcatgtgggtccagcagcgtcggctggccctgcccctcagccgctcagaggcgtgctcagcacacctcggtctcccaggcacctgcagggcctgggggctgaacccaagggggcgaggggggatctcaggtggctccaatgctctcattgaaggggtgccttgtgctctgggggtcagtggtgcttgcagcccaggcggctgggctggcatcctggtgccggacatgagggcctttgccgttaggagactctgcagaggagactggctgggtatggctgggagggtggagtgtgtgtcttgtggtggcctgtggagggccccggtccgggctggcctgccagctctctgttccagcggcagacggggtcctgtccaggctgccctgttgcaggcctctgcccgccccctgcccctgtgtcctgcctcacccctctcctaaatccctgcagccatacctgcgtcttcacctcccatgtgccccggagagcccagccccccatgccatggcttccatcccttcaattcccctctgctcgtgatcacgtagtagcttccccaagaaggcccggccagtactgcccttggtcctctacaacgcccccgccagggtccctcagcgtgcagacctggggtggggattaacgtctctgtgctttagcagatggtacctctgggacccgggctttctgtgagcaggtgtgcaggaaccgagggggtgagaccagtctgttcctgggctgggacagctgactctggcctggactccctggaccctgcagccccctctcctgggacaagctacagcaggaggctgaatggagagaggaggggagagaaggagcgaggcaggcagcctgggggaggggaggggaggggttgtgaagctcggatccggcaccacagcctcccaagtccatactgcagtgcagggcgtgcgacgcagacattcatggcaccattcgtggcgcttgttgcacgtgaggggtgggggctttcctggagatgccccaggcaggggcacaggcactcaggaattcgaccgctcccaggagccacctgtggccaggggcgggggcaggggcatagggttgctgcctgctaggcccaccccgcccctgacaaggggcctccactgcactatggccccagacagccagcccagccacctcatctgtcttgcctcgtgcccggccttcccattgttgagttctgtgctggctccgtctgagtggtagctctcggggccccaggcccagcgccggttaccagggctgctaggactggtccaggaggtggtgggagtggcaggtggccgagcagggtggggagcagggccctcagttcccaggaccatctggggaggagtggcagggcccagctgagctgtgtgacccaggcaagccggcacctggggtggaggtggccctgggctctggcctttgccctgtcactggcagggcggtgtgggcggggccgggcgaggtgaggagtggccgtgcctccgctgacggccgtgtttctcccgtgaggagtggccgtgcctccgctgacggccgtgtctctcctgcgaggagtggctgtgcctccgctgacagccgtgtctctcccgtgtccagtggagcggtgcatgggtgccatgcaagaggggatgcagatggtgaagctgcgtggcggctccaagggcctggtccgcttctactacctggacgagcaccgctcctgcatccgctggaggccctcacgcaagaacgagaaggccaagagtgagtgggagccctggggtggggacaaatcagagtccctggggggacacgacggtagggaccctcccagggcagccactgatggctgaggagcagcgagaccctaggcctggacacctctgggctcagtggccttggggatctgcagtgacctcgggctgtggggtaggagggatccaggccccctgcccgcctggcagagctccctgggactcagtgaggaccgagtagcactgtgcccagccctgtgctgagtgctgggctggaaggaggggcacagcatagtccatctagctggggaggtcacagctccccataaacagaaacgacccccacagaggtatgctgatggatgggtatgggtgcaaacagtggctcaggcagccactgggcatggctgctggagggagcaggggccacccgagatggaggctctgtgcagggggtgggtggggagagttgaggcacacagggaacgggtagggtcccacggtttggggagagacatggcagtcctcaagggctgggatcagggcgcagccagggtttctgatggctttgctgatggtcaggacccaggcatgccaggcaaggcctcagcccagcagttgccaagcgtgtagccactttgggcccgtggagagagtcgcgctgcggagcccccagggggacctgaggtcacaagagcctcgatgcacctgagcgcggagctgggggtccctggagccgctgtccccacctgcggcgctggagccctggaggtgtccaggggcttccttggaacgtggagacgtgctggttaaacgtggagccccgggccagccgggcactgggggctgcaggtggagggaggtggatgctctccctcgtgggggcgtgtcttttccacaggaaagggaaagggggagggacacgggtcagcagtggggggctgtgcagtctcgcagatcttcacccttggttcttgaactctggaccctgagccctgccgagggtcccgcaaaggtgggcaaggagctcccggctgcttggtctccgcagtgttggggctgccagcagggggacgctgggcccccggggacctgacccgtgctccctccccaccccgcagtctccatcgactccatccaggaggtgagtgaggggcggcagtcggaggtcttccagcgctaccctgacggcagcttcgaccccaactgctgcttcagcatctaccacggcagccaccgcgagtcgctggacctggtctccaccagcagcgaggtggcgcgcacctgggtcactggcctgcgctacctcatggccggcatcagcgacgaggacagcctggctcgccgccagcgcaccagggaccaatatccttgggcacctatcgggcaatgcagacccagggaccggccccttggctgctcaccctgggggggcctgtcctttgccgggtcacacactggggaagtggccggtaggctggggtcccctattccttcctccctaggccagagggtggaggtgtcagggctgggcccatggatcgctgttggcccctaactcggcaccaaagtggctgaagcagacgtttgacgaggccgacaagaacggggatggcagcctgagcattggcgaggtcctgcagctgctgcacaagctcaacgtgaacctgccccggcagagggtgaagcagatgttcagggtgagctggggggagccctacctgggctccagagccagggctgcacgggggctgtgcttgtgtggctgggagcctgccagccctgactgagctggaggggaccctggcagtgccctcaagctgcacagagtagctggctgctgaggatggggctgtctgaccagccaccccacagcctatggcaggcaggcaggtgggtgcccaggtgctgcctctttgcagctgggccgggggctgctctgccagctctggggaaagtggtcggggcacctggcacaggccctgccaggtgagtggactgggcattcagggcaggtgcccaaatgaagctgcacccccttcccaggccccagccccgcagcctcgaggggggtacaccagccctggcagggcccagtctgatgcgcagcagctcgttactttccccatgccgccctcgcccaaccaccctgatgttaggagttatgaaaatgcagccttcagctgagctgcggcctttattgtctgtaattggtttctgtttccggaaagcctgctgggctgggggagagaaactctgcccgtcagcaggtcctggttccgggtggtgctggctgagccagcaaaccaggccctggggccttgctgctttgctgcagcttggaaagcgggttctgtgggtgcaagtgccaggccctggggtctctgacacgcacatacacgcacacacacgcacacgcatgcacgtgcataaatacacgcacacacgtgcacatacacatatgcacacaggcacacacatgcacacacacacgcatacacatgctcacagcctgacagctccgccgtgtccagcccctgccagctcctgccagctcctgccagctgctgcctgttctcactgtaggtggctggtcatgcctggctggagcaagggaagctggcctgctcacaggacagggtgtgtgcgtgagttaggggctgggtgcttgcagacactctggggactgcccggggcttgtgaaggccccagtggggacacagtctgcctgggctgtgggggctggcaggtggctgagtctgcatgtctgcgccccttctccctgcctgcctggggccatccccagccacattttgggctcaggggcagctctggggccagcaggtccctccacagagttgaggctgtgccagggcccgggcagcagggtggcttagggtgcaggctccagagtggcctctgagtgggaggagacagatgcccctcactgaatccagcacgagtgtgcgtggtttctggggcctgaaggtccaaccagacctccctaagggaaccccaggcaggcggaagcagggacagtctgcagggctggctctggagaggaatggcgaggtagctgttgctgtcaggttaccggcctggcactccagccctatgtagtggaggcccagtggccctggtctttggtggtcaagacagctggagacggccccagtttcagagcgctgggcctccccgcccatctgtactgcatcctctctgggccctgcagagccgagagaaggagcctgcagccaggctggaggggctctgagaagtggcatcagcttcgctgtagagaaatctggagatggctcccattgcctggcacggcctaatcagagagaactgcatggtggataaacacttggcttgaggctaatttcatcaaacctaagataaggctggaagtgggctggacccagtggggcctaattgccagagtgcgctgggcgggcaccgaggcaggctcagccaaagtgcacgttcaacagcagtggcttccctttgtggaaagaaaagatgccacgtgactgtgtcaggggtgttctagggtggggctcaggccccgagggcctcactgtccgagcatttttgttcctgctcagtggtgagtggctcaccctggcacatagccactctgtggagggggccgcatctctgcccagctcagccacaggccctgggagggcctctggcctgggctttgtcccatggcccctgggagggccatcagcccaggctctgtcccatgggggccctttgagctgcagtgtgtcccctcatggctgtcctgggtgcagtgagtgggcacccccagacttggggctaccctcacacctcgcaccaggcaccccagggcttcatctggtgtgtgctgggcccagtgcatgtggctttagctgggcccttcatgccacgctggcctcatcccagccttggtgtgggcacacagcctgtccctggggtcctgacccaccttcatgccaagccgtgggtgtagggcgtgtggcagccagggctctgccctggggacagggacaaaggggctgatggggccacctgactggtgactcccctggctcagaggggatcccaggggagctggcaccaccacccctggccaccccagatcgtggccacgggaggaggcaaggctggtccccagtggcaggctggtggctgctgctgtccatggtgccgagccggccctggttcctgctcagctgaggcacatctgcaggccgaggcggggccctgggtactctcctgtggaccaggacattaagctgtcctgagaggcatggccagcgtgcaggtggccctttgtagcctgcttcctcgaccccactctgggctcctcgcaggcccccttggagcccctgggtgggctgctgagagcacgccgtcctcagcctgtgtgggctctgggaagaggacccagcggggcttgtctggaagcccaaatcacgaagcctctagactactgctgtggtggatgcagcacctcctcgacttttggaggtatttcctgcttctcagggcacccagtctggggcttccgtggaggcctgaggactcagccagtgtaggcggacacctgctggctgggtgtcggtgtggccaggcctggggtgagcaggcgcagggcggaaccctgccttcaaggcatatctgatcagcccgtcccatctctggccacatcctcagtggggggccagggccgaagtgacagcaggcggctcactgggagcgtaggacccctcaagatgctgagcagctgggcaggtgtgaaacgagctgtcagggctgcccctgcctgaaatgttgaactctggaactctttgaagagcagggctaggcactgcgtccctttgggcctggtgttcctcgtgagtaggggctgagctggggtgtcacactggggccatgtcacctccaagcaggtcatgctctcaccctgccctgcccagccctgggctcccatacccttgtgaggcaaagtcctcaatccttagggctcaaggatttcaagcatccccttccatggggactttattgctgccatgggattcccatggcccctgtagcaccttgggtttctgctgggatgcccagcctccagcccagagtgtgttgttgacccccgtttgggggggcgctgacccccgtgtgggggtggcgctgacccccgtgtgggggtggcgctgacccccgtgtggggtggcgctgacccccgtgtggggtggcgctgactcccgtgtgggggggcgctgactcccgtgtgggggggcgctgactcccgtgtgggtggcgctgactcccgtgtgggggggcgctgactcccgtgtgggggggcgctgactcccgtgtgggggggcgctgactcccgtgtgggtggcgctgactcccgtgtgggtggcgttggctcccgtgtggggggtgttgactgctgtgtgggggaggtgttgactcctgcgtgggtgttgttgactcccgtatgggtgatgttggcttccgtgtgggtagtgttaactgctgtgtggggtgagtatatggaggtggctgtgggttgaaggtgaaaagcatatggcttcaggcaggtgcgtcagttctgcattttcatggggctgtcctcctggtgggtgggcccgtgccctggggagtgattggaggccgtgacaagggcagtggagtagaggagggtgggcttgcatgttggtcttgactggggagtggggtggtcctgaaggacccctgtgcatgcaggccctggtcgaggtgccaatggggacccaaggccttgcattgcaggaagcggacacggatgaccaccaagggacgctgggttttgaagagttctgtgccttctacaagatgatgtccacccgccgggacctctacctgctcatgctgacctacagcaaccacaaggaccacctggatgccgccagcctgcagcgcttcctgcaggtggagcagaaggtgtgctgcccggggcaggtgttggggggccagccatcaggcctcgccttctgttctgagctttgagcttcagtcaggggacagtggtgatgggggagctgtctgaagctatcccaggccagggatgggctacctgggctcatgcccctgctctgagatggagagattagggtggggcaggtcacagcctggcatttgagagccccccaagttggctttagttttgatattacagggtgcgctctatggggcagccaagcaggtagggaaagtttgtggtttctcctccaggggcccctaaatggcttggtcctgactgtgaacaccctgcgcctcccacagcttgaccatgcctcctgccttggtgttgagcatcttgtggactagggttctgtggcccagcctttgagacctgcccctgtgttccagccacatgggtctggctgactcgctcccctagggtgccaggcccgccacaatatccactcacctgtttgtccagcagacactcagatgcctcctggaatccagaggggcatgctcagccctttatctagaccccaagaaatcctggccatccttagagaccaatgccaaggccaagtgctctctggacgctgccccactgaccaaggacctcatttccagaggttcagggctctggccatcttgtatcaggcctgggcagggactgggtaccgcatgccctggtggcaggagttgcaggtccagccaggcagcggaggggaaggccggagccccagtggggacagggatccatgggaggggctcagactgtgtgtggccaccctccagcctcgtaggagtgcaggtgaggaccctggaccctcctcagggaggagagcagggacagggcaagccttaggggaccaagatgcctcggcctgggggtgctgcttagggacctccactctacttgcctcagcctgggggtgctgcttagggacctccactctactggcctcagcctgggggtgctgcttagggacctccactctactggcctcagcctgggggtgctgcttagggacctccactctactggcctcggcctgggggtgctgcttagggacctccactctactggccacctgcgctgcgtcagcctctcggtgatggtctgagggcgaggatgggagtggcaggaggagccttgggaatcccaggtagggtctgggtgggttttacccaggatctcccagcagtaccccacccccaagcttaccacaaacccagagctggcctttggggctgtccctgggcctgagctcccgggatgcccccacctggccggggcagcttgccaggctccatcccgtggcagccgcttctccagtcctgcaggcatgacacccgggacgcatggcccaggcaggggaagctagcaccagttggctagaccccactgtctcggatgccctgtgccctggccaccaggggcggcaccagcatgtgtctgtgggtgacctggctgcagatagtaggtcctctgtcccagtaaaggcagaggtgggaatggggcctggataggggattggcaggcagaagtgacccttccctccctgacctttgccccaagccttgtggaaccctctgtgcactcaggagccagagtcctccagccggcaactggtgccctttgcctggcctcctggttgctgggcctccccaggggcccacaactggctctgggctcccccacctgttacctcaccatgttcccagggacctccaagaagccgtgtcagtgggctgggcagctcctggcccagctgcaccatagcgccctggaggtcccttggcctgtgatgcctggggtggcctgggctgggccggactgtggtgctcagatctcttgggagggttagtgtgtgacggcttgggcagacagtgggaggggctggatgagggggctgcctgtgcctgcctggctctgccaagggggcatgaagattcttgctctcctgtacccacccacacatggcctctgctccgtgccaggcccactctgggccacaggtctcgcactggtgtggggtggtccagctgatgaggtcagaggcccctcccgtgccgtcagagttcatagtcagagcaagccatccaaaagccacgtgatccacggtagtcccaagtcatgtgacactggagctggctggccatggtcatccctggtgtaatcagagacaggcaggggacagtggtgatgggggagctgcctgaggctatcccaggccagggatgggctgcctggactcatgcccctgctctggcctagatggcgggtgtgaccctcgagagctgccaggacatcatcgagcagtttgagccatgcccagaaaacaagagtaaggggctgctgggcattgatggtgagtggggcgctgccctcagcccagctgtcctgggatgctggaggggcaacgagggcccaacctgtgggccgggacaggtgttctgtgttctgtgtggcatgggggcaggtggtcatgagacgaggctggtggtgggctgacatggcccctatgccacgccgtcctgcaggcttcaccaactataccaggagccctgctggtgacatcttcaaccctgagcaccaccatgtgcaccaggacatgacgcagccgctgagccactacttcatcacctcgtcccacaacacctacctcgtgggtgaccagctcatgtcccagtcacgggtggacatgtatgcttgggtcctgcaggctggctgccgctgcgtggagggtaagccctggaccttgggtgacggccgtgggctggcatctgctgtgggagatgggctgcacctgaggagcccccggggggatctctgggcaggggctgggaaggcctcttctgtgtccctcactgagcaatgggacaggccctcttttggtcgaagctcagcctgcctgggctcactgtggctaggcccctggggctgaccaaggcctgcccgcctgcagtggactgctgggatgggcccgacggggagcccattgtgcaccatggctacactctgacttccaagatcctcttcaaagacgtcattgaaaccatcaacaaatatgccttcatcaagaatgagtgagtggctgggcctagcggggctggccccagaggtgggcagggtagggtctccaggctctagctcttcctgccacacccacatgtcctttctttgggagcagtgactgtggtgaccagggggctggtttcattctggcatctctggttgaggagagaggggcagggagagagtatggccgcaggtctaggcaggggcttcacaggagcagctcgtccacacgcctggtggcacctcccggtgtcagtgcccacagcagctgtggctcccacactcatcacccctgagaagccactctgtgtccagactcaattggctgtcactcagctgtggctgtagacactattgaagaaaatacagaaattagtttctggaattagaagaccgcctccccgtgtggtttgaattaccttcaagtcttggctacatgaggctcgcaggtgggcaaggagctaattgcatgaaggaagagagaagaagcaagattgatttaggaaacagaagtagatgggcctctcctggaagagctggtccttgctgtcacagtctcgagctggccccatccctgggactgtaggtgggaagggcattgcaaggcacaggggcggggatggggggaggagagatgagctgggaggagccaggggcctgctgggatctcaggacagagttgcacctatgaccagtgtaatctgtgcaggcacaatgttctcctgcaggccctgggcttcaggcctcagtttcttgcctgagaagtgggggaatgagcccctgcgccctgcctgcccactccacatcacaggacttgctcatctcttgccctggttcatgccctcttgctctgggtcacttacattttctgaaagaatcatggctgccttttggtaaaaatccaagtaaaacatacacatggttaaaaatgaagctgaaaagcttatatttaaaagtccctgctatactccccattctgcactgtgcaggtaataaccatgttccaccagatggtgtgtgccaggcttatgtctccttctttatgggaccaatgtcaggaccccagggccattcagaggacagggtccccagtatctaggtcaaaaggattctatttcccagcctatctatagctccacactgtaccttggttttgtccacatcattttaaaaccatgactttttcaaacgttccttttgttttcctggagtttctcattgcctttgttttttttcttattggggaaagcagctcatgctctctttaccagtccctaagattctcccagctcctttcccatccactctgttgcttttcaaagccattgacgggtgggccacctcccagagctgctggtaatcccagctatcctgggttcctggtgaagacccctcctcattcaatggtttagatgacctgggatcttgcagaggtggggcctacccatcctctgaggccctggcctcatcctgctctttctgccttggggccacaggtacccagtgatcctgtccatcgaaaaccactgcagtgtcatccagcagaagaaaatggcccagtatctgactgacatccttggggacaagctggacctgtcatcagtgagcagtgaagatgccaccacactcccctctccacagatgctcaagggcaagatcctcgtgaaggtgagtgagcccctgccctcctgggaccagctcacacagagtctcgggcctgcagcagtgccctgctccagacaggcaggggcatcatgccatccatgggcatatctagggggctgagggctggccacgctcctgacctggcctccatctccccatggtggtcactctggctcaggcccctcatgcacatccaggcctttcccttcacgctgctgcagccacagggagctggccagtctggcccctgccccatggctgagatgccaaaactgagcttgagaaaaggcccctctccttggccggcggctctttgtgggtgccaggtactggcttcccagcattttctccagggcccctcccatcatgcacctcctcccccaggggaagaagctcccagccaacatcagcgaggatgcggaggaaggcgaggtgtctgatgaggacagtgctgatgagattgacgatgactgcaagctcctcaatggggatgtgagtcgggctggaggtggaggggggcgcgtggagcctgcagttcccaagaacagctgtccgtccttgctgttggggcgagttagaaagggaggcatccgggagagagggacattggggcagattcgcacagcggcctggggcctggggggtcctccctgcccacccacccctctgcatgagagctgcaggcctgcctcttcccagtttcagctcccacatttgagctgactcttggggtaccatccactccccctgccctgtcctcttggcccctcagtaagtgggggcagcactgggggctgggtcccacgccagactccaccccattcccaccagcacctggcccacccaggccctggcacaggatttcccagcttcccgcccttttcctcaccaagtctggctggacgctgggtggctggtagtactgcccagccacccccgtggccagtgctggcctcatctccaagcagtgccatctctaaggtcaactctgatatgggggtcccaccagcagtcacctccacagagcgctgtcactgtgtccccgccagggccagggtggggggctgcagagatgggagggtcctgtgaggtgttgggctcgggggcgccgatctcctctcctctggacactgctctggggccgctgctgtgaggcagggaaggccgttgcttccagaggggccatgcatggggagataattgtgcagcgtgctcctggccacgcggccaaccattttagaaactcctgaggcagcagcactcttcctgcctgggatgtgcggcacacgcctctgtgtggcccacgtgatggcaaaggcagctccacggtgctcctggctttgtgcccactccaacctggcaccaggggcgtctgacacccaagtcccagaccctgtcctcaaggattccaagttcatcaggggcacccggggggctgcactggcagggaagggcgtccaacccagctcagaggctgccctgaagtctgcccctggccctgccatctcctgaggcacatggtggccagtggtgggactccagaccctgtgccgcctgctggcgcactgacctcccaggccacagggccagaagccgcacaggctctgctgggggccgctgggcagactcgtgctgctggaggagtcgggtgggcctgggttcccgtcctgcctgtggctgcctgcaggccctgaggtgaatcacacgccttccctgagcctggggtgggcagagtgctgtgaccctgggggttgtcattgccactactcgcagggctcgggacagatgccaacaggccgacctctggctcctgcaggcatccaccaatcgaaagcgtgtagaaaacactgctaagaggaaactggattccctcatcaaagagtcgaagattcgggactgtgaggaccccaacaacttctccgtctccacactgtccccatctggaaagctcggacgcaaggtagaggccaaaaaggtgacacccctgatgccgacaggcccccccgacagccagcctgtgggccagccagggcccccgaacgtatgctctgtgcgcactcacacctgtgcacacacaaatctgcacacaagcatacctctgtacacacctccgcacacacctgcatgatccatacccacctaccagcggggtctcaaagcccagccagtcgttgagagctgcccagctggggggacatgattgccttccctgcccagcgcccctgcctagagctgcctgtggccacgtggggaagtttccacatggagcgaatggccctcaggggctgtcatggcagacacaatggagtgtgtgtggggtgagaggtgacaggcagggtgggccgggtcctgcggtcacagagcctccttgtagaccttgaaggaaccaggagctgtggccggtggatcccgcagtcctgctgtgggtgggacagagtggggagcgtgggtgggccctacagaccctccacagggtgacagtgctggtgggcgcctgtgctggggacacggtctcctggtgcacagagcctccttgcagacctcgaaggagccaggagctgtggccggcagatcccgcagtcctgctgcgggtggggcagagtggggagcgtgggtgggccctacagaccctccacagggtgacagtgctggtgggcgcccatgctggggacacggtctcctggtgcctggagagccctaccgtgccctgtggcaccggctcgttctgcctgtccctgcagggaccttgctgttttcctaacccttggggagggtgggaaggtgacttctccctggccaagtgagggtgctgtgtccccttccaggaccagtatttttagactcaggtgtttgcgtttccgcccacgggcctcggagcactcggcacagctgacaccgcaggagagctcgaggaacatgccctgtgcaggtggctcttgcagggcccgagctgagaggcgttcctttatttttatcccaaggtgtctaggtgggggagagtggccatctgtggctctgctgggcagccagctgggcctgtgcaaaacctggagatgcatctgcgggtccaggagagtggtcccctgcagacctcaggtctgagcggctgctgggggttctgtgctcagggaaggcttcctgcaggaggaggaggggctcaggcacagccacgaaggttgggggaggagcgggaatcccccctgatgagatgcactccttgcctggtgtggacacacaccccagaagggtctcagagtctttggtacaggcgaggggcggagctgatcccaaggccaggccgggacgcgttcagccctggagctcacggagggcgtggcccaggtaaagggggtgtctgtgcactgggggtcgtggggatggcaaatcccactgagggacacttgtgcctctctgtccccctggggtagccggtgtcccctctgcccatgaaccttgaggacgtgagacctctactcacgagtccctgaggcccgggggcagcaggaatgggtatcttggggagagaagccggtgggtaaggaggggccccacccccagaaagctgagcacaacccggtgagtgcttgtgcagccaacagcctcgccccgtgaggacccttccctgagcaccccctcggggcccagaacccagcctccctgacagaggcagggctggggggcctgctgctggctgagaccctccaccaccatccaggccccctcacctgggccttctgctgcctgcagccccttggagcatagttgggtcttgctgtctcctctgtttgggagtcccaggggtgacaacgggtctggccgtgcagtacgggctgtgtctggccgtccgtctcctgggtcagcgcgtgcctctcctcggtcatgcctggatttacagtcgctcgtggctctgggtcactgcagcattttggggatgtttaaggagctgtgaaatgtggtggccccgaccggctccaggcgcactgtcagtctggctcctagcgcctctcccggcagccgtggcaccaataaattcagaggaaaccggggctggcttttctggaggtggagagagacgagcatgtctgagagccatgtggacctggacaacctgggagcctcctgctgcagtgcacgtggggcctcgggctccagccagtgcagcctggtgacgggaaggccccttggccactctgggccgtggggagggccgtccaatcccatcctggctccctatgagggtgaaggaggggcagggcacacctctgggccgtggtacccagagcacagggaggctggcgggagctccccggccgcatcaacaggactgagaggcccgtctggcatggggcctgcggacgcgacgtgccctgatttccaacgcgtccagcgaggcagtgtccaggcaggcccaggtccaggctggggagagcgggcagcagtcggagctgtttgctgtggcgtggctgagcgccgagtgtctgtggtcatgagagctacagtggcctctttgcagcagtgtgggagcatccaggggtgtgggagggtgtgtgtgcaggggcgtgctgtgggtgttgcaggggtgtgtgcagaggggtgggcgtgtacaggggcatggccacgggtgggtgatgtgtccgcttctggcggaagccccctcctaacagggaccgctgctgcaggcccacggctttgctgtgtttcaaagaaagtagcccccacccttggtgggggacaggatgtggtatgggagcccctcctgagcacagctgggccatgttttggaggtgtctgtgggaggggctgcaggggtcaggtggtggcacaggctctgctggttccattgggaatgagctttggggtgaatgagcagctcgtgaggcagccctgggttcggcggggggcaggcagggtagccctggatgtgtctgctacttatacagcggtaggaaggctcacagtggtttcctggggttccccagctcagaacccgcctcagggagtgcccacctggagccgtgtgtctgattagggatacccgcgcactgcgggaacaggtcagggccgtggaatgctcgtaaaagggttgcgcaagcaggcctggccgagcagtattccaggcacacaaacgcagttattacgtagtcaccactggtgggaaaaaaggattcagaacttaatgagtttaaaacaacacatgagagacgctgaggcaggtgtgagcgaatgtttccaccggggcctgactttcaggccgcttctcctcggcagctgcctctgccccagggtggactgggaacggctgccacgggggctccccaacctgtccccgccctgccctcccctcccgtctgccttactccagacctggctcaagcccacctcttccaggaaggccttctgggaccaccaggggctgtcccggcctccctgcctggttcaaggctagactcaccttgtccctgtctctcccctggactcagagcaaggctgaagaggacgtggagtctggggaggatgccggggccagcagacgcaatggccgcctcgtcgtgggaagcttctccaggcgcaaggtccggcgcagctcccaggccagggtcccggtctgggcccagtgtcctccctgctcccagtgccccgtgtcctccctgctcccagtgccccgtgtcctccctgctcccagtgccccagtgggccctgccccagccagagcagatgggggtctcctccagtccccagggttcccagcctggctcacaggatcccctctgagtcaggccgagctatcggttgcaggtgccagggactgggccagaagcctgggctcggagctggtgggaacaggtgcctggctggctcacatcccttctctggcccacgctggccctcgccccaagctcaggtgccttgtggctgccctgagagtctgccagagcccagatcgagagggcaccgaggaggctttggcaggcccagccaggcgggatggacatgggaggctgcgtgggccgctggggaccccggaggataggccctccccaaccccccagccttcgccaaggcctggcctgggccagaggccctacagctcacacctctgccccccgcacagaagaagggcagcaagctgaagaaggcggccagcgtggaggagggagatgagggtcaggactccccgggaggccagagccgagggtaggtgccctgccccacggggaggccccgcacactcctgggagcctggcccaaccgggcccttctctgcggtgaccccaccaggaccatccctgagcagggcaggacctacccccttcttggcccctggaagcagtgaagtggtagggagtgtggtgtgcagggcaggctggtggctgtgggcagtgggggcaggggcggctgagcaggtggctggagggcccaggtccccacagccctggatgctgccgggctgtcggctctcggtcctcaccgcctcctcttatgaggcccccagcctcatgccctccccagggggcaacaaatgcctgccatgaagtggctccccctcttcccgtccagtcaggctgaattcaaggcccaggcccccgtgtcggaggccttcctcagcactgtctggggtctctttgaggtctcaaacctacaggcccagaaggaactcccacccctcccggaccctgggctccccccgtgccgcccactccctcctattgccgtctcccctcacttccatcccccaatggttcctccgtgcccctcgcctgggcacagccccctcctgtctcatcccgtcccacgtgccagccgggctctgcccttagcacacatctgatccacgtgtgccgctgccacccggccgacacggaggcccccttggaccctggcctcctctccacatagtgattctaggccagacccaggccccgagcccagctctcccctgctcagaaccttccagaagcccccacacctgccacgcttggcaggccacgtcatcctccactgcacacagtgcctagggactttgcacctgctggtagctcccagccagcccacatcctgcccagcactcaggtttccgcagcccgcggcccagtctggcgtccgtctctgatggttcggggcctgctgcgtgaattaatgaggctgcccgagccctggagcccgtctcacggagctgggtgccaggctggccctggacgggaggggttctgaccccctgcacctgccacagggcgacccggcagaagaagaccatgaagctgtcccgggccctctctgacctggtgaagtacaccaagtccgtggccacccacgacatagagatggagggtgagtggctcggggacctggggccacgggcggaggcctccctgtcccccatccctgctatgctgctgggcgccgggcgaggtcgaggactggcagtctgatgcccggtcaccggcgccacagcggcgtccagctggcaggtgtcgtccttcagcgagaccaaggcccaccagattctgcagcagaagccggcgcagtacctacgcttcaaccagcagcagctctcccgcatctacccctcctcctaccgtgtggactccagcaactacaacccgcagcccttctggaacgccggctgccaaatgggtgggtgcgggcatggtgcgctgggtgtggtggggagggctcggctcagacggtccctgaagcccaaggggcgagcaggggacccgctggggcctcggttctgtcctgggctctattgcccttggagcctccacacctctgtggcatgctgccgacaccaggctgccactgacaccaggctagcactggggcagggtccttcaggccttgtgggggatgtgggagcgatggtgcaggcctgtccacctactcccagggatacctgcctgcgaggctggctgcgccagctccggggatgtccctccaggatgtgctggcctcagtcctgcacaggtgtgaaccttggagtcccattcacattgggtgaacgaggggcagacggcagatacgcggcagctgtgcaggggaggctagcgtgtggtggcgggtgggcggggcacacacctggaaggtcaggtgctgaccagggcagccttgtgtcaccctcgcagttgccctgaactaccagtcagaggggcggatgctgcagctgaaccgagccaagttcagcgccaacggtggctgcggctacgtactcaagcctgggtgcatgtgccagggtgaggcactcggacactcagggctcggacgctcagggctcggatgggcctcctgggtgtccccagaacagagatcggagccccacaggctagcaagggggtgggggcggctttggcagagtcccctggagggtcaggttgggacgaagctcccaggatgctggggaggtgggtgggggaaccctccttgctagcgttgcaaagaagggcccagctccgtcaggaatccagggatggagaactggggagcctgggccccacatgagattcatggcaggacttgtctgaggggccccagtgccagcgacccagccccctgtgcctggcccctctgtgggtctcaggacctgggtctgggctgggtgtttggaggaacctcctcccggctctcagacacctctgttttgtctgctgtggatgacttccagcttggtccccctgtggccctggcaggagtatcaccatgggagagggcaggacaggggctgggcgagcaggcctcccactagaccaggctactcctgctgtggaccagctacttccacctctgcccttggcttgccctcctcagagttctcagcctgagtgggccctggggacactgtcaccagagaccccacccctcatacccccagggacccagacccacccccagaagccatgtgacctcctcggctcagctgtgggaggcatgggctctgtcccacatgctgcggtagccacaaaggtgatccatactgggccaggtgcaccccgaggtgcccccctggaccactgcctccctccctccccctggcaccggctccagtctcctatgtgggggctggggagggggctgttggcagccatgccccagcaagcagggggcttgctgagggctgggccactgaccacctccccggcatcccctcaggcgtgttcaaccccaactcggaggaccccctgcccgggcagctcaagaagcagctggtgctccggatcatcagtggccagcagcttcccaagccgcgcgactccatgctgggggaccgtggggaggtgggggccagccccacacaggcgggaggggtgggagttgggggcgggccgggcatcgcgatgggccctgatgccacccccactcctgtgtcccagatcatcgacccctttgtggaggtggagatcattgggctccctgtggactgcagcagggagcagacccgcgtggtggacgacaacggtgaggctgggccgtggctccgtcacacctgtgatggaagtctgaggggggagggttggggctacctggtgtgcccgggtgccctgcccaggcctccctcagtgacagtcctgggcgccctcccctctaggtgggcagtcccggaagcagcaccgggagtggcactgggagtggtgtgggccgggggctccaggctggagcggtgctgggccgggccctccccatgggacactcctcctggcgctgcttccccagggttcaaccccacctgggaggagaccctggttttcatggtgcacatgccggagatcgcgctggtccgcttcctcgtctgggaccacgatcccattgggcgtgacttcattggccagaggacgctggccttcagcagcatgatgccaggtgggcaggagtggacacggtgccccccacactggccgagggccccagggcagggcaggtactctttcccctgtgagtcagtgcctgtgtaggtgggcctgcacctggcaccaaagagacaggagctgaggacgggaggagagccagcctggggatctgcgggtcaggcaggggcatggcctgtgggggaggggccacccccaggaagaggtccctgcaggctggtgcaatgccaatgggcttcctggaggaggtggggtagtgctgggcccacaggaggcagaggccccaggcctgggcttgttgggtgtatctggggtcttgggacctttaagtagaatggggggcagagcaggtgggggccctgggaggctgtgacctcatgaccctgctgacccacactgctccaggctacagacacgtgtacctagaagggatggaagaggcctccatcttcgtgcatgtggctgtcagtgacatcagcggtaaggtgagtgtcaccccctgccaccagccatcatggggaggggccacaccagccccttgtcccatgcccccccatgtgtccccagtgctgggtcctgaactcaggcagtgaggcctagggtcccctccccgggcctctgctcctctatctcaagaggggctgctgtgggggcctggctcctgagccaccagtgcccacctctgatctcagggctggctttgggcatctcgggcaggacaggtcctgagtgctccgggccttgccccgccctgtgtcacccatgcctgtctcagactcttgggggccttgcagcctccacccctacagtgctgccatctggcttctcagcagggaccgagtgatgcccctctcccctctactaccccccacccctctacttcctggtgtcacgtggaaggcagctgcccgggtttgcctgtgactccacacccagcatgtctgtcccctgccccaggtcagggtggggcctcggcttccgcaggaagtggtcttggtgccagccctgctgccctggctttgagctggggcccagtgccctctgggtcctgctggctgcagctggccctcggggaacccgcacacacagcaggaggggcctgcccaggcccagtgctgactctctcctgccatgctctcgggcccagaggtgccatccagcccctgccgtctatccacccatctgttcctcgtcccccaggctgcagggctccccacgccactgctgtggccgcctcacctgctccccctgtctctttggtcttgcagtcggcttctctatggccacagcctacttttagaagtgcagctctgttaggagccttgaaggtacccggtgcgcgggacagtgcggcccgccgcccctgcatgcccaggccgcaccccattagcatccatgattcctggtagcatttggagactgtcgctcatgtgacgtggatcatgacatggctccgggggccctggccatccccagccatagtggcatttacgaggcagatccagggttcagctgggtggccgccttctcactggcctctcctcccctcccctccctcagtcctccctcccctccctcagtcctccctcccctccctcagtcctccctcccctccctcagtcctccctcccctccctcagccccttccctggcgggcagcccgctggagcccccactgtgcccctcctatccccctccttctctctcctgcccccatctcggaccctcaggctgttggttctgagttcgcctcccactccctccctgtccttgccaaccatgccagtgcatgggatgagggcacccctgaggccggcgctccgagccagaatcccggatctgcttctaaatggcttcccagccactgtgaccaaatgcgtagatttgggatcttgaatcaggaagctgattcaagtgctggccatctgaacgcatctgcccagaggcgcccctgcaggggggtgacccacctgccgggcctgggccgctctgtgcacgagcacggctcgtcatgggggcgcggtgggtgctgtctcgggggcatctggcatgtgagggcccctctggcctctgcgccctggagatgcagctgcctccctctcagcagctgttctgcc

SEQ ID NO: 227 - DNA, 1833 bp, Homo sapiens
gcagcgtgtggggctgcgatcggcatgggctctgcgcgcggggtgcccctgctcgggctggggctcaggggacgccgggggccagcacagggcccggtgtccctcgggccgtgccggtaactgggattggcacccgccggccatggaagagcctgggcccccaggtgggctcagccaagaccaagtggagcggtgcatgggtgccatgcaagaggggatgcagatggtgaagctgcgtggcggctccaagggcctggtccgcttctactacctggacgagcaccgctcctgcatccgctggaggccctcacgcaagaacgagaaggccaagatctccatcgactccatccaggaggtgagtgaggggcggcagtcggaggtcttccagcgctaccctgacggcagcttcgaccccaactgctgcttcagcatctaccacggcagccaccgcgagtcgctggacctggtctccaccagcagcgaggtggcgcgcacctgggtcactggcctgcgctacctcatggccggcatcagcgacgaggacagcctggctcgccgccagcgcaccagggaccaatatccttgggcacctatcgggcaatgcagacccagggaccggccccttggctgctcaccctgggggggcctgtcctttgccgggtcacacactggggaatggctgaagcagacgtttgacgaggccgacaagaacggggatggcagcctgagcattggcgaggtcctgcagctgctgcacaagctcaacgtgaacctgccccggcagagggtgaagcagatgttcagggaagcggacacggatgaccaccaagggacgctgggttttgaagagttctgtgccttctacaagatgatgtccacccgccgggacctctacctgctcatgctgacctacagcaaccacaaggaccacctggatgccgccagcctgcagcgcttcctgcaggtggagcagaagatggcgggtgtgaccctcgagagctgccaggacatcatcgagcagtttgagccatgcccagaaaacaagagtaaggggctgctgggcattgatggcttcaccaactataccaggagccctgctggtgacatcttcaaccctgagcaccaccatgtgcaccaggacatgacgcagccgctgagccactacttcatcacctcgtcccacaacacctacctcgtgggtgaccagctcatgtcccagtcacgggtggacatgtatgcttgggtcctgcaggctggctgccgctgcgtggaggtggactgctgggatgggcccgacggggagcccattgtgcaccatggctacactctgacttccaagatcctcttcaaagacgtcattgaaaccatcaacaaatatgccttcatcaagaatgagtacccagtgatcctgtccatcgaaaaccactgcagtgtcatccagcagaagaaaatggcccagtatctgactgacatccttggggacaagctggacctgtcatcagtgagcagtgaagatgccaccacactcccctctccacagatgctcaagggcaagatcctcgtgaaggggaagaagctcccagccaacatcagcgaggatgcggaggaaggcgaggtgtctgatgaggacagtgctgatgagattgacgatgactgcaagctcctcaatggggattccaccaatcgaaagcgtgtagaaaacactgctaagaggaaactggattccctcatcaaagagtcgaagattcgggactgtgaggaccccaacaacttctccgtctccacactgtccccatctggaaagctcggacgcaaggtagaggccaaaaaggt

SEQ ID NO: 228 - protein, 316 aa, Homo sapiens
  VARIANT (1)...(316): Xaa = Any Amino Acid
DLYLLMLTYSNHKDHLDAASLQRFLQVEQKMAGVTLESCQDIIEQFEPCPENKSKGLLGIDGFTNYTRSPAGDIFNPEHHHVHQDMTQPLSHYFITSSHNTYLVGDQLMSQSRVDMYAWVLQAGCRCVEVDCWDGPDGEPIVHHGYTLTSKILFKDVIETINKYAFIKNEYPVILSIENHCSVIQQKKMAQYLTDILGDKLDLSSVSSEDATTLPSPQMLKGKILVKGKKLPANISEDAEEGEVSDEDSADEIDDDCKLLNGDSTNRKRVENTAKRKLDSLIKESKIRDCEDPNNFSVSTLSPSGKLGRKVEAKKX

SEQ ID NO: 229 - DNA, 75976 bp, Mus musculus
  misc_feature (1)...(75976): n = A,T,C or G
ggacgtgcaggcgcactaaaggcttatgggggactgcctgtagtaacatttttcatccatgaagcagggagaataagctcacatgactcatatagctgtgaggattaactggagaagcacagactaaaatcctgcaaaggagaacacttcaaacaagctagcagtaccaggcatgaaagtgagtaagaagaggaaggccatgtgttgctgctagccagagcgcaacagatcaggcactttttaatgttggtgaattgctgtaggggagagatattagcacactccgagaagcagataattaccaagattttactctgtaagtcactgctcaaatacctttgtgtgtgttcttttatttagtagccctgtgcagagttggccatgcagctcagtgagtgtcctgggttcaatcctgaaaaaaaaaaaaaaaaaaaaatccaaaccaaaacagcagttttccctatgtcacagattaaaaaactaagacattcaaaggagattatagtccccaaaattaaacaataattaatgcaggatttagccagtcgtgtggtactnnnnnnnnnnnnnnnnnnnnatagagaaaccctgtctctaaaaaccaaaaaaggaaaaaaggaaaaaagaaatcaggatttaaagtttatctctacaaagagtttagactttaagtatttgatgttgaatgttagcaaaaaggttacaagtatatgtgtgtgtctgtgtgtgtgtgtgtgtgtgtgtgtgtgtgtgtgtgtgtgtgtgtgtatgtggagggtgcttttttcttcaatgtgtcccctgaagatctagtttggccactggacagcctaggtaaacgttgcctcctcctatagtctaggtcagtgtgtccctgacataggttagtaatggtcacataaaattcccacctctgctacccagatcagcaaatgggaaacagacctaaggtttgctaccattttgttaaatatgggacatggtagctagttttatgtcaacttgacataaaccagggtcatttggggaaggggcctcttatttgagaaagtattttcataggatcggcctctaggaaagtttgtagagcacctttctgattaataattgatgtgatggcttaccttgtactttcccgctaaggcatagcctaagaaactcactcgggagcagctgagccaagaaaactcagctttgatttgttagttgtctccttagggtttccattgcggtgaagagacaccatgaccaagacaatgcttataaaggcaagcacttaattggggctggcttatactttcagagggtcaggctatcagcatcatagtagaaagcatggcagcctgcaggcagacacagtgctggagaaggagctgagagttctatgtctggatcagaagacgactaggaaagactgtcttccaggcagctagaaagaggggctcaaagcccacccccacagtggcatacttcctccaacaaggccacacctatttcaacagggacacacctcctcataaggttgccccttgtgggtcaaaacgaacctatggggcccaaacaactacattagtcaatactgatttgtacactgttttgttttgttttttgagacagggtttctctgtgtagccctgtctgtcctggaactcactctgtagaccaggctgggctcaaatgcagaaatccaactgcctctgcctcccaagtgttaagattaaaggtgtgcaccaccactgcctggctgatttgtacattttataagtgtaaaaatgttaatttatttgtccagtagagatataactaagctgcaccccatcaatgaagatggtttctgttctgtaaaagatacagcaccaggggttgtggtgatttttcctaaggacattaatcagtttatcaactaattaaattaaattgtatatcaattgttaagaatagttttaatatcatctttttattataattcccttttatattagaagtaatgctgtgtgttgtgtgcactcagtgggagcacacaaatgtcacggtgcacatgaggaggtccgagacagacccctttccaggtatcatgtctcctctgtcatcttgtttgaggggagctttcttttgtgcctgcagctgcttgtactccaggccaggctggccacacaggcttcccaggagttctctttgcctagtctgtctggaggagcagagcttacagatgtccacactgcatctggcttttgacttgagttccagagatgcaacatgggtcatcaggcttatgcaatgagagcttttacctggtgagccatttccctggtccgttatgccctcatatccttacgccttatatccacaccctgtctaatccttataccttttatccacaccttgctatcccacactctcttatatcctcacaccttatatctatgccttggaagtgtcttcggtaaccaatcaaaataaaagtttagccctgtgcttcctctgtgcttgtatgagaagtattaacagttctattttttaaagctttcttttaggcatgcgtttgctctgtgtctctgtctgtgcaggtgtatacagaggccagaagtgggcatcaaatcccttggagctctgccgcagactatcccctttttaggtctcctatctgcgtggaacgggtctctggttgcaggtggacaaggagtcggcgggaattgacagacagacttaatgcaagggagtgtggatctgaatgtaatttgtcaaatcgaacatcaaactttttatacagaaggaaatagggaagttgggtgacacaccggcaaggtacaaagaggttactggacttacacaaaacagaggaacgcaaacatggaaggacttgcaggaaccaactggatttaaaattcaatgataacaactgggatcaaaacagctccacctaaggtccacttaatcttagaagccaggggcaagtgcttcgtgcccttgccatagttcctactctagtctattgtatagtccaccttctccctagaccattgtaaatacttgtatatggatgtaactcagctatctattgttctaagtgtctactctggttcccccttaggtcacaaacttccttcttcctagataatggtaaatttctgtgtagggcaatgatttagctatccatgcccaaggtcggatcaaggactgcctagaatctaacttagctatatgtcaaaatatcaatccttaggagcacttgtaataaagcaatattaagggaaagcacacagatccgtttaccaactaaagcaaggacattgaagcattcgttatacaggatgtcacgattccaggagactaagtttccgtgaacttttcgcctcgggacagcgcccaggcttttcagcccgtcaggctggtcactactggagtggatgtagcagagctggagacaggcatttgtaagccacccagtgtgggtgctgggacccaggctctgatagagtagtgagccctctctctctctagccccggcctttcactgtttgaaaatgagttgctattttaaaggaataaaatttgtctcaaatattttacatctttaaaatgtatgtactcctttatctaaaaattccatattaaggaaattaatgatgtgctccaagaacaccaagtgctattctgtgtgtggtaatgaaattctagctgaagtgtcctccttgatccctgattactatctacatgtattcacaatggttgcctcagagcaagggaacacttcagaagcatccctatttgtttttagctatattttcttgtgacacttttgagaaaactgtaaaagatcaccagtgaggcaaaggagcttgtcaccaaacccaatgacctgagttcagtccccagaaactacttgattaatggaataactgaaactgactcctgcaattgtcctctgaactctgcatgtgtaaacctggaactcactctgtagaccaggctggcctcaaannnnnnnnnnnnnnnnnnnnnnnnnnnnnnnnnnnnnnnnnnnnnnnnnnnnnnnnnnnnnnnnnnnnnnnnnnnnnnnnnnnnnnnnnnnnnnnnnnnnnnnnnnnnnnnnnnnnnnnnnnnnnnnnnnnnnnnnnnnnnnnnnnnnnnnnnnnnnnnnnnnnnnnnnnnnnnnnnnnnnnnnnnnnnnnnnnnnnnnnnnnnnnnnnnnnnnnnnnnnnnnnnnnnnnnnnnnnnnnnnnnnnnnnnnnnnnnnnnnnnnnnnnnnnnnnnnnnnnnnnnnnnnnnnnnnnnnnnnnnnnnnnnnnnnnnnnnnnnnnnnnnnnnnnnnnnnnnnnnnnnnnnnnnnnnnnnnnnnnnnnnnnnnnnnnnnnnnnnnnnnnnnnnnnnnnnnnnnnnnnnnnnnnnnnnnnnnnnnnnnnnnnnnnnnnnnnnnnnnnnnnnnnnnnnnnnnnnnnnnnnnnnnnnnnnnnnnnnnnnnnnnnnnnnnnnnnnnnnnnnnnnnnnnnnnnnnnnnnnnnnnnnnnnnnnnnnnnnnnnnnnnnnnnnnnnnnnnnnnnnnnnnnnnnnnnnnnnnnnnnnnnnnnnnnnnnnnnnnnnnnnnnnnnnnnnnnnnnnnnnnnnnnnnnnnnnnnnnnnnnnnnnnnnnnnnnnnnnnnnnnnnnnnnnntctgctccaattcctgctgctatttccggggcctcaatgtcctcaacatgaactctccaacaccttagtttttcagttccttactctcccacttttccagtgaccttttacttcctctccagtcctgtgactcacgccagtgacatttagatgtcatcttcattcagatctgttcatctccagagcttctgtactttctgctttgattccatggagaaaaaaaatcccttcttttcattaaaaaaagtaacattttgttgagaaaaatagttgttcagaaaatatatctttctttttttttttaaatggccaatgaggtggctcagtagatagaggggcttgcagcaaagcacaacaaagacagacacagcaacccaagggctacaattcggcttgcttgaaaaccattcagcatttgctaggactggtttattatctgttgtacctcctaagttcctaccttgttctacttttatcatttgccttttcccactgaatgctctgccttcccaagttagtaagtcaaaactatatcctcattattatgcccaaaaaataacttgcagagtggtgatattcttcacctgacttaggatgcttcaaccctagtacgattggcatttccagctggatggttctttgctgaggctggcaatgctgtttaccatagagcagctcttctcaacctttgggccacaacccctttgggggtgtcgagcaatccttacacagggctcatctaagactgaccgttgggatacacaggtatttacattgcaattaatgacagcaacaaaatgacagttatgaagtagcaacaaaataattttatggttggggtcaccccaacacgaggaactgcattaaagggtcaaaacatcaggaaggttgaagcactgctagagagtctttagcagcaacccctccatgcccacggcctcagggttagatgccaggaacacttaccccaaatcataagcatcaaaaatggctccaggtactgtgaaggaaataatgcccctgagagtcgctgatgctgcttgtgttaaacggttaggtattattcactgtttcctgactcgaaaacaacactgatttggaaactctaaggttcacagtaaatccgacacattttaaaattccctttagagtagaagtggctcactggagactttgttgtcttttctctgggcagccccctcccccacacctacccaccnnnnnnnnnnnnnnnnnnnnnnnnnnnnnnnnnnnnnnnnnnnnnnnnnnnnnnnnnnnnnnnnnnnnnnnnnnctgtttactgaaagaacatacacaccctgtctccaggtcctatccatttgctggcaattgccaatctttttaaaatcctgcccactgattggcagaacaaagcattacctttccctttaaatatgtaactctttgctagcctcattggtaacattcactctgtttactggctgtttgcattgctgctttaggacttgcctattaaagtctagttgcccactcttgattttgtaagagctgttagttctgtcttctggtatgtcaacgagcctttgttgctatgagaaaacatctgagaaaaacaacttataggtagaaagatttatttgggttcaaaggttcaaaggtttcagttcatagactctgtggtgaggccgatcaccatgggaacagaacagaacaaagccactcacctctttagaggcaggaggtggagagtgagcagaaaggctagaaacaagatacatcctcgaaagtcatttgcccagtgacctacttcctcctcctctaccaggttatcatcatttccaaatagtgccacaaattattcacaaacaatgggtcggtccattactgaggtcagtcatcatgatcccagcagcgttccaaagccccatctctaaatactgctacacacagaagccttcaacacaggagcctctgcggacattcataagcaaaccgtatcgccttacttgtcttttttttttcttgtaaactttataccagatttactcatacagaatccatatgccaagttgtcaaccattagacttccggtactttaatcgtttcatcataagaaaagttgccttgattggtcttcatgtgggtcccctaacaattggagcaggggtgggggagctgtctatcgctctgttgcctgctactggatccccttcccctaactggactacctggttaggcctcagtgggaaaggatgtgctaagtcctgctactactggatgtctcagagaagggtggtactgaaggtgtgggggaaagggggggcttcccctcctcagaaaagaagagaagagaaggggagggaagggaaggggaggggaggggnnnnnnnnnnnnnnnnnnnnnnnnnnnnnnnnnnnnnnnnnnnnnnnnnnnnnnnnnnnnnnnnnnnnnnnnnnnnnnnnnnnnnnnnnnnnnnnnnnnnnnnnnnnnnnnnnnnnnnnnnnnnnnnnnnnnnnnnnnnnnnnnnnnngggaggggaggggaagggaagggaagggaagagaataggttaagggatttgtaagggtgggactgtgaagagaggagggagggggctacaattgggatgtaaagtgaatagatagatagatagatagatagatagatagatagatagatagatagatagatagatagatagatagatgggggggggagaaaagttgcctctgaaaccataaatctgagttttcccctctatccagcttgtttattattctgcatccttctctctcttcctctcttcctctcttctctcttcctctctcttcttctctcttcctctctccctctctcttcctctctcttcctctttcttcctctcttcctctattcctctcttcctctcttcctctcttcctctcctcctctcttcctcttttcctcttttcctccccagcagtgcatctcacacccgaatgtaggacggatctctggaactctattaaggcttgcaatgggatgagagaaccagaatttttgcatgctccaggtgacatcactgtccttagatcacacttaaggtcactagtgctaaaccttcaggaccccagccctctgattccctactcagtccttcttgccacatgtcaacctccagggcagcaagtgcaactttttctcaccccttcgttttctcggaataccgaatacagtgggcaatccatctcagcactgacaaagccaccatctcccagtctccagccacagagccactcactacactagtggccctcaaccttctcaatgctgtgaccccttgatacagttcctcacattgtggtgactcccacccataaaactatttcgttgctacctcctaactgtaattttgctaccattgtgaaatgtaatctgataggagacccctgcgaaagggttgttcatggccaacaggttaagatgtgctgctgtgctccaggaagtgacaccccttccgtttacttctgcagcagtctgtgatctctagtgagacaattcttcatttcgctcatctccttcctgtcccacataataactgcataaactccgtggctgccccccaagccacacccctctcctttcctttcagctctttcaacccatgatcagtgaaaggagaagctctcccaagcccatggtggcagtacatttagcacagcaacagctatgtccgaaaatgtaagcgctgtgttaaggtttcccaatcgtcagaaaattctccttaaagacgtattcattaagctgggtgtatttaataaacacgtcatggctctaacgatgtgcctaccaaccttattcaaggcgttagattgactgccattttacatagttcttagtacgcctagcacagtgaattcacatagtcctggggtcagaggaaggacttactgcctgaaatcacaggagaccttgaagatccctcagacctcataaccttacaccatctgtatttgtaagagagggcaggcagtccttcaccccaggttctccactgtgtccctccccacttaaacctctaaaacagtggctctcaaccttcctaatgctgcaaccctttaatacatttccctattttgtgctgaccccccgcctaaccataaaaccatttcgttgtgacttcattgtaattttgttactcttatgaaacgcaaagtaaatatctgttattcaggaaatccctgtgaaagtccctatgtcctcagggggtctccacccacaggctgagaacctctgctttaaaacattaattcttttattagtcgtatgtaaggggcgggcgggggggggggcgcggtgcagcaaggatcacgttgtgcctgttgccgtcagagaacaactcagtggagtcggtctctccttctacctttagatggcttctgagactgcaattccgggagccagattcgcagcccaagaatcttaatcctctcagtgatctctcctaccctcaaggacccttttaagaaaaaccctctccttctgtacactgggaagaaaattccatcccctcaatttgggatggtccctgccgtcactatttaaaaagaatctgttcaagatgtgttataacaaatcggtagttttccgagtttgtttgccccagacccttgcaggagccggtgtttctttaacagtgtatgtaaatccatgggacagagagactgtgcgtgtggtgccctttagaacatgatggccccttgtcacgaacccacttctcaccagtcacgatctgtgttctctttaatgcaaacacaggtcaccccctccacccagaaagcagaattttaggcagaagcaccggaactggcctgaggaccacggagcagcgacgacagcagctctgcttttgtcctgcgagttggtcacaaactcaactctgattcagtcaaatgctatctactagacacttttgttggacatggtcctgtaccgcacactcggcacacgtaaggctcacacacatgttctctcttgaaagctccctggctttctcagttgcagcacagggctgaaagcctggcccagcttggactccaggtggcccgcccaccgcccaccgtgggcaccatctgcgcagcgttcccgggaccgcggtggcggagggcaggccccacgtccaacacgggctccgacaggtcatgccccaccgcccaccaggctcgctcgctgtcctcaataccctgcagggcacgttgtcctgggagctagggcggagatcccgccccacggggcgggagcggcgcggagcgggcgtgttggtgggcgtgtcgcccggggcccgcccctctgtccggactataactcccccgagcgcccggcgctcgccggcgggcggagacgcgcgcctggtactggtgaggtttgcggaagggtgctgctgcggggactcgggcgggctgcggggctccggtgggaacaccttcacctggctcctcggaggagggagcgtagagctcaggtgcccccgagggcggagaggactcggggctggcgatgcccgcgcttctccgtggcggacccagctgctcacttctcctccatctctaggacatggaccgcgcgcgcctgtggctggggcttctgctgcccgtggtggccgccctggatttccgatatcaccaccaggaagggatggaggcgttcctaaagagcgtggctcagaactacagttcgatcacgcacttgcacagcatcgggaaatctgtgagaggtaggtggcttcctgcgcacatccctaaccctcaacccgcgttcaaaagtaagttgaacgacagcgtctggtcccctgttggtgaggctctccaaacgcgctccacgcaggtaaagcacaccttgcccagtcaggggtttcctgcttttgtttgttgttgtttgttggttgattttttgtttttatttttgttttgttttttcaattttgttacatcaggagagcggtaagaggaactgtatatatatattgtcgtttctctacagagagtcattgtcgcttagtcctctgttttattgccgttggggatcgggaagtaattatctgagaggtgtatcttcgttccttttcagggtaaacatcttcctcagtttccctttttgttggcttccttgcatactgattgtgactgttaactacggattcctcaggtcattttaaaactagacagtgccatacttttgtcgagttctacacatatgtgattaacccgatagcttaaagttatgagaaaatgtaggtctatgtctaaaggctgtttttgaaggatacacctgcttggtagtaagtcacaacgaatgatctccttagcatttgcaaatgtatcacttagtctgctttacttttgaaactatatattcttagtggagagagtagatggggatccaagaagttaagaattttggtcgagttacctagatggcgattctatccatccatccatctagctagctagctcctggagataaaactcaagacctcatttgtgttccgcattgtatcgttaacctaacctgctagccatagagggtgaagttttagccaggacctgcacctgatcattttgggtggggcaaataaatttagcagctagcatcatctcctaatcttttgttactacgctgattctcacaaaagtggttaccagaaaacttaatgcctggaatgaaagagccctgaagttcatgcagtttggctcagctgtggaagttgtgttcaaaagttctgacctgcagtttagcactgatctcttgactcgactggaagtctcataaccacattactaagcaaccagtcacttctcataactgttaatgtcatggttcagttcttgtattacagagaaatattaaaaatgcaataaaaacagctttgactgtgtaatagaagctttattttgaagcagcattgccagagttggtgtcagaaatcatctaagggctggagagatggctcagcggttaagagcactgattgctcttctgaaggtcctgagttcaaatcccagcaaccacatggtggctcataaccatctgtaatgggatccaacgccctcttctggtgtgtctgaagagagcaatggtgtactcatatacatttaatgaataaatcttaaaaaaaaaaggaaataatctgaaatcctctgatcaccacaaaccccaagtatggaggttagttatatggaaagttatatcttgaatcagcatctagattgagtctcttaaaataatttatccaagggctagagtagagcaaatttaaaggatctaagaagccaggcagtggtggtgcctgcctttaatcccaacacttgggatttctgagttcgaggccagcctgatctacagagtgagttccaggacagccagggctatacagagaaaccctgtctcgaaagaaacaaacagaaaaagaaggtctaagaatactaattaatataaaagaaatgtacatcgcaactaacttgctgttattgttcaatcattttgtaactaccaaggtgatgggatgctgttagtccaagtaccacaggactcgtgtgcttttgtgttttcaaacacaaggttcttaggacagatgtatgagactgtccgcctgcgagccgcctgctcacctgaactcaaacctcgggaagagtgaatggaagccagtagacttacttgatctttatctttaaccttgtatgcgcttcagtggttaaaggatgaagggactgtggtgtaagaaataaagctggcaccagcagccagatacttgtgctgtgtatgcatctctaagtaattacttggattaggggggaaaaaaatcccaaatctaccgttaggttccagggtaggtcaaactgtacacctatgattgacacccggttgccaaggtgtccctgaattttagtgtgatcactgaggtgtggtgattcttgatggcgctctttcccggacatttgccctccggtgtgaggtatgtgtacttagcacatggggtttaccctggttgtctttatttactttttaccgctattaatatgggcagcctcacccggacgaggaaataatggctaattgggcaagcgcaccagtgcaccttgggttttgtgagtctctgtcatgtttccattactgcagttatgaattttacttccttccccactgcacactactttaatatttatttttaggaaatatgatttcagacagctgatgaattctcttggttttagactctgattatgtgtgttttgttagtcattccccatgttgggacgttggaatactttctgattctgttataaatgatgatataaatccatcgatacatatcttacatacatgcattagtgtacatgcatgctttgtctacagaatccaaagagggcatcatatctccctggaactgaggttccaacaatagcagcttccgcgtgggtgctgggaacttgatgtgggtcctctagagaagcagccagtgctcttaaccagtgagctgtctttccagccctgaacttttacttaaaaaaaaaattgaaacctacacatttgagcacaaatttacttttaacctagatttagacatagtagatgagccatatttgactctaggttttgaaggcatccttaaaacttgttgacatggtgtagaaaaatcttaggtgaaaaacgagaaaagcagtaccaagtggaccagggcacaatattcactgtcagtggtgtgtgtgtatgtgtgtgtgtgtgtgtgtgtgtgtgtgtgtgtgtgtgtgtgtgtatgtgtgtgtgtgtatgtatgtgtgtgtatgtgtgtgtgtatgtatgtgtgtgtgtgtatgtgtgtatgtatgtgtgtgtatgtgtgtgtgtatgtatgtgtgtgtgtatgtgtgtgtatgtgtgtgtacgtgtatgcgtgtatatgtgtgtgtgtgtatgtgtgtgtgtatgtgtatatgtgtgtgtatgtgtgtgtatgtgtgtgtgtgtgttcatgaattgcataatttgttgagcaaacagacatatctcatctgtcccttgctatcaggtatcctccttcagatacaaatgtatttattactaatttctcaggcttggccatctgcatctcactaaaccagtttaggactattgcttggtgggttgttttttttttttctttttgtaggagggtgttttgttttggtttggttttggtttcctgaaatagggttttggctctggagtttgttgttttgttttgtttattttccattcgtttttttttttaatgagttatttctttattatacataagtatactgtaactgtcttcagacagtttttcttgctccggccctgcttgctcactgtagctgtcttcagacaccccagaagagggcatcagatctcattacaggtggttgtgagccatcatgtggttgctgggatttgaattcacatccttcgcccttcggaagagcagttggcactcttaaccgctgagccatctttacagccccttgcttgttttgtttgttattttgagacagggtctcactgtctgtcctgggtagcccttgctgtcctggaacagaactcactgtgtcaggctggccttgaactcacagagattctcctgcctctgcctcccaagttctggaattaaaagcatgtgccaccaccaccacacccattttaaaacagggtttttgattgtttgttttgttttgagacagtgtttctctgtagccttgggtgggctagaactcactctgtagaccagactgactttaaactcacagcgatctgcctgcctctgcctcttgtgtgctagctaggattaaagatgtgtaccaccactaccacccagtaaaacagggttttaaaagtaactcaggttggccttgaacttactatagagtatacaggcttgcctaatctcgtggtcctacctcagctgtcacagtgatggagttgtgagtgtagttacaaagctgaggatctagaagtcaaacttgggcaccgtggttccgaagcctgtgctcagacattgctgtcttagctgtgaggatgttcaccacagcactgcacataacagaaaagatttacaaataaactcaataccctctgaccattgccagctgtggcaaaatgcttctctaaagagaagggagggatgtgtttggaagagtagcaaacttgagtttgaatcatgtgtacacacgcgcatgtgtgagtgcatacagaggccagaggtgaacagagtgtcttcctctattgctttccaccttatgtttgagacagagtctttcactgaagttggagctcgccattatttggcaagactacctggcaatgagcccagggaccctcctgtctctgcctacacagacggggttacatttgcaaggcaccgcacacagccttttaaagataatttaaaattgggcccgtgagatggcttgaccagtaactgtgcttactgccaagcctgacccgacagtttgattcctgggactcatgtggtggaaggaaagaaaccacctctataagttgtcttttgatttccacttatgtactgtggcatgcgtggattgtacacaagttttaaaagtaataaaaaaatttgatctattattggcttataatttctcaaaaaatgtatattaaggggagaaactctaaaatactgcttatgatatcatcacagtagcttttcgttgttttgttttgagacagtgtttcgttgtggttgaagcataaggaagaatttatttctcttgtttgtttctccaggaacttaacttccacaggtcggctggagcctgcgtgccttctcaggtgtccagaaatctccccagaattggcttagattcttgctcccacagggcagagagtgagctcacaacactctctcacactctcctgcccttgactgtacaggtttaagctagtggtttctcctggagtgttgggagggaggtgtgagccatgtatgaaagatttgagcgcaactgatgtttttcttcacattctgctcattttccaaacatgcttccaaaaaccaatttgcttgagctcctgtacaaagtgatggaaatatcgacagatccaggaccgaatctcagaacaaaccctgaaaccttggaatttggactctcactgtccatgtgtgtgatttaaaatcagctaaactgagtaggcatttccctttaagaaatctaacaaaaccttgttctgaaactatttgtggaccttgaaaatatgcatttttcaaatgtaagaaaatgtgttatacatcctttggctttttagtataatattttaagtgggaattgggacagaggctacccaaagagtaaagtagcatcttatcttgcttcatttatagccaggatctttttggttttttgagacagggtttctctgtgtagccctggctgtcctggaactcactctgtagaccaggtgactgaccagcacacagtctggggactgccatctttgagtgtgagaccttgagctaaagaggattctcactgaggacagcatcaccccttggaggttgtttggggaaaatgaagggaagatttggatctcagctcaggactgtgggaggcgagtgaactgactggcctcgaactcagaaatccgcctgcctctgcctcccgagtgctgggattaaaggcgcaaatactctagacagaaatacttctgagactttaaaaagtaattatgagagccaacattaaataactttcatgtctacctgccagagtgtgtgtgtgtgtgtgtgtgtgtgtgtgtgtgtgtgtgtgtgtgtgtgtgagacagacagacagacagacagacagagacagaaggagacaggaaaaggcctaatcattctaacaacagcatacaacacttggcatgcaatctccacgttgatttatgtataaagaaatggagctgggaaaatggctttgttgcccttccagaggatcagaccccagttcccagtacctataaggtggttcacaatggcctgtaactccaactctagagggtatgatgccctcttctggcttctgagggtacctacacaacacaacacacacactctctctctctctctctctctctctctctctctctaaatccttttcaaataagaattgggattaaataagttttccatttttgtaacagaggcttgactacaaacaatcaaaccctaccttgggccaaggtctgatgcggcagcctttttgctagtaaggttttcccagctctcctcttctggtcttggccctaccctgctcttccacttgtcccctttacccctgaatcctgtggtttgaagggttgacaagggtataaaacatccttcatgtgtggcatgagccccagtagaattctttggtccctttctggtgtccatggcttcatccacgtaccttgaatcccctcttttggtacagctggctcactctccttgctcactctccttgctcactctccttgctcactctccttgctcactctccttgctcactctccttgctcactctccttgctcactctccttgctcactctccttgctcactctccttgctcactctccttgctcactctccttgctcactctccttgctcactctccttgttcactctccttgctcactctccttgctcactctccttgctcactctccttgctcactctccttgctcactctccttgttcactctccttgctcactctccttgctcactctccttgctcactctccttgctcactctccttgctcactctccttgttcactctccttgctcactctccttgctcactctccttgttcactctccttgctcactctccttgttcactctccttgctcactctccttgctcactctccttgctcactctccttgctcactctccttgttcactctccttgctcactctctttgctcactctccttgctcactctccttgttcactctccttgctcactctccttgctcactctccttgctcactctccttgctcagatgctcacgttcttggattatgaagcaaagggaagagggtgactgtgaccagcacacagtctggggactgccatcttgagcgtgagaccttgagctaaagaggattctcactgaggacagcaccaccccctggaggatgtttggggaaaatgaagggaagatttggatctcagctcaggactgtgggaggcgggtgaagcatggaacagtcacacatggggaaagattgatccattcagttgttaactacttccatagatgagaggcctatcaagtgtctaaacccgaaacaaggtttgatgtacaaaacctcccctcacagttttaacccatactgaacttttcaggaactcggctgtagataaactgacagcaacttacattgttttttgctcttggcttaatcgagagagattttcacatcctcccagtccgtgactgactttctcttcgcctttggcagagtcatctcgagagctttttataatttggcatcatattttatatagtctttatttctccttttagtgcagtttgaatgttagattggttctcttgaaactatgcacaaaaatgtgttatgaaaacatatgtgttatacaccagcatagaaaagaagacgttcaaattacagaactcagcaaaggtgggggtggggggaggacagagccaagggaagaactctgggatgcagagggctgcgagctctctttcctggagacaagcttcgtttcctctagctggcaccagcgtcagccttacctctcccccaacccccttaaccatcattaggttctttacagaaattccaattccttggggttctttgtttcaacagtctgatagccaaagggaggggcccaggtgtcttagaacaccattgctcctgcaggacagtttcagtaatataatttgtggggaactgagtaccatagtcacatcttagctcagaaggccctgaaggaagccaaaggactcttagcatcttttggactgtaaacaatgtaattgaattattcaccagttggtattcagaacaatactagggtggttttgttccctcttttgcccctaattctcccacacacactgaccagaagggcgttaggagaggatgactattttaaaagtccttttcagtgggagacactgacttttgtgagaatgtgggcattgtcgcgtgggatgtacagatacatgtgtgttgtgtggctgtgtcgcagagctttcctgtattccaaaggaagattcatttccaccttgctgataacactgaagacagagtcagatttcacaaagggcttgttcagttgagggcaattcctttctttttcctctcgctcctttggagtcaagtgtaataatgataatttacaggtctgcacagttgcctccaacttgtgagaaacagaaaggaaattaggaaatgcctcattcactccagtcgcatagcaaatcttacttgtaaaggttttcaggcagtggtgagatgtcctagcacaacacagcatttgcagagacttccaggtctcttatgtagaaagtcccgtggccaattgattcttttttttttttgaatttatttattttatgcatatgagtacagcaccattgctctcttcagacacaccagaagaggacacctgaccccattacagatggttgtgagccaccatgtggttgctgggaattgaactcagaacctctggaagagcagtcggtgctcttaattgctgagccatccctccaacccctggccaattgattcttgatggaaagcaagggccagtcctctctgtgcaggcccataataaattaagaatggttggatagagtctgcctggctatctcacacttgctaacagggggaagccaacaaaaaggaacataagggttgctcataaaggttgctcgtcagggctaggaagctctctgtttgtaaagtgattgctgtgaaagtcggaggacttcgtagaacgcaccaaagccaggagtgctcctgtgatctcagcacacccatagtgagatttttttttttccacaacagggtttttctgtatagccctggctgtcctggaactcactctgtagaccaggctggccttgaactcagaaattcgcctgcctctgcctcccgagtgctgggattaaaggtgtgcgccaccacgccgggctttggagatttgttcttgaaacagaaccagtggcatgtgctaccagaaggactggaaatgtgaggaagagagaaaaatgaaagatgaccctggagcaaatgctttaaccctgaggctacgtgctttggcagctcagagcattcatgttatctattaagacagagaaaactagtagagaccagttctggggtgatttcaggagctcagacacaaaggccgggcatggtgacacacgcctttactcccagcagcacttgggaggcagagccaggagcatctctgtgaattcaaagcaggctccatccacatagtgagttccaggccagcctgggctacatggtgagtccctacctcaagcccaaacaaaacaagcctctgatttaaacagcttacttaatcttcaagtcctcagcagatcttcagctgggcttcggagggggtttatgtaaatggcactcaggagaagtttggctgtgaaaatgaactcggtgatcatctactgccgatatcagcagccctgagaagagcgaaactaccctacaagagactgaggaccgagaaaaggctagaacagagctgaaggctagcccaacgcttatagtctggtagagccaggagccagcaaaggaggggaaatgaaatcaggatggagaccgtggggggcggggaggggggaagggaacggaccctaagagtcgtgccacaggacggtggaggcacccaaggtcacgtgactgccaccaccagggatttttaaacaggacgcaggaggtacccagggtcacgggacttccaccggggattttctggaaggactgtgttaagtcaaactaagctcctccccgaggctgagcgtgcagcaagggcccggcgcagaagcagcaggctcaggctatggtggcaagagagtgagcacaggttctgcccccctcagggacttgttcccaaccagctgtaaaccacagagacacgtgaacaatccctccattcagggaagcccaacgaagaagccgcggagttcacagttcagtttgactgtccgcaggagtgtagtaccagctatgcactccatcattgtaaaccacgctcttatcctgacccactgccttggggtgggttcaggacacagaaagaatgaaactagcacacagttcaggactgcagtgttccttttggttcagggtcattgacaggactgcaggtgttcccaaagataagcaagaaccaagaaaggcagacttgacggtgacaaccatttcctctcaaggtcatggttaatattaaatgttgctgggagtcaaaactgagagccataaacttaagtcatataacccaaactgtagttactaaaattccatttttctgtttacagactgggttgcttttagcagttcagtacctaaaattcagagcctagaaatatagaggtaaagacattagacacaacccctgccctgaaaggattggaagaacaggagaaaagcaagacaactagtaaacagatatgattagttctgtgggggcagcagagggtaacgggaaagaaaaggatggtcagccaggagcaacaggaaaggcagggcagaccgtgggcctggggctgaaggagccatcaacctggaggaacaaaagaagctcgctgtggccaaggggagaccggaaggcgtgtggactgagggtcttaaccgtgctgtgtcagccatccttggttcatccaaaggagacacgaccatctgggctttatgcctgaggggaaggtgaccggtgcatttcttcgatcggaaaaacaaatttttagcaattttataatgtaaaaggttattttctagaattaattttatctccccactctatgtgtgctagtcttagtgtggaggtcggggtcagcttttcaggattgcttctttccaccgtgtggatcaaactcaatttgtttgttgaccctttataagaataatatatatgctggacagtggtggcgcacgcctttagtcccagcacttcaggggcagaggcaaacagatttctgagttcgaggacagcctggtctacagagtgagttccaggacagccagggccacacagacaaaccctgtctcaacccctccccaccaaaaaagaatgtgtgtgtgtctatgtgtgtgtggtgtgtgtgtgtgtgtgtgtgtgtgtgtgtgtgtgtgtgtgtgtgtattcattttctaccagattagatcttagttaccaacaggtttggttcattagccaaaatgcattttggcaattcacttatgaacccgtttaatccatagttgttcattgggcccctgctatcttgcagaacctttccaggcggatataaagaacaaaacccgagcttcctttcagaactacagccgagggcgctgaattcctgctgcagtggtaggaaagccttgttgctggactgtgatcccagctctggcccctggggtgctcggtaaaggtcagaaaagcttctcaggcaagcggattcccagagccccagcccctgggcagacctgccgggggagaggatagcagaaccccagcccctaggcagacctgcaggggtagaggaatcccacgtgacgcaggaggaatcccacgtgacggagactggaaacctcgcttgcttacatagctggttggtgccagtgccgagactgaggtctgaccagcaatacaagaggcagttcccaccttgagtgccagagacgaggctgcccttctgtgaactgtccaggaggaggatttagcccagggcatcttagcgtccacagaatcttaatccgctttgactagaaaatacagttagggatgtttttgtcattgtgccctttattttttgaaaaacaaaatgtccaaagaacggcggttaggtacggaaaagacttgactcctcgctaaaattggaggaattcgtggtccccagggaactgcttccgtcggacattccattctttgcccttgggaaatgacgtccgtaggaataaaatggatatgtgatggttagtaatgagactggcctgctttgctaaatgctgagtgtgtacgagaacttaaatcctcactcttgcgaatgagatactgccatgcccattttccagacgagaaactgaggctaagggaaagtgagttagggtaaagataggagtcatgtcgggatttagagccccagatccagttttcaaataggtctttaggacctggaggcttccattgaggtgagctgggctcccttcctaggtgaggagacaggagcccgtagggaccctctcccagagccagattagctcatcttaatctgtctaccttgggtttccacctgagaccttactgagatattggctccactcctgcgctgagtatcttgaaaaaatactacattgacttggcatctttgccatcaggagcaaactggtcctgtactatcctatcaacaagttactgagtgggaacactctggagggtgcccaagtgatatgagtccctgtgcttcgagacgtagcattctagctgagacaagtacctgtgacacttttttttttctttttttttttttttatttttcgagacagggtttctctgtgtagctcttggctgtcactgtcctggaactcactttgtagaccaggctggcctcgaactcagaaatccgcctgcctctgcctcccgagtgttgggattaaaggcgttcgccaccatgcccggtgtacctgtgacacttaacaaggtccggagcccccagacttggtcaaaacaagagggttgaaaatactgaatgtagccttatacctagccaaataacatgacttgagagatcacctgggatcgttaggccaaagatcctgtgctcacccacttaaccccctctctctagctgcctgcgctcaggggcctcttctctcaactgagcttctggtgtagacaagtcacggggagggacaaggtggaatagggaagggagtgagagccaccaggaaccagtggcatccagatactaggaattctggtcccctggggcaaggctggtgctcaagtcaaaagccatctgatagacaggacagaggctacaacaccttcccaatttgggagtcgatactagtgcagtgctggcgtgtaggagcccctctgcatcctggaaagggggtttccgttcacacaagtagctacgttctcatcactgtggggggtggcgttagctggagggagaaagctttgccctgtgtactgaaggtggggacaagagcaggttaagagaaaaatgtaagataacctcttgctgaccaaagactgaggcttagaggggtcaaggacaccacaaggacttggcccacagaatcaactaacaacgttgctcacagagatcaggtatcctgcatgtgtctgaccttggtcctctgttacgtgttatggtagtacagcttggtgttcttgtggggctcctaacaataaccactgtgaagcccgccccttcccctgatgttggtcggcagataaccaatctcattattctaaactgctctgtaattactcagctctgtgatttctatcatgatctatttaactatgccacagtgctgagcattcaggttgtttacagctcttagatatttcagatggatgctgtgatggggacctttggacaagcacgggtgctctttaatgtcccaggtgggcatctctaaatcagaaccccgcgcatgcattgtacactcacatggtagattcttgatgtaaagacatgcgcttgtgctctgagcaccacgtgagatgtacatttgtcccacatcctaactaacacttgaacctttccccattttaggaataaaaatccctccacttctaaatgccgtttttatgactgaaattgagagtgggtgagttttctcattatccagcaacaggacatgcgcagttactacccttgaggccccaaccttcagtctgttgcctgtgtccattttcttgtgatttccctcatttgtgtactaacctgtaggctttcttccgccctctgtaacaaatgcagcagatattttcatctattctgtggcttgtctagtggattttgttttgtactattttttgccctgtgtaggctttctgatttgccgaagttcccgttcagcaggctttttctgtaagctattacattccgtgtatcggtttttaaaaagtcaccttcacccccaggtcataaacatagtccggtgttttttatagcttcgttttactgcctaagtccatcaggaatctcttagcgtggcgtgtcagcagatttcacatcccatagcatatgcttatatgaatgctcacactctcaagtatctgtgactttcatacgcagaaagaaccatgaggagtttgaaaagaaatgcaaggaatggtgtttaggagagagaaaggataaggcatgctgtctgggaggagaagagggggaagggtggggtatgaggctgtggtctaagcagtagattgaggttgtaatggctccaggctttcagtccatcacctggacaaaggtgaacttgagttaataccctattcgaaaaaatatcccagcctgggttaactctgtctgcttccattcgttctgcctggaaaaggcaagacctgtgagagtctttaaacgtgttagctgatattttctttagattctagaaagatcgtgtcctgtagcagaagcatgagtaacaagcagacaggagctgggtgggtgatgctctaaaggtggctgagtccgactctcatttgcccaagccacccttcctttcttcctctgacattggacgctgtgaccctcagtgtctgtgacactgagtttggaggccccggccaagctatacaaccaacacatttgctcagcgctgcgtgtaccaggccctgcgctaagagcctttggaacgttagctctgtcaacctctttttcttaacatgcaagttaaatttattttcttaaaatggacgcttgtatacattaagtaggcaaaaaaatgtaaattttcggatcttggcgtgctacactaattctgcctctcaagccagacgtggtggcgcacgcctttaatcccagcacttgggaggcagaggcaggcggatttctgagttcgaggccagcctggtctacagagtgagttccaggacagccagggctatacaaagaaaccctgtctcaaaccccctccccccaaaaaaaatctgcctctcaaaggtagattagaaatttcgtttctccgggatataatttgaattttcagtttttaaaatttattcctagagaatttcaaacatgaaatacgatcattcccattcgcctcaagtacctccagcataccctcctcccccaccgacttaataaaatcaattaacccacacagctgctgctgactgaaactaccacccagctgcttgccccgactagacacagggccttgtaagcagagaaccctctaagaaagactgaacccacgttacagaatatctgttcatgtatcatttcactcatgatttgaaaggtaattgcacaacagtgcagaagccctacataaaaatgcctgcaagcagatttcttggactcctcttcatgccaacccatgagagatgttttaagacctccccatctttcaaacacaagccaggtctgacaattctctcggattgtgtctctgttagagggaagcacgcgtgtacagctatcacattagtcttcatccacttgcctccctcacattccacgtaagtgcaaaagctttggttgggctgcttcccagtcttccctctgggcctcttcgtggctcttcatgcccacttagatgcatgttggatggatggtggcttgaataataccttatctctgtttttttagagctggtctctttctgcatgatgcttgggtgtgtctccatgtatctcagttagggtttgactgctgtgaacagacaccatgaccaaggcaaatcttataaggacaacatttacttggggctggcttacaggttcagaggttcagtccagtatcatcaaggcgagaacatggcagcatccaggcaggcatagtgcaagaggagctgagagttctacatcttcacctgaaggctgctaggagaatactgacttccaggcagctagaatgagggtcttaaagcccacacccacagtgacacacctactccaacaaggccacacctcctaatagtgctattccctgggccgagcatatacaaaccatcacaccaggcattgctctattaggaatgcagttggggaccactgctagcctggagagccacgagaaaaccttaacccatcctcctgcctgcccctgcccaagaatctgccccatccttgcaggccaccatttggttgaatggtttggtaaggcgacgaagacagcctgattgtgacccaggtccacagatctcttctacttcactgaggccaagagtcactgtgaagggataaaggctggtcaccaaggactgcaagggacagtacaaagttgtgactgaaccaggcatggtggcacagacctgtgattgcaggaggcagagtcagaaaaatcatgagttcaagaccagcctggtctacaccatgagtctgtggctgcatagtgagactttgtaccacaataataaaagttctgattatgccaatgagtttgacataaaccaggactcccttagcccatgattaaagaatctaacatggttaagagtgtgtctggaatcgcttctcagccttttggctaagatcaagtgaagagtgtgtctgaaatggctccttatgatttgggggactcactaccacagtttctttatcatcccagaggcctgacttagaccattgacttagtcaatagtgggccatacgtctggctcgtggcccattctttcttgagcatagcctgccagtgagcagtgtgccgcaggaccaagccgccttctgtccttcgggtgtgaattgttaattaaatgagtacaagctcagatggaaataagatatgcttgagtgggcgggagcgttcagctggctgacagccaccgcctgcctgcatctccctcctgagatggcgtttctcaacacattgtaaggcagaagccgatctgagatacaactaatcacacgatgaagctaccgagatgggcgtggcagattttctgaccttaaaacctctgtgggggtggcccatgccaccttgggtcttcctgccgatggttcaacttggccttagcatgcggccttgctccgttaaacatacagagcaaaagccgcaattgcaggttgacgctggtgtcactgaagttacagtctgatcggtcactaccaaagtaagtttgagttttgtccaggatgcttagggaactttattacagatgtaagcaagatttccaagctcttacagacacaaaagaaactagactcagactctctagaaagcagtggctttgtgttgagcctggtgtcaccggcgcagcagtctttgcttctgtgggacagggaaagtgatgaagttcatactttgtttccaaagactcgagttctttgtcctgagaaaggtgactatctcgggtggtaacacgaagccctgtcacacacgagagtgaaagtatcaaccagagagtaggcagcacttacattttcccctcatcagaagctacatttggagggagatgtgggaggtcatgacagagctggccagcacctatacttagccaactcctttttactgttcctgttgttattatttgtattttgttgtgccttgttttttgaaatagggattgtgttatgttgcccagaccagtctcaagctcctgggatcaacagatcctcccactttagtctccaagaggctgggattgccccattagtgacacggggttctcttaattcttatgttaatcacctggcctttgcgtaattttcttggtgaggtatctacaaaatctttgactcactttttagccatgtgctttattttgagacatagtgtcttagttagggttttactaatgtaaacagacaccatgaccaaggcaactcttaaggacagcacttaactggggctggcttataggttcagaggttcagtccattattatcaaggtgggaagcatggcagcatccaggcaggcatggtgcaggaactgagagttctacatcttcatctgaaggctgctagcaggatactggcttccaggcagctaggacaggggtattaaagcccacacccacagtgacacacctactccaacagggccactccctgggccaagcatattcaaacatattcaaaccatcgcacatggtctcatgcagtccaggatttcaagtttcctgtgtggctgaggagctgtctcaagctcctgatcctcttgtctctgaccccaaagtctgggatttataggaatgtgtcaccacacctgccgagtgattggacttcttcatgtcaagtctccagagttctttctgtgtcctggattatcagacgtggcctaggcacgtatattctcccatcttttctctttcatgattcctcaaaccttttgtttatttttagccctataggaaaaaaggcaaaagtaccaaatgtcacacagacccaccccatgttaatatttttttgtcaaatctactttgtctcttatgagttctattgattttttttcttttcttttctttttgtttttgtttttttgggttttttttgtttgtttgtttttgttttgtttttttgagacagatcttctctgtgtagccctggttgtctggaaactcactttgtaaagcaggaggcctcagactcagagatctgcctctgcctctgcctctgcctctgcctctgcctctgcctctgcctctgcctctgcctctgcctctgcctctgcctctgcctctgcctctgcctctgccatgctgctattaaaggtgggagccaccaccgcttggctgagctttattgattttgctgaattattagaagcagtaaatagtgtgtgcatccccttaaatattttagcacatgtctccttctaaacgtagcttccacctagtcacaatgtatcatctttaaactaagaaacacaatataacagttcaataataacaaacagcatcctgcattattaaggttttgtgtggttctaacagtgcttttgaaactttttctgtcaggattattttttttaattttatgggtatttgcctatatgtatgtctgtgtactcctatgtgcgtgccctgtgaaggccagaagagggtgttggatgctctggaatcggagttcagacagtcttgagtagccatgtgggtcttgggaatggacgtcctctggaaaagcaggcagtgctcttaccccatgagccatctctccagcctcataatctaggacaatccctttgctttgtgtccacgttgaccagttcatattgacccaactttcctaatagttcctaatgagccacctcctatctacaagctctcggcttgggcttcccgcctcattagcattgagatcattaaatctgcaaggtcacctccatcgcttcagaagcaggccaggtgagaaagtgttgtaagatgtttgtgactagtggcccaacacagccagtagggtgacttatcttccggccccgccctcccagtgatgtgtgctcacctcttctaggttgggcatcacgccctggaaattctggatgagtttaaagtgtaaattcagttgaccaagaggtgtgaaatatcttgcaatatttgttttgttaaggcctttggaaaaacacgtttcttaaagaacagccccctctattttccttcttgtgcacttccgtgagtgttggtctattcaaactgaagggcagatttcctttggcatgcgtggttccgctgactgctggccaaggtctccatcatatgattcagacgctgtttatactggataccttaccttaattgctcggaggcactatacaggagagtctacttatttattttatgatatgagtacactgtctccagatgtaccagaaaagggcattgaatcaccttttatagatgatttcaagctaccatgtggttgctgggatttgaactcaggacccctggaagagcagtcagtgctcttaaccgctgagccatctctccagccctgaactttgtcttttaacaagctcgtgcttactgtggttttgctgcgtttgttatagttgctctcccttgtgtggtgctggaactcgaactcacagccttgagcacgctaaggacagcttactcgcagtgtttcaaggatcaggaggattaggtgaagtagcacaactccatgaagtactaattctcttaatcccccaacatcgataaggaaagtgatcaaggagatgaagcatcttgtcacacgtcacatggctaacaagtgacagcaggttcttgaggctggcagtgcaggtttagatccagtgcgcttcattcaggaatgtgccgtgcctaactaactgtgcagtatcaaagggatcaaagatgctgtttggaggcagatggcgtgccaccctgatacaggtttgacgtacttaccaaacaagtgatctacttagatagagatcaagatggaagaagggcacaagtcacgatggtggatgcctataacctcagcactgtggggagaggcacgagggttccggggaccaggccagtctgagctgcacaatgacagtttgttgtctcaaaaacaaacaaggatggagatggagatgtggctcagtgatggagatatgcctcagtgatggggtgtggctcagtgatggggtgtggctcagtgatggagatgtggctcagtgatggggtgtggctcagtgatggagatgtggctcagtgatggggtgtggctcagtgatggagatgtggctcagtgatggggtgtggctcagtgatggagatgtggctcagtgatggggtgtggctcagtgatggggtgtggctcagtgatggggtgtggctcagtgatggggtgcttacctcacatgcacgtgactctggttccttcctaggcactgcaaacacaatccagaaaaacaaaacaaaacaaaaaaaagaagtccatctttcgtaatccatcgagtgttctaagttggtccttaaaggaatcgcattttggcaactttagactccctgcttgttctggaagttcaccagccttcattcaagactctggcttgcctgaccttagagtgaaagactttatggcccaaactcaggaaggaggaacgcaagaatagtcgggttcctcttcagagcagcttccagggaaacttgcaagttaaagttcttctaataaaaataaatatcaacaaggatgggcagaccccaaatacacactttttcaggggaggattagtggcttgaaatgaacctagtcataaattagaacagtttgcacctatagacaccagtctgaaataagaacgccagtgggcagctggtgagatggctcagcaggtaaagggacttgccctgtgagcctagaaaccagagctccacctctgggtcccatgaaaggtggagggagaccacccccacacggttgcccatatcctctgcatgttcatgcactgtggcgtgcaagtctctgtccctcactatagtaatgagagagatgggggagggggagagagaacagagaggaacaccagtcaaactagaaggaccacgacatcactgccatggggagggagatcccccagtttcttctggtctcagcttccacggtagtctctcagttcttgcgatcccccaagagaagaattcaacagaacagaacacaagcagtcgtcaaatcaaatagttgagattgtagtcagaactggcaaggaagcaatgcatcatcaaagacactccactttgcaacagatggagaccgttacagaaaaccacaaccaaccagagtgcagagaacaagggagcctgtggtgcccggccccaatacatctctatggcaactcctgcatgcaaggcttgggaatcattgaagaagagggggcagaaagattgtaagagctggaggaatgagaaacgtgctttgagatgggaaacagtacccatgaaatctcagcaatatggttgcctagataagacctagacaaggatgacaccaagagacactcgaacttgaaaggggggaaccttactgagcaacactgctggacaggaactacagacaacctaagaaggctgagaatgagaaaaatagtcttccctaaggaggagcccctgtcggttatctaataccaagtgatatggtatacatatcaagtgaaacgatacacatataagcatggtagaattttaatattgatcaaagaaaaagaggccatgaatttgagataaaatacggtggggagggcttagaggttctgaagaagcagaagaagaaatgatgtaattgctttaatttaaaaagaagtttgtttgtttttaagcatatactcttttaaaaataagaggtcctgatcggggggctggtgagatggctcagtgggtaagagcacccgactgctcttccgaaggtcctgagttcaaatcccagcaaccacatggtggctcacaaccatccataaggagatctgactccctcttctggagtgtctgaagacagctacagtgtacttacatataataaataaataaataaataaataaataaataaataaataaataaatctaaaaattaaaaaaaaaagaggtcctgatcaaacagtaacgaccctagtcctgtgggtcaggacaggacctggtcctttggagccctgagctgcatagtgaccactgttaactagcttaatatcttgaccaccagtcaatcactaccattatcttaaagctgtttctcgggctgcccactgtccttcatgttgtatctttggaggctggttggttagtacatcctggatccgacctgcctgacatcattgaaacagaatgcttctgctgtataaaagggaactcccaaaggacgatacattgtagcatcttttcaaatgctacatcttttcaaatccaagaggctggcggtgtcaggcatgtgtggtccagcgtgtgcttagcatatgtgaggtcctggattcagccccagcagcaaaaaaattcaaagggacaattaagaaatctctttacatacttgtttgcacttcaagaagttgttccaacttctcattatgactgacctgtcctttaaaaaagacaggcagattatgttatctctcacccaagggaccaatacgggaagctggggctttttatagtataaaacctctagagatttttttttagctttggggatttaaaaacaagtttcctgtctctgtgagaagaaaaaaaaaaggctaggaaaaaaataaaagagaaattatgatggttgatgtgacgattttgtgtctagtttttgaaaacttttttgttgttgttgttttaaagatttagttacttattacatgtaagtacactgtagctgacttcagacacaccagaagagggcattagacctaattacgggtggttgtgagccaccatgtggttgctgggatttgaactcaggatctccagaggagcagtcagtgctcttaaccgctgagccatctctccaacccctaaaaacttgttttacgtgtatacttttccgtttgctgtgtgtaggaggagagcaaagcgggtagggggagaagatcgcaaggtgaagaagacgggatcctgtttgggttgcctctcactgatacactctcctgtgtgctaggagtcttaaccacattgaaatcagaaaaagaagatgcacccaagccaattcatcccctctctttgccttcttcaattaaaaatgtacagtcaggatggaggaatagctcagaggtaggattcttgctactaactaaccacttgtcagtacagcactcacaaagccctggatttgacgtctagttttgttttttttaaaaacaaataaaagtagaaaggccaccgggtgtggtggcgtgtgcctttaatcccagcactcaggaggcagaggcaggtggatttctgagtttgaggccagcctggtctacaaagtgagttccaggacagccagggctatacagagaaaccctgtctcgaaaaaccaaaaaaaaaaaaaaaaaaaaaaaaaaaaaggaaaggcaccaccttatcacctgttcatcaagaaataaaatggagcccagctttgatgttcctctggtctgatacaaaaacattccacccatggggacagagagtgggagcagatgaaaccccatccttcagctggcagagtctaacctgaaaccagatgtgggctttggactttggcactttcttttatggaagtactccaagaaggtccatctactctggaactgatctaggaaattgacttccttccagagcccatcccagtgggcacgttgttggcaggtcacaggggtttccatcatattgggggaaaaaaaaaaccaaaaagagaaaatccaccacctaatttctgagtagggtgtggcctcagctctagtggacctcccctgatttgtttgttaattgagtcgcttgtctgtattcagcaagtatttattgatcctctattacagtgtatgtgccaggactgtactaaggaagaatggttgccccaaattcaatcaatgcagagcaagttctaggccagccagggctccacggagaaagcctgtttcaaaaattaaaatggtgggaagggaggagatgggaaagaaaggaggggagacagcaggaaagaggaggaggttaagtggaaagggagtttttcttgagccttgaatggaagctggccacagtggtcacgctatccatgcattctggctcttcagagtgcaacacgtaacaaagactgtggtttgtggcaccgagtgggatactcaaggcaggaaggagcagaaccttggtagtccagtatgctgttgaaggatggggccctctcctaacgctataggatccatggtagataaagcaagtggcttttatgatccagtctctgtgaccactcccccaagtcacggcgacatcattttattcaatgatgggagcggtgtgtgaaacagacttgagtgtgtttccaaacactgggatcagttagtggctcgcatctgtctcagctgacctgatgccaggctcgcgagagacagctacaaacacttgtgagcgagcaaaggtgaaagtgaagctgtgtgcagggtgattgtttgcacgatgaacattgtgtctgattttatttcgaagttcatatcaggattcacaagtgagttggttcccccagccagcagcttcacagctgcttgcaacttggtctcatatctgtaggttagccaacatctttgctgtccagttcgtgtgtgtgtgtgtgtgtgtgtgtgtgtgtgtgtgtgtgtgtgtgtgtgtgtgtgactgtgtacgtgcacgtgtgtgtaaactctgaggtgcaatatctgtgaagtaattttttggaagaaatttcatagaattcctttttgtggagttatcagtgttggaaaagaggcaatctagtggttgctctactatgccaagaacagcacacatggaactagggtcatccagaccctgcaagcagagccatccctggttccacagcaccagagcacttccctatggaagtcaggaaggttgcctgcaggcccaaagtgagagggagctggggacaccaaagcaaatgccacagagcctgggaaaaagagagaatagaaaccaagaaatatcttgaatccaggtttcatttgcttggtggtaaagagaaagatttggttgttccttccaccatgtgtgccagggattgattaggtcagactcacagagcaatcacttttagtatcttgcctgcctagcttcagatctcttgagcacaccggttattaggtagaactttggagggaataaaagtatttccaattttacagggaaaataacgatcttgcttaaatgagttcttaccttggcaactaaacggttaaaagcaaatgttttgtcttccctttgcttacttggtccaagctagagagccggtgatggtggagagggggggttgaagccctttaagagggccctcgtttccaaaggtgttgtgcattcttcaggagactgcatggtttttggtctccgacttggtgccattggagtcactcaaggtcagcttcttatcttacagttagttcactctgaggtcacccatgctaagggggggattgagtttcccacggtattttattgcttttatgcttgactggtttgtcctctccccccccacccccaaactaagtaatattggggttccatttcaatagaagtctgttgtcatctgccatcctgcatgtgacccgctggcagctgtagacttgaaatcatgaacaacagccgacaaatatgttgttgacaggatgttgattcttctctctttgaccataaggaacaaggctatatatgcgcaatacaaatctgtaattatctggctttgaaaacgtgaataattacgaaaaaggatttcccggaacaaactcaaagaatcatgattagcagcccattaaaaaaaactttgtttcccataacaatgttttaactttgtaggactgaagttccacgtgaccagggttgggggggggggtaactgatttctggtgcagaaatgatgggctggagaatgtccctctccacacagcaaacccagtcatcctatagaatcctgttcctatagaagcctgtttggaagccaccgatgtggagccccacctccttagagtgtgttacagtttcctgcagggagaagttaacccttctttgattccccacaaacaacaggaccctacacacctctctattgttatataggtcacgtaggtgggattgtatttacatattactctcttcactagatcaaaaatgtaggggctgcaggcataactcaataggagaacacaggcttagcatgttggacttaattcccagtaccccccatgacgtagatcatgacttacttgtatactctgagttagggtaggtgactagatagagcggccttcaacaacttgattgagagtaaatggatggatgaatgtgaatgagcaaatgaatggagaattctgaaaacaagaggaaaaaagctgggcatggtggtgcacgtctttaatcccagcacctgggaggcagagatgggcagactcaaaaaaaaaaaaaacaaaacccacgagattgagagaactgtacatagggcgggaactattaattagctactaagtattgtctaaggatccttgcagttttactgagttgaaagcattgccctgtcatgacagagctccctacagtgttattccaattaattatgaataaatgctgaaaacgatgagtccagtgtgtggttcctccccctcggcccctcaggaccttgagtgtcccgtccctctgcccctacctgtccctgactgaacatagggctggaaatctgcagacacccattagcccatttgttgctattaaacttctttcctaggctctgaaactctacacatagcacagttatcacacatatgtgaagtgtgtgtgtgtgtgtgtgtgtgtgtgtgtgtgtgtgtgtgtgtgtatcagtctctgagactgcattaaaagagctaaacaattttaaaatcaaaaggaatttcttaatttgggcttaagagtattaaggcagggtttggctatatgaccttggcttgtctggtacttgcttatgtagctcagactgtccttgaactcatggcaattctgcctcagtctcctgagtgctaagatttcaaccatgcaccactgtgcctggcttgacttcttaactttgtcaccagcttggaaattaagcctcttgaaagacaagtctttttttttttttcttaaaatttatttattttatttatatgaatacattgtagctgtcttcagacacaccagaagagggcatcagatcccattacaggtggttgtgagccaccatgtggttgctgggatttgaactcaggacctttggaagagcagtcagtgctcttaaccgctgagccatcttctccagcccccaagacaagtcttttgttggtaggaggaatagtagaattggagtcaaacaggccacaggattcaactcttcactctgggaatcagatcatagcctcttacttggctgcgtgatcatagaagactgcatactattacctctattgtaaagtttggttggcagtgcatctcagtggctcatgacaagaaaatatttaagattacgtaaagctgagcgcccgatgtaatgtgccccaagcacggtctcggcgatcttgtttctgcccctgcttgcctgacttgcagtctgtggctgaaagggacttgcaggctttccttggcactgttaggttgggctgtggtttctggcacagaactcaatagtatcaaaggcacaaccaatgccaggcatggcaggtctacctgtcaccccgggactttggaggcctcagtagaaggcttgttagttggaggccaggctaggctcaaaacaccaaagagaggggctggagagatgtctcagtagttaagaacactcattgttcttccagaggaccagggttcaattcccagcatgcacatggcagctcacaaccatctgtaactcctgttccaggcgtccaaaaccttcctctgacttcctccggcaccagacagacaagaggtataatacatacatacatacatacatacatacatacatacatacatgcaaacaaacactcatacacataaaattaacaagactttaagaaattgccacaaaaaagggtaagaggagacaggcctcagtggaccccacgacacagcacatccatggctggggcgcagagccttgggctgaactccgcaccactggaaaaacagaacacagaaggtacagccagggtctgtcacatcagcacttgaaaacaagacctacgatttgttacttaaaacataatctccctcctgaactacaagttttgttgttctttctggttttacttaggtttttttttttttttttttaacttacatgacacccttccaggcaaccatcaattgtgatttcgctatataattgtatgttttagcacgactgttcccatgctccgatcccagaacactgtatataaacgctttgaaaatcagtgtaacctagcccgctgatcctttcaattatattctagaataagaaatgtttctatgaggttgagtttctcttcactctgaataacgagtgaaaacgttagtcacaggcacgtaagtcaccgtgaaattgtaaagtctccaggagggagaagcgcccctccctctcttcctattctctcagagttcatttgccattttatgagataatttatttttttctttccttcttccctgtgaaggtagaaacctgtgggttctcgttgtggggcagactccaaaggaacacagagtcgggattccagaattcaaatacgtggcgaatatgcacggagatgaggtaagtaccctgcctgaatgtctgagagaaactttgccagtcaggtctgagtcaacaccaggcgagaaagcctggacgagtatcatgctttgtagtcaagcaacaagggccagagaggaaattgggggagccagctccaacagcatcagatcacgtgactatatgttgggtcccctgagagagtaaccgagctgctttggtgttggggctctctgagctgcctctgctactttctgggttggtttcctgtctcctgtcgccatttaggaaatggggggggggggnnnnnnnnnnnnnnnnnnnnnnnnnnnnnnnnnnnnnnnnnnnnnnnnnnnnnnnnnnnnnnnnnnnnnnnnnnnnnnnnnnnnnnnnnnnnnnnnnnnnnnnnnnnnnnnnnnnnnnnnnnnnnnnnnnnnnnnnnnnnnnnnnnnnnnnnnnnnnnnnnnnnnnnnnnnnnnnnnnnnnnnnnnnnnnnnnnnnnnnnnnnnnnnnnnnnnnnnnnnnnnnnnnnnnnnnnnnnnnnnnnnnnnnnnnnnnnnnnnnnnnnnnnnnnnnnnnnnnnnnnnnnnnnnnnnnnnnnnnnnnnnnnnnnnnnnnnnnnnnnnnnnnnnnnnnnnnnnnnnnnnnnnnnnnnnnnnnnnnnnnnnnnnnnnnnnnnnnnnnnnnnnnnnnnnnnnnnnnnnnnnnnnnnnnnnnnnnnnnnnnnnnnnnnnnnnnnnnnnnnnnnnnnnnnnnnnnnnnnnnnnnnnnnnnnnnnnnnnnnnnnnnnnnnnnnnnnnnnnnnnnnnnnnnnnnnnnnnnnnnnnnnnnnnnnnnnnnnnnnnnnnnnnnnnnnnnnnnnnnnnnnnnnnnnnnnnnnnnnnnnnnnnnnnnnnnnnnnnnnnnnnnnnnnnnnnnnnnnnnnnnnnnnnnnnnnnnnnnnnnnnnnnnnnnnnnnnnnnnnnnnnnnnnnnnnnnnnnnnnnnnnnnnnnnnnnnnnnnnnnnnnnnnnnnnnnnnnnnnnnnnnnnnnnnnnnnnnnnnnnnnnnnnnnnnnnnnnnnnnnnnnnnnnnnnnnnnnnnnnnnnnnnnnnnnnnnnnnnnnnnnnnnnnnnnnnnnnnnnnnnnnnnnnnnnnnnnnnnnnnnnnnnnnnnnnnnnnnnnnnnnnnnnnnnnnnnnnnnnnnnnnnnnnnnnnnnnnnnnnnnnnnnnnnnnnnnnnnnnnnnnnnnnnnnnnnnnnnnnnnnnnnnnnnnnnnnnnnnnnnnnnnnnnnnnnnnnnnnnnnnnnnnnnnnnnnnnnnnnnnnnnnnnnnnnnnnnnnnnnnnnnnnnnnnnnnnnnnnnnnnnnnnnnnnnnnnnnnnnnnnnnnnnnnnnnnnnnnnnnnnnnnnnnnnnnnnnngatgttgaacatttttcaggtgcttctctgccattcagtattcctcaggtgagaattctttgttcagttctgagccccattttttaatggggttatttgattttatggagtccaccttcttgagttctttatatatattggatattagtcccctatccgatttgggataggtaaagatcctttcccaatctgttggtggtcttttgtcttattgacggtgtcttttgccttgcagaagctctgcaattttatgaggtcccatttatcaattctcgatcttacagcacaagccattgctgttctattcaggaacttttcccctgtgcccatatcttcaaggcttttccccattttctcctctataagtttcagtgtctctggttttatgtggagttccttaatccacttagatttgaccttagtacaaggagattaaatggatcaattcgcaatcttctacatgataacagccagttgtgccagcaccatttgttgaaaatgctgtcttttttccactggatggttttagctcccttgtcaaagatcaagttaccataggtgtgtgggttcatctctgggtcttcaattctgttccattggtctacttgtctgtcgctataccagtaccatgcagtttttatcacagttgctctgtagtacagttttaggtccggcatggtgattccaccagaggttcttttatccttgagaagagtttttgctatcctaggttttttgttattccagatgaatctgccgattgccctttctaattcgttgaagaattgagttggaattttgatggggattgcattgaatctgtagattgcttttggcaagatagccatttttactatattgatcctgccaatccatgagcatgggagatctttccatcttctgagatcttctttaaaaaaatatggaacgcttcacgaatttgcgtgtcatccttgcgcaggggccatgctaatcttctctgtatcgttccaattttagtatatgtgctgccgaagcgagcacaggtctcatgctttctagggaagtatttcatatcttggctgttcctccagcccgtggtgtggctgtttgtcagagcagtgctttcaggattcaagtgtggatgcacacagagttctttccaacccatcatgggatcgcgacacttagactccttagtatgagccttttccaaattagaggagatgaaccctgtttttattttgttacgcaaaatacctttttttaaaccaatcttacaaaaaaccagctggtgtcccagttttgctttctctcgtaatgataatgaccatgaccaaaagcaactagttggggaaagaggtttatttcaggtcatttaaggaaagtcagggcaggaactgaagctcacagctcccagtcttcccagcaccacctttctatggttagctccgcccacaatgggctgggccctcccacgccaatcattaatccagaaaatgccctacagccttgcctacaggccagcctaatggaggcacctaactcctctccggttccctcttcccaggtgaccttagctcgtgtcaagttgacagaaccaaccagcaagcccagcagggctggagaggctgccttcctctctttgcttttgctagatacgttcagttttctacatcccagggtgccacacgactgaggaagggttggtagctcccaggagcttcccagagtgaagaaaattgacagggcatgtataaagcaccctatctaaggtgcttttagcttttaggaatttcagtcggtacatatggcaggacgaagaacctgccggttgccaaatgattcgcactttgccatggctgaggtgtgatgcgctagtcaacgcttgacctgatttaacctcttcaagctctggttccataggacctagctccaccctttgtgacacacacagccagcccttgccaagtatgtcgcccaacccgtcctgctgaaaaaatgcttcttgcagccccagttaaaaatgcaaatacgtgctggtaagaaaggaacctgatgtggggtgcgttaaagaattttgttttgtttcctctttaatcattgtggactgtttctttaatagactttgttgctgggagtcttttccaaactgcttttaatgaacagctgtgtcacacacagcagcccagacttccttttccttttggtatctagtctatggatcaagggcccctggaatccatttttaataagagacagtgatgtgtttataaaaagaagtagaatatgttcattgggggtgtggtgaggtatgggcgaagggggtgccccagcgagcccatgccgacgtgaggaaccagccacacaactgtatagtatagaatagtttattaaaggcatggggaggggagttaagaggatagtggaggcagagagagagagagagagagagagagagagagggagaaaggagggcaggaagggagggggagagagagagagagagagagagaggccatgagcgtgtggaggttgtgggggggagtgaaagcaagagcaagagaggagcaagagaacgagcgagggggggggggccaagcagcccctttaatagtgggtcaggcctatcaggctgttgccaggtaactgtggggcggagcctagaatgctaacagacaaggagttacttattnnnnnnnnnnnnnnnnnnnnnnnnnnnnnnnnnnnnnnnnnnnnnnnnnnnnnnnnnnnnnnnnnnnnnnnnnnnnnnnnnnnnnnnnnnnnnnnnnnnnnnnnnnnnnnnnnnnnnnnnnnnnnnnnnnnnnnnnnnnnnnnnnnnnnnnnnnnnnnnnnnnnnnnnnnnnnnnnnnnnnnnnnnnnnnnnnnnnnnnnnnnnnnnnnnnnnnnnnnnnnnnnnnnnnnnnnnnnnnnnnnnnnnnnnnnnnnnnnnnnnnnnnnnnnnnnnnnnnnnnnnnnnnnnnnnnnnnnnnnnnnnnnnnnnnnnnnnnnnnnnnnnnnnnnnnnnnnnnnnnnnnnnnnnnnnnnnnnnnnnnnnnnnnnnnnnnnnnnnnnnnnnnnnnnnntgttccgagttggggatctgacacacggtcaaaaccttttatgtctcacctctggttgtggtctctgagggcctaataaagacaagttagaacctttcttccccaaattgtctttggtgatggagtttatcacaagcgatagaaaataaactaagacagcctggaatatgtgtagaccaatgttcagggtttcacgtttattaaaacaaaaccaaaaactaaaatttgtcctttcaagtgtgggcttcacagattctctctctctctctctctctctctctctctctctctctctctctctctctctctctctctctctcattctctctctctctccctattactgtcctgcattctcatgtaggcaatgtggttttggagagtagattctttggggatttagacagaattaatgattcttccaggtggagtatctgactttaagtacgtgtcagttagactgctcgcctgatcagccttttctccgcctctccgggctaacgtgaccagctatcccagagttcgtgccataggcaggacaatccactctctctctgcaaaacctgttcaacactgaaagtcttttgactaaatttatcacttgtaggtttcccctcagcgcctcaggccctgttgttttttagagtagtcttgatcaagcagaacaataatagcccatgaggaggcagaagaaatccatgtctgcaagttccaggccagcctggcctacaaagtgagttccaggacagtcaaggctacacagagatacactgtctcaaaaaacaaacaagcaacaacaaaagaataattttgatcttgtaatgggtttatcaacagtgatgtattaacaattgtttactggatgtctgatgtgccagaagctagacaagatagaccagaggagggtctgtgggtcaagaggcaaacaggttccctactctggatgaatgggaagggtggttagtgtggggactatagcccatgttagcaacaaggatgtcaagtgtgatagggccacacagaactcagatgtggaggccagaggaagtatgtaagatatttgggccagcactgaacagtaaggactagacaatggacaaatgaattaaacctgtaacaacccaaattgacaagactcgttgccacccagctgccttgctgcatagcattgttttgggttggtttctattttcttcttttctggagaccttgtctcacaatgttgccctgtctggtctagaactgactatgtagatcaggttggccttgaactcacagagaactgcctgcttctgcctcaggagcagcaggggttaaaggtgtgcactgccacacccagtgatcgatttaaaaacagcttccaggggttcagcttgtgtgtgtgtgtgtgtgtgtgtgtgtgtgtgtgtgtgtgtgtgtgtgtgtgtgtgtgtgtttgtgttctgtcactggtacccgtaatggagagtctttgtagactgaggcttgggctcatttgtacctatctggccagttccacttgtctgagttgaactaagctgataagaaatttgtcttctgccttctgagttgagtcagggttggggagtgttgggcccgccatcattcctggggaccctgatgagaggtctgagctggcgaggaagtcagtgtggttacactgaaaggagccttttcactaaatgcttaaagtttgagtatctgaggtttcacgctccaagccttaaatttaagagaaaaaggagggagggggttttatacataaaacatgactgagtagctgagctgtttacgctcaggctgcagagaatacatttgaattatatttgtcataaattacacggacagcaaatgtagcccaatgaagaaaacaacaagaggattttggttaactccctctgagacatgtgtgtgtttgcctcggccttttaaagctaaatgatgcatggttgtttctctatattcatgagattttttttttaaaccatctttagttaagccttgggaaattattttgaaatattaagacggatacttcttgggttacacatttacttcctctgaaaaaaattgttatttccttagtccatgaagacaacatggattctcttcagtttaaaaaaataatactaaaaaaataatcagagggatgccatccagtgactatcaccaaaaacggctgtcattaatattttcggaaatccctctaagcactcaaatattcctgtggaaagagaataagaggaattaaaatatctggtgaggtagggggaaaataacctggggggatggcttagcagtgcagagaactggctgctcttccagaggtcctgagttcaaatcccagcaccaaggtcagcagctcacaactgtctggagccctgttccaggggatccaatgccctcctctgactttaccagacatgtgcacagtgctcaggcatacgtgtaagaaaatcagccatacatataaaataacaatttaaaattaaacaaaaagagtttaaggatctagaataaaatatgtggtattccagcatataaaatccatttaatttagtcgaatttaatgtatcagccagagagtaaaacaagatggagaatttgatattttaagtttctttattatgtgttattatttattgtgtacttgagagagggtgtgtacattgtgtgattgtgtgtgtgtgtgtgtgtgtgtgtgtgtgtgtgtgtgtgtgtgtgtgtttgggcacacgtgtcagagggctcacatgtagaggttagaagacaacctactgggatcacttggttttgctttcattttttttaattattagttttaatttatgtgtgggccttttacctgcacgtctgtctgtgtcccacattagtgcatggtatctgcagaggtcagaagagaacactgagttccctgaaactggagttacaaatggttttgagctgccatgtgggtgctgggaatcaaacctgggtcctctggaagagcagccaatgcttgtaaccactgagccatctctccatccccgaagttctacttttaaagtaaacaaaaaaatgaacatgcttaaagaaaatgtaaataacactgtgtgtataatgcatccatgtggcagaaactggattatacgtggatgatatccaaatgattacaatccgtgatcataagaatgtggaaatcagccgggggtggttttctgagttggaggccagcctggtctacagagtgagttccagtacacagagaaaccctatctagaaaaaaaaaaatctagtttctaacctggtgcttggtttcccgtgcgccatgttcttgtctcttggaaggcaaggaaatgaaaaccaccgtgataggaacttcaaattcttttaagtctacattgttctgggttcactccttcacacacacacacgcgcacacacacacacacacacacacacacacacacacacaccaagagcagatagatgagtgcctgaactgtcaggaaagaacgcccagcggcgggcagtgagctggcacttgcccctgtgggtatacttgaaaaccagttgtctcccaaacaaactttgacctaagatatgaaatgtcgagaccccctacagggggatctgtgctttgcggagtcgttttcttattcctgacgtattaataataataaccgccgcattcctcttttgcacgcagactgtagggcgagaactgctgctccacctgatcgactatctggtgagcagttacaggaaagacccggaaatcacgcatctgattgacagcacccggatccacatcatgccttccatgaaccccgatggattcgaagccgtccagaagcccgactgttactacagcaatggcaggtaaagatgggtgggtctcccagcaggcacccattccgtccagcaagaggactcacctcacctcacagaggagcctcaccccagagcctgtgcctagcacagggccacccaggctgccatcctgtaggatgaaacatggcacctgcctagtccctctgcctctgctgaccactcctccctctgcctgctccagctctctgatcttcctcctggaacccccgagggtgctttctcagctcaggtacggtgtatatccggtgtatatccggtgtatatccggtgtatatccgtttctacccacatatattgctggaagagaatttttttgggggggggactttttttttatttactaacttatttgttttatatatatggatacactgtcactgtcttcagacacaccagaagagagcaccagatcccattatagatggttgtgagccaccatgtggttgctgggaattgaactcaggacctctggaagagcagtcaatgctcttaaccactgagccaccaccccagccccggaagagcattcttatgaaaactccttccctgaccacagatcctatatttagtccctggtgtgcttgctttctgatcttctgcaactttaccttcaacacaatttttaatatatatgtttacttatttatttgtgggacatggtatggggcatgccacagtggggatgtagtgctcagagaataacttcggggtaacgtggattcggggtgggtcttgggagtcaaattttggtcaccaggcatcaggttcctttatctcacgggcccctaatgtctaatttcttacttaatgtctttctctccacccaactgcaagctacttagagtactttatcattttagggtttttgtttgtttgtttgcttgtttgtttgtttgtttttaaatctctgttagttccccattgccctgcagagtggctctcaaccttgctgatgcggtgaccctttaacacagttcttcacgtgtgctgacgcccaaccataaattattttcattgctacttcataactgtgattttgctactgctatgaattgtaatgtaaatctctgatatgcaggctagctggtatgtgacccttgtaagagagtggttcaacttccccttccccctgaaagcggtttcaacgcagaggttgagaaccaccaccagcctagcataatatacagaccctccaaaatcggttgattaatccaagagcctaagacgtctggctgttacagtgtggtccactggtgcattttgttcgaactgcctcagggagtttagagtttctcagtgattaatatacacacatatttgcacagtttataaagttgtggcctttgccaaaaataagtaaaatctcaccactggatttctttcctccttaacttttctagcatggttaggcgcggtcacgccagccttctgtataaggtagcctgtttcagatcttggctgctgtataaggaacagtgctaggcatggtgaccagagccttttcattaactgttggttctgaaatctggcaagtttgagaagggcagagcagggtgggtgtcaatctccgggtctgagacagtcagcctggggatgtgtgtctgggctctcagtgggcctgtcacctgggttctaattgttttatggagcccacacgtggctaccagccggtgcctctgagtctaaaaggcgctgttccaagaacacaaagtcccagaacgcaaacaactgcccagcctttgcatgtgtcacagtagctaatgtctcagcaaagcaagtcacacagtaggggacgggactttagctatgattcctgagaggcctccaaagcaattatccactgaacttgaagtcacatctgggaaacacctggagacctaagcctccagtctgtgccgagcaagaaccaacccccccccccaacacacacacacacacacacaccccaataaaccctactgtgctcagcaaaaccaagcccccacacacccaaacacccacacaataaactctgcaaaatccttttcttttaaagggaaaactacaataattatgacctgaacagaaactttcctgatgcctttgagaataacaatgtaacaaagcaacctgagactctggcaatcatggagtggctgaaaacggaaacatttgtcctctctgcgaatctccatgggggtgccctggtggccagttacccctttgataatggcgtacaaggtaagtgatgtccatcccccacagccatcccccccccccataggcctgagctataagcactgcacctgtgaactttgtggtccacactcttaacttctctcactggactagaaaaagcctaatttccccaaccatgcacaatctttcttgtgattgggttttttttttgggggggggggcgagaaaaaggataataacgaatctcgtgcatgccagggggccctgaaacagacagtgtagctgagagtgctcttgaacttctgaacctctggtcctcacaggcacgcaccatcgggcagcttatgaatactgagaatcaaacccagggctttgtgcgtcctaggcaggccctgtgcaacctaagttatatggccagctcttcctggaattcttaaccagtggatgggaaatgtggttggccaccatcggggaaatcctacagccaggtgcagtttgtatcacagacttaggttatatggctagaagaaaataaaaccagaatggtgtatctttttacaattttttttttttgtaatcatgtgaacattgttgactgtttctagctcttctcaatctgtgagtcacacaccacccctttgcggggtgggaaatgaccttttcacaggggtcccctaagaccatctgcatatcagatatttaccttacgattcataacagtagcaaaattacagttatgaagtagcaatgaaaataattttatggttgtggggtcgccacccacgtgaggaactgtgttaaagggtcacagctttaggaaggttgagaaccgctgctttagactctgtagccagcacttaggaggtggagaccagcctgtgtacatagtgagtttcaggacagcagggactacttagagagactgtgtctcaagaaaacaaaaacaaaaaacaaaaaaacaaaacaaaaacaaaaaccacaaacaaacaacaactgaaaatgtggccgaggtacctgttaacccctgccaacacctaaggaaaatggccgaatcccagaaactgacaagcatggtaaagagttcccttcatttctagactgattagtttgtaagtactactactaataataataatacttgttcattaaagagtaggaagaaggtagaggaggtgttcctggaggtgggaaccaataatgtctgtgtgtgccctgactgtgtactgtctgtgtgtgccgagattgtgtctctgtgttgtacgcatccctttgtctttctaacacagctacggggacactgttgtcccgaagcttaaccccggacgatgacgttttccaacacctggcctacacctacgcctcccggaatcccaacatgacaaaaggagatcagtgtaaaaacaagaggaacttccccaacgggattatcaacggctactcctggtacccactgcaaggtgagcgcctcttcttcattctgttctccagttcctacactggaagcaccagagagtatcaaaacggccgtattcctcagtcaggtctccatcccataatatcacaggagcagtggaggtgacggatggtttggaagatgcagaggcatgttcctcgctgtccgtggcctccttctctccctatttattcatttattctatatgcgtactgcatccaggaaccaagccaagaaagaaggaagacacagacctcgccctccggtgggatgtatataaggaactgggtgacagtgcccttagagtaggaagagagatttagaaaagccacaggtgtgcgagggagtctgcagcccacagcagcagggagcgagcaatgtagatcttagaggaaggtgctacttagtccctcctacaaggacagctgccacgaagctcccaccatttatgaccaggcagtggtgaagacggtgtggccagtcttcttccagattataagagaagttggatatcgtgaagaaatgttcttcaggcaaccaagggaaggggttctggtttcccacccttgaataggatggccaggcagaggagggttgatggtgtagggcgaaaactcactcagaaggaagactattcagtggtagagcacggaactatatatactatcatttcctcttggtggccatactggggattgaatctagggctttgcacattctaggcaagagctctatcattgggttacccccagccctctttttccttttactttgaaacaggggcttactaaattgccggggttgacttcgaactttcaaatctccagccatagcctcccaagtagctgggattacagacagatcttcaccataaggcttagctcgctcttaatggaatgagtaatgtcaacagaagcccaggggtatataggaaccagggcagtctggaaactaagaatcctgaggaggaacttagggagaagggcaagaggtgtgaccttgtgctagaggtgagcagccttccctcccagacgagtcggcctggcccactgacagcaagctgcagcctgcatctctgcacacaggccactccacaggcgccttccccggctgtcacttcgggtgcatgggctgtctagtaatctagcacaaactggtacttttgtgtctgggtggcccactgccaattttgcagatgaggtaaataagcagagaccacaattgatggtgttcaggcagggagcccagctagacgcagaggcaccagaaaattccttctgcccttccagatccattcccgctcacctcaggtctctagctcctccatcttcatcactacaaagggccttctgttccctggcactactgtccttcatggtcatccataaattgccaagacagaaatccagatgtgtggaaattcccaaattgctacaagttattcgcaagtgtgcatgtgcacaaaaatggattcagagagaaattcaaattcatagggttaaaagaaagaaaagaaaaaatcttttttaaaatatttatgggctggcaagatggctcagtgggtaagagcactgactgttcttctgaaggtattgagttcaaatcccagcaaccacatggtggctcacaaccacccgtagtaatgagatctgatggcctcttctggtgtgtctgaagtcagctacggtgtacttatgtataataataaataaatcttaaaaaaaagatttatttatgtcgggcagtggtgacacatgcctttaatcccagcacttgagaggcagaggcaggtggatttcaggacagccagggtgacacagaaaggaaggaaggaagaaagagagagagagagagagagagagggagggagggagggaggnnnnnnnnnnnnnnnnnnnnnnnnnnnnnnnnnnnnnnnnnnnnnnnnnnnnnnnnnnnnnnnnnnnnnnnnnnnnnnnnnnnnnnnnnnnnnnnnnngaaggaaggaaggaaggaaggaaggaagatttatttaacgtatgtgaatatcctatagctgtcttcagacacaccagaagagggcatcagatctcattacagatggctgtgagccaccatgtggttgctgggaattgaactcaggacctctgcaagagcagtcagtgctcttaactgctgaactctttctctctagtccagaaaaaaaaaacaaacaaacaaacaaaaaaaaaacaactttgtcacaagaatctaggtctatagagattgcttaacattttgacattttctttgtggattttggttttatatatatatatatatatatatatatatatatatatatatatatatgagtatttttgccttcatgtatgtctgcaaaccacatgtgccacagcagccagaagagggagtcagcacccctggagctggagttacagtgtgttgtgagctgtgggtgctaggaaccaaacctgggtcctctgtaactgcagacagtgctcttacgccctgagccatctctctatcccttgagcattttgtttaacttaaacttttccagtgcctgttagagcacatgtgttctctggggtgggtactgtactggttactggtttgattgctgggacaaagtgcctgacagagcatcatttaccttacacttgcatgattggtagaaacaggggaaacagaggtcactgggagaccagggacagatgccacctgctagccctatcactgtggccctgcctctgccaggagcagccaaggactgagtgcccagacacatgatcctatggaagggcatttcacattcaaaccagatcagatactgtgtgtaataaggtgtaatctacttccttcaaagttactatagggctgatggtgtggcttggtggtggaccactgaactggtataatgagattctggctagagctcagtatatattacagaaagagaagaggagtggggggggggggacttcatttcatcaaatctaagctgtcattcgtataaaatataacataccaccaggaaataaaatcctctctgttaaatacacatttttcagacatgaaattttaagacacataaatccagagatgtcatatacgaaatttcatgccctgtaaaatacacagtaactataaccctttgaatttagggtctcctaatgtcaaagaattataaagcacacaagagcagtgacagctggaagccacacgcacctgtgtctgagccttcctaaagtcagtagcatcttctctgagtctcagagacatcttgtcataaagaagaccaaagccacaaggctgcaccctgctctctgccacccatgggcaggagtccctggacctgctgccctcaaggactgttcagacagattccatgagatggcataaagatcttaggaaagaatctaaaaaaacaacccctgaaaactcagtaatataaacattattattattcctctaaaaccagtgtctctgattttagtttaattaattttatagtttacagaaatatttttaaagatctgcttttttcgttttgttttttgtgtatgcgtgtatgtttgtgtgagtctatgccacatgtgtgcaggagaccaaaagaaaggggtcaaatcccctggcctggagccacctgatgcgggtactgggcaccgaactcaagtttgctgggaaagtaccagtatccgtctttccagccctacagaaatactttaaaaaacaatcatattctgctgtctttcccagcctgtttatcccactacctttttgcagtagagtcaataaactaaattttcctttttgcaatatttttaacttaaaatgtctttgagaacatgagtgccccatttacaccgtgtcctgtcctcctctgaacctcttcttaaaaacagcctgtacccacataaaatgtagcctctaccctctaaccacgcccctactcctttctagttagaatgcaatttaagggggaggggtgctcttgaaatgtaggattttaagggagggggaaatcatttcccatctctgacttaattttggtgcataactgagtttcagtcagctgcaccccagctacctcacgggaccccgtgtctgtctgatcacgtgatgagttgtgaagccccacgtgacggatgtgttaattcacagccaatgcctctttttctcattcgctcgtctcccgggcacgtgatacttggctcccttccaccactggtccttaacaaaaatgagatgtgcttgctttgcagggggaatgcaagattacaactacatctgggcccagtgctttgaaattaccctggagctgtcgtgctgtaaatatcctcgcgaggagaagctgccgctcttttggaacgataacaaagcctctttgatcgaatatataaaacaggtgcacctaggtttgtgtcctatatcttcttgttaacactcacagcgtgggtagaacctttgcgtcgagcatatacaaaacctcctccggggacttggggctggacctggttttctatgccaggactaagggtttgaattctcaacgtgttatctacagtgtgtgagagatgctaggcttagctgttcgttcgtaagagaggatgagtcacttgttttgagggcgtaaaagcccagagttcccccaattttacatatggaatgatatgcaaatctggcaaaaagatcaggaaaaccggatgtactcttgcaacatcttcaatcagaagcctagttgtagcccgctgcgtggctctgcaggtaaatgcgcctgcgccaagcctggtgccctccgttcatcctgggagcccacagggtggaaggagagacctgactactgtcctctgacctccaaactcttatgccatagagcacgggggcctccccaagacaataaatatgtaaataagcaaatgtaaaaatttgaaaataaaaccgagtgctgccggcacctttataacattacaaacatatcattggctccctccaccttacgtaatcaccgtgctgggtccttggttgttattctgacatttcagtttccgctggccttttcccgtgagtcctggaataactgaaccatcatccattaaggctctcccgatactgattctttagtaagtcactctgaattcttttgtgaagtcacccttcgtcactatcatcaaggaggtgtaacaagacatgaatatgtctctgcccctcgctgccctctctgtcgccttttaatctagccatcgggatgatgggatgatccacagagcgctgaatcagggccagcttcgcatgccatgtttaatacggtattagtgtgcagaagctgtgcagcccgataaataataagtaataaataatagcataagcatcgttggcaatggtatattgagtttatgagtccatttaattaggccgtatcaagaatatttttccacccgcctgtccctgtaatctgctgagaactcagataacagtaggtttattagcacgtcaatcctgcccccttgtggtttaagacaggaatatttttttctgactttaaaaaaaaaaaaagaaactatttcaaaatactgatgtggttgttgctacttattagaaagtcttgctccacattagtgccctgcctgctgtcagagagaactgtctctgtaggtgatgatgtcagagagaactgtctctgtaggtgatgatgtcagagagaactgtctgtaggtgatgatgtcagagagaactgtctctgtaggtgatgatgtcagagagaactgtctctgtaggtgatgatgtcagagagaactgtctctgtaggtgatgatgtcagagagaactgtctgtaggtgatgatgttagagagaactgtctgtaggtgatgatgtcagagagaactgtctgtaggtgatgagggcaaatgctcctatatagacactccctggtctctgccacgctgttcattcattgaaagagttcaccaagtgctaggaagtttgtgtgtctaagatggtgactcatctgaaaggctcagacctgccctctgtgggaaagagaaacctctgatgtagcacgcgggcctttctttgcctgaaggacagaagccggtgtaggcgtcaagctcttaggctggtgtcctgttttgaaagctcacaaaagtgttaaacgtcagtatgatcggaagttggagtaagagttctgccctgctgcatgccagcctgctctatggctccggaggggctactgggactcacagaagaattcagtctaaacttgggctctgtagtattatgggctgtgttagaggatgttctcagtgtgcgttggaaagaggatctttagattctgaggcccaggtagcttgtctcatctctaggaagcaaagcacaaaggtttcagtgccgcccctgctttccccgctctctaaggcggatctcagccttgaggctgagggctcaccaccctcagatacctaagcaaactggcctaagaaactgggtgggaagccaggcaggggtggctcatgtctttaatcccagcacttgggagacagaggcaggtagatttctgagttcgtttccaatactggctttttctctcctgctatagcagctctttctgagcctgtgggtcaactggtctctttttagtgtctgacttcaacccctgaatacacgtaaggacaaatatcaatgagactttgaacaaaaaagataaaaggaggggaaaaaatgacagggagataattttgcagagttgacctccgtagataaagtggagaggaaacttcgcctttgataacccactccagagcaaaggagccaggaattgaacccgaaaggcaccagggggccatctaggtcaggggttgtgtaatagttgagatagagactcttgtgtgaggtgagataacgctactttgttactaatatcaaaaccttcacctttcctctcagtctttgtcagaggacactatttatcatgtgcctggtgtttttctttcatgatgaataatggctgagtgtagctatttggacattgttaccattgggttttggtttggtttgggtttttttttcattcgtgtcattgggcataaataagttaccttcagatagtccagtttgtcactggagggaacaaattggaattgtgactgatgcagtttaggggagagcatttcttgggatgtaggaagccctaggttcaatccccagcgctgtgaacattgaagtcttgaagtgggcaagtctaatacaatgctttagtgtggattccagagactgcctccatggatctcaaatctggctatgtagttggctgaaaaattaaggttatttaaggcatggatttgaccttgacccatcaaaaagggggaggaggaagaggaggaggaggaagagaagagaagaagaaagttattttagtcacccaaagccttatccttcacatttgcaatcgtttattttgttttgcagtcttggggactgaacccaggaacccagggctgtgtttatggtgcttagtgctaaacagtaattctaccacttagtgccacctccgccctatgaaactctgataacattgtcatcttgtagagttgatgtaaagattcattgagaacatacacccaaagccctcagtatacagactggaacatattaattgctcaataaacattggctgcttttgctaataataagacatgtaacactgttgttataattttgctccccacttagcttgtctagtgtgaagacaaacctttgaaacccttatatattgacaactgtcttttaagttaatcatttttgttcaggtttctaaggaatccaccatcatcatgcgttcagtacagtttaatgatcaaataaacaacccggaagtaacaggaagggattattcatttctgaccttccattttgatatacactgaatagcctatagccagcaattttggctataaatcaggcttgtagctcaactgtggtctacaggcatcaaaatgaccctcctttcgtgagcgctgttaaggcaggtaatacaaggggtgtgtttcttaaatccataaaggaaatgtctttcatgtgccgtaaaacgtgttatttagttgtaaatcttgtaaattgtattattattgtgccaggacacatgagaaggacaggggacagccttttagggagtctcttctctccttccactgtggactctaaggatcgaacctagatcctcggacttccagaactgtctcactgactggaaatatggcatgtatatttcattttctttgtgccttgcaggggtaaagggtcaagtgttcgatcagagtggagctccattaccgaatgtaatcgtggaagtccaagacagaaagcatatctgcccgtttagaaccaacaagcttggagaatactatctgcttctgctgcccgggtcctacgtgatcaatgtaagtgagcaaagcccggtattttataaaatgcacagtgcccacctggggtggccaacgctaagtgggaaatctaaccatgaggacagcaaggcttggaaggcaaggttaacatcaggcctgcaataggagaggagtggaaggcagaaacaaaccaatgagggggaatcacatatagtctcgcagtgatggtgttgcgccagggaaatgttagtgatcccccaaaacacacacaggagccaatctggtgcaactcaccagggtctttattctgttcgaacaaccctcccgcccatcccccaacgcaccaccattacgcagggcaggacagttttggtggtggtggtggggagcccagaatgtctatgggtcaaggctttatagtaagcagcaagcagggagtacatgtgcaagcatctcattggaaagctcctgtggcctttaacatgattggctggtgctgggagtctatcatagacttaacttctgctcccctctgcattggtggtcgttaggcagagggtaggcttgtaacttgggggtgcagatttgttggggaaatagcctggagacactggtcctgttgagggtgtaacctggaaactctgctcttgttggggattagactagagacgggagctaggctcaggttctgttggggggcaacttggaaactaatgctattagataccagcctgttggtctacctgagttcacacttaggtcaggttttctaaaatggagtctgaatttcaaagctttggcatctcagtggcatgtgcctttgaccccagcactcgggaggcggaggcaggcagatctgagttcaaggccagcctggtctacagagttagttccaggacagccagggctatacagagaaacactgtctccgggaggaaagtcatatgttttcctaaccaagcacctaccatgttttctcaattatgtacgcatctgtgggctatagcacacttggagaagttggtaagcagctttgagggcagtttgctccttccagcatacattctagagactgaatcatgtcgggcttgctgggcaagcgctttcacccagtgaaccatccccagctcaagacggctattctaacgcgtacacacacacacacacacacacacacacacacacacacacacacacggataacctaatcaatcagcccaggaggaagccagtgtaagccaaggtgccttacaggtagccctgccagagaagtcagggcagctaagcagacaccacatggtaggagcgaaagagggggaattaggaagatgcacaaaggtgtgcctggaaatgaccccagaggaaagagagaaacactcagcagcttcagccctggcacccaggcctgcctgtgaactgaggacgatgggagatgccagcaagcaccagtgtggcagggaaccatgaatgaggaatcccaagctttaaatccaatctagagagctcttctgaaagtggcttttctttgtcattttccttgcccttccatagccactgccaaacaccatcttggcataggagctgtcagccatcttggactctggctgaagccttggtccagagcacattttactgaagaaaagacagccccccccccctgctaccatgtggcatgccacaagccccgctgctgtctcagtctgcccccacgagatctaggggagtccctgccaaccacagcattggcactgtagcaagacagcccctcagtcctacctgtcaatcaggaacttagacaggtggtgccagctgggtcccccagctccaggaacagagctaccgggtggctccagacctaccattcacttctcctggccacagctgcagatgcagatgtttgagcttctcctaggtataaattgtgtgtgtgtgtgtgtgtgtgtgtgtgtgtgtgtgtgtgtgtgtgcgtgcttgaaaacaatggaaacacttcaagccatttatgtaaagcgatgggttttttttagatagagccccaaaggcacaaaattaagatagacaaagaaaaacgaaccaggaagcatggcaaaggagccaagagcagattgtccctgtgtcttcagacctggggaaaaagatctgcaaatgacttctccattaagagatgagtttctagaatatataaagtgctcaaaaggaagccctgaatgccagcactgcccagaggcaggtggacccagtgagtttgaggtcaacctggtctatgtagcaactccaagagcaatcgcaacctacctgaagattcacaagaacaaaactagtttttaaaacaattgaaagttgtttggttttggttttggttttgggggttttgtttgtttgtttgttttttcaaaacagggtttctctgtatagtcctggctgtcctggaactcactttgtaggccaggctggcctcgatctcagaaatccgcctgtctcagcctcccaagtgctgggcttaaaggcatgcgccaccaccgcctggcacaattaaaagttttaaaagaaagtggtagaagggctccgaaggtctgggttgaagttctggaatccaccgggtggctcacaactgaccatccgcgactccagttctaggaaatctgttgccctcttctggcctctgtaagcactgcatgcaagtggtagacacgtgcaggcaaaaaaaccgctcttgtgcaaggttttgggtttggttttgttttgtttctttctttctttttaaaaaggaggggtggggagtgaagtagagttatacaccttaggtcagtggcaaggagaatgggagtaagttgaaggaagaatctactcacaatcttgatatccaataaggatactctaggcttggtccaaaaaaagcacctttaccccggcacactgaaaatgaccgtggcagaatcagtcgtggcttcctccatttagtcttttccttcactagatgctgaaccccctctctgttcttacttcattttgtaattcttggtagcatttgcaccaaaggcctacatcaagaaacactggcaactttccgggcgctatagccccggaggcgtggaccgctttcaagccacgcatgcaccgctcaaaggggtggagatctgtcttctgcgtggacctcacacccatctgaaatcactcaagtaattgtttcttgttccttctcaggttacagtccctggacacgactcctacctcacgaagcttactattccagggaaatcccagcccttcagtgctcttaaaaaggattttcacctcccgctgcgatggcagccggattccatctccgtatccaatccttcgtgcccgatgattccgctgtacaaattcatgccaagccactcggctgccacaaagcctagtctgggcgtgtttttcatgactcttttgtacgtattttttaaataaagcaaggtgtgaaactcgacttccgggaatcagggattggttactcccggttatggcaaccctccctcctgtgggactgcgattgggacagactccactgttttccttaagaagaaaaccggatgtttccaaacctggcctagagcgacctgtaacgaccaaatccatcttcagtctggataaagtggaggtcactgcttagctcatgctgcccacacaaacgccaccccgaaggagtcccaaacacttgtaagaaagttcagaagcaaaacagatatccctacaagaaaaacaatttgtctacggagagccacgtggatcagagccgcaaggacgggcactttctggtcacttgctgtgttacgacctttcgtgttatttgtagagagctgatattgtctataagtggttctccccaaaggaagaaatttctagataacgggactaagagcatttactcttgccaatggtctaaggccaaatgagagaaaatggacaaacatgtctgatgtgggtacagatgcagtggcctctgtctcccgtgcctttgcccttgccccctgcacctgatgccacagtcctacgaagatgacccctcctgtataaccccagtcccttgcctgagcctcagatgcaactccagctgctcaccagacacacccacctgactacgatgcctaggaactgcagttcatccggttgactgttgagacgccatgcaaggctgttcgattcccatatccagtcactggaagctgctgtatacagcctctccaggccagttagcgtccctccgccgctgacccagctgctgctcatgggtattttcgccaagtccgtcttccacacagaacctggggagctgggctgcccaaagctctcctgctccctaaacacaacacagtaagtgctctcggtcccaggtctggattctgattgtgtcacgtcttgtttcctgctcagtaaaactccattccatggggggttaagagcactgactgctcttccagaggtcctgaggtcaattcccagccaccacatggtggctcacagccatctgtaatgggatccgaggctgccttctggtgtgtctgaagacagcaaccatgtagtcatacacgtaaaataaataaattttttaaaaggaagaattccaagcatcgtcttcaacggggaagcccatggagttccaggtggtcaagttcaaggccgatccttcaaagaagttcctttgactagtgactttacagcatcgtggtgtggaactgctctgtgctggccttctctagcacgccatgagctctttaagacaaggatctgcttgagaaataatttctcagagtctagccaaaaaacaggaaataaatggatggggaagtgtctcagctaccgctacagacctttccagaacgctaaggatctgagtaattttgtgtaaatgcgttttatgtttggcaacattcagcttactagtacacacacacacacatacacacttttcacgtgtatgtcaaagaacaaaatccaaagataaatgcaaatgggtgagctgtgaggcttgagggaaaggcattagctgttagccaatctgccttctagaccagaaaacaaattcttacagttcgaagtaaagtgtcccctgtaaaagtaactttattctaacattagaagaagagaaagctgggcgtgttggcgcacacctttaatcccaacactcagaaggcagaggtgggcggatgtcttcgtttacacagacagaccctgtctcaaaagtaaataaattaaaagaaaaaaaaaaggataaatatcaaacaggaacattaacagtaactccgaggtgcaggtttctaagtgacatgcatttcccacaggaagtaagaacatgcggggtttgacaggcgatgaaggcttgagactctaaagagatacgtgggcaccctggtgccctttcttggtgccaaacctaatctatattttaatatcaatagtctgcatagctttttaaccgcttctaaatttggaaatagcatgagtatcttgatcattttatttaaataagcattaacttatatcccagaaggcgcgtattaatagttcaaaaagggatctgggtatattacatttgaagtatatatataagacgaagccaggtgtggtggtgaactattatcccagcgcttgggaggctgaggcaagatcgacacagctcaaggctagcctggactagccatcttagaaaagcaaaaccagtaagatatgtaagagcaaacttggttcgccatcagctggtgttctgagttctgactggttgaccctttcctaagattccgtgaaaggaaatgagctgttcgctgagctgctcatgggcctaaccggagacttggtactgaaacaacttgcaagtgcccgtgtcttaccagagactgtgccagggctttgcacagggccattgagccacagctacgtctttattttgttactttttgttcagacacagcatttcactaagctgtgtagcctgcacttggaactcatagtaagccaaactggctttggatctgcctgccgtagacgctggagtagctattacagacctggtccgctgtgtccatattcaggttacattacttaaatcagaaatatatatcaaaacccagtgtaaaaatcactaaaacagggtgaggggtgtagctcagtgacagtgtacttagcatatgcaaaggcttgggtctaatctccattaactacccccaagacaaaacataaccaggaaattattctgttgccctctgccaggtagagaaagcagaaggaatacttgggtctgtaactgttttgaaagcaatataccttactaaaggtgacctgaaaacggaaatgctggttaccaaaaaccacgtccttttcaaggaaactttcacaaagtgcctagtttacatgcgtgcccatttttgaattgagatggtaaaatcctagcacccaggcagcagaggcaggtggatctctgtgagttcaaggccagtcttttctacagagttctgggaccgccagggctacgcagaaaaacccccgtttcaaacaagcaaaaacagtcccagttttctcagactctgcctgtactaaaatggtattaacatcagatctgctttccaatgtatgagctgaagctgggttgagacgtatctgtttctaggaaaaatatacaaagccatatagcacacttattttcctattgcaacaggagtttcattctcagtctcggagggggcatctagtgaaggtttgtgagctcaattctgccttcctggtgacctcaggtacgggagagaatgatgctggattaggtgaagagcatcgggttcttggtgcctacaacagattcttcaccgagtttgttctagacttgcatcactaataagatgctgtactgtgtctcacaggccgtttaatcaaaccttaagctcacaagccaacccacagctctgtgcgagagacttcatgcgggtttttgtttaacaagcttctaagtgattcctgccattaaaagcacagaagcagaagctattaaaggtgcccaggttgagtggtggcagtgctggaccacgcctttaatcccagtactccagaggcagaggcagaggggactctgagttcaaatccagcctgcctggtctacacagtgagttccaagacagccagggctacacagaaaaataaataaattctcagattatctaagattacaacgtttgcttgggagggaccatgactacctctgagcttattttatttacattatctgattatcaataaagaatattcatatagtgaatgttgtctctttccactactgttttgtttgcaaacataacaaaaatctacaaactagaaaagactgctatatggggctagaaagatggctcagggattaagagcactgacttcttccagactcacctacactctcctctctccacctctttcttcttcctgcctcagacccccaaaccccacctgtctctcttccacacagctacaggctgcaggcatctttattcgccaatcggggataacttgggggacaagattacagagcatcatctgggtttaagtgagaatttcccagcccctggaggcaaccagggccagtatttagcaacacccaaaacctaacagtctccggccttccaccttgtggtagcctcttgtttctgtcatgatgcatactgcaagccagctgaccagcaagcttccagatgattcgcctgtgggtctgcctgtcatctctcatgctgtggttacagatgagtgccaccatatccacggtttctggggatggaatcagggcacaagacaagcactgagccatctcctccacacaagtatcttaactttaagttaaatcgcaaacatttctccgactcaaaagaaaatccattgcaatataatatattgggaaatccctaggcaaaattgcctaaagtatttaaatttgtagctattaggggctggagagatagctgagtggttaagaacactggctgctctcccagaaattctgagttcaaatcccagcaactacatggtggctcacaaccacctgtagtgagacttgatgccctcttatagtaagacagctacagtgtacttataataaataaagctttgagccggagcaagcagccagcagaggtcctaaaattcaattcccaacaaccatatgaaggctcacaaccatctgtacagctacagtgtactcatatacataaaatatataaaccttaaaaaaaaaaaaaaaaggcggcatgtagacagctgtgtggtcaagagcagcatctgctcttacagaggacagggttaggctcctagcctggaactcgggtcctaaggatctgatgccctcttccggcctcttcaggcactgcatgcatgtagttcaaggcagtgtatgcacacaatacatatacatgtggacgaattattcatacacacaaattttaaaaaggtggagagcaatggatcaatttcccagcacccacagggcagctcacacctgtctgtaactccagttccagggtttctgtcaccctcacagacatatagccataacaccaatgaacataaaataaaaatgaattataaaaagatcactgatgggggctgctgagatggctcggtggttaagagcactgactgctcttccaaaggtcctgagttcaactcccagccaccacatggtgggtcacaaccatctgtaatgagatctgacgccctcttctggtgcgtctgaagacagctacagtgtactcacatataatgaacaaatctttaaaaacaaaatcactgacaaaaaaatgtgtaagacaaatctctttcacaattcttcaataaaccatttatttgcaaataaataacatcaatgccatttctaaataaacatttaagaactaataacacacaaggtactttattgtaaatcgggactgaagctgcccaggctgccgcacccaccgcctcctattcaaatgctgtcacgtgggaggagtgttcttgttcttgtctctgaagctttaacgcaacattaatacaaagctatccttcgcttcctctaccttacagttttatgttttctatacttagacgtgacccttcaatcaaagggaagaggcctattatgaaccaggagattaatctacatggatagacgagtcatcttagaatgagttcactttatccatgttctgattcagtctttctgaatgggctggtttctaaacctagcctaagtacaggcctgaaacataggcaaccaccaggaaccacggagctgaggcaaaaaggcgcttctaccagcctcaggcttttcaacctgggacaaactgcaacacttgtgccacacccctatgacaaaaagctgaaaatgctggaaaataaggcgtgtgttttcacttacataccaccagatgcaattcatgcctttaaaactgtgtgtgtgtgtgtgtgtgtgtgtgtgtgtgtgtgtgcgcacgcgcgcgtgtgtgtgcgtgcgtgcgtgcatccatttgaagatcagggaacaactttgtggaactggttcactcttcctgggggttccaaggatcaaatgtgtgtcagtgggtgtacacagcaggtgcctttactggctgagtcttctctgcagcccacaactcacacattttagattactacagtttcagaatttcaataacttaaatatacaatccttcacatagtctttaactctttacatgaaagacactaaataaattaaatgttcttattattaacaaaaaaaacagaaatcaagtacttctgtagcccttgatgaggaaggtccaccatcatctgcaggagatggaaaggacttctcacatacacttccaaagtccttccaagcggagattatttaaaatataaggaaaatataaacagccaatgcaaattacttaaaacacaaatataaaataaacaagtgaaatttccctaaaaaggaagaaaatattcaccatatttactctccaggataaattataagtgaattttatgtggactaagacagttttctggctttaatgtataaaaataatacccatgttgtctaatttgggggtcatatagttagaaatataaaattctatttttgtgagcaggtcagctagttgaagtaagttagcacaatcatttggattggctgtctgcacactgggcagggcttgtttcttttttttagcttctttgcacacgtgaaacatgacatgaggtgtccagtcttgccgtgaacaatgcagccatttttaggccgcccctggcagatcacacatggttcgatggcattcagggagaagctagattccacactctcgtctttgtcctgcgtttcctccttcaactctttcacgctttcttggctgctataaacaatgctgctggaagtcgatggttgggaatagtcgtcactctcctgggacaggggcgtctgttcggccttctcctcgctgtcctcctcagcacatggctctttagcatcattctctgtcagctttttgccatcaggcacatccaagccttcttctgcctgagctgagttttccagtttggctttttcagagatttccactttatctttccccttatcgtctggaagccagttctcacgaagggtccagcatcttttgcagtgtgatggaaggggaggattcatttcattgcatgaggtacacttccaatagtccttcaataaaaaagacagtaactcttcagtcagtgttcatagcaaggctaataacttcaatgtggctaaggtaaaagtataccatgtagcttaattttcagcatttcatattttacataaataggcaaagaacatgaggaatatatctaatactatataccagaaattagctaatagagtagactctaggtactttcccctacacacacacacacacacaaaaggtgacctatatgaaatagtgacaggctagagatggctcaggttctgagcacacacgtggtggctcacaactacctatagtcctaattctgatctcaacattgtgttttatttctttgaagaatctatatacttacagctaaggaaatctcaggatctccttcaaaagagtctgtatcgctttctcctgtctgatagactgtgacccgatagacctagtaagacaaattcattagcatcaattcaacccttcaaccaagaagccagaattctcagtaagtcttaaaacaaacagcttgagccattaactgtggacgaagagttctgaaagaaagttaaatgcagttcaaggcaagcaggaaacgcaggataggaaaacctttactcgcaatggcaagagttgttagatacttaaaaccaaacaaaacactcaagaagacattttataaatttagagttattagacagaaaacaactagaaatgtagagttgctcccgagaaagagatactcgggtcctattggacactgttcgttgcatgctttacattggtgaaaaacaaatcagtactgagaagggaggggcagaagtaggggctcacacctttcatcccagcaatcaggaggcagaggcaagaggattcccatgagtttgaggccaggctggtctagatagccagttcagggtcagccagggatacacggtggtaccctgtctcaaaaacaaatacacacacacacatacatacataaatgggaagaccaaatggagaactttgtggtccagccattatgagaatgttcatccatcattagcagagcagtggtggcgcacacctttaattccaggacttgggaagcaaaggcaggcagatctgaggccagcctggtctacaaagcaagttccaggacagctagggccatacagaaaaaccaagtctcgccgggcgtggtggcgaaggcctttaatcccagcacttgggaggcagaggcaggtggatttctgagttcgaggccagcctggtctacaaagtgagttccaggacagccacggctacacagagaaaccctgtctcgaaaaaccaaaaaaaaaaacaaaaacaaaaacaaaaacaaaaaaaaaaaaccaagtctcaaaaagcaaaacaaacaaaacaaaaacaccccatcaactcaaaaaaagtttaaaaacattgttcaaactctcctctaagttttttatttagtaatgtgagactataataaatcaagcaaagggctggagagatgactcagaggttaagagcactgtctgttcttccaaaggtcctgagttcaattcccagcaaccacatggtggctagtaaccatatctagtgccctcttctggcctgcagacatacatgcaggcagaatgctgtatacataacaaataaatctaaataaataaatcaagcaaagaaactataaaatttcacctcaaatccacaaagcaatattctatcttgaacaaatgaaaaagcaagactttccagagactctgaatagatggcctcttcatcttactaaaaggctgacagacacagaaacccacctcatcatcctcatctgagagctcgtgcccttcgtcactcaggctgtaatcttccgagtccagagactcaacttcaaattccacgctaaactgatcagaaactgaatcctgatccaggcaatcaccagaatgctcacttacgccatcgtcaagatcctatggaggaagaatgcagcgaatgtaaatgcattgcctctgggcctcatttagagctcccgggttcatcccgagccactatttccttctcagccccagaccacatagactgggttcaaggttactaccttactcaaaagtcctacctcatgaaggaaaagtcagagccccttagccccgaggttacactcagaatgactgcattaacattttcaaatgtccagctaaacacaccctccaccctattcaatacccatgctccagccacatcttgtttcctaaatcaatccacacactaactttttctcagtaagataatctgagtttctaagccccactcatctttctttggttaaggttcccacaataccataaaaagatcttccacaatgacctttcctacgtgtgtgattatatgcacacccactattatctgaagcaccactgtgagtttatcctattaaacacaggaagacgaaggcctccctgactcacaggctagtgtgacggagtgctagtgacgacacacaaacaccaagctggcatctgggttttccgatgcagccttagttggcctggggcctcatgtgacactatattggctattacctcatgtgacactatattggctattacctcatgtgacactatattggctattacctcatgtgacactatattggctattacctcatgtgacactatattggctattacctcatgtgacactatattggctattacctcatgtgacactatattggctattacctcatgtgacactatattggctattacctcatgtgacactatattggctattacctcatgtgacactatattggctattacctcatgtgacactatattggctattacctcatgtgacactatattggctattacctcatgtgacactatattggctattacctcatgtgacactatattggctattacctcagagagctctgctgtccctgcttcctgagtgctgagattaaaagattcaacttcaggccaggcatgtggtgtatgcctttaatcctagcattcattcaggaggcagagactggaagatctctgtaggttcaaaaccagcctggtctatacagtgagttccaggacagccaagagtcagaactaaataagagaccctgtctcacaaaaatgcaaacaagagattcaacttcaaatcatacactaagttcatccgcaaatcaacttacttacaactgataaaaatacactgctctagaattcaggacacaggcattctcaatttgctaccaagatgctgcttaactgcagacacatcatttctcttccagaaaatacagtcagcttgacataaaagtagtcttttttttttaagattaatttattattatatctaagtatactgttgctgtcttcagacacaccagaagagggcaccagatcccattatagatggttgtgagccaccatgtggttgctgggagttgaactcaggacctctggaagagcagtcagggctcttaaccgctgagctttcaagttctagcctgtcttattaaatgtaataattagttgtaggatcctttaacaaattatttgaaacactatcaggcatagtgttccctgtaaataaagggtaaaactactgagactaatgttctcataagtaagttaaaacaaagcaaaacacagttgtattaaaagcattttcacttaagtttaaaaagtaacaaatttttaatatggaagatttttagaagagcatatatatatatatatatatatatatatatatatatatatatatatatattctgttttgacagcaggtcaggttctattctaagaaactagataggcagagatccgcagagaggttggctcactgactgttgggtgttggggatgtaattaactggtagaacacttgcccagtgcgcacagagccctggatttaatctgcagcactcaaaactagggcagagatgtggtagtcaacccactttcctggcacccacacagtggctccaaccatccctaaccccagttccaggggactccacaccctcctgtggcctcaaagcactgcatgcatgtggtgtacattctggcagacaagacacttccatattaaaaagtaagataatttcttaaacccaagcactacctgatgcgagggcgtctctgtggactcgctgctgctgctgctactgctgctgctgccgccgctgcacatctccctcagctcacacagacccaggctcggatcaaaggacagggacctgcggcgcttccggtgccgctccccaggtagctcatctgtgttctcttctatagattaaaggacatggggttaaaactccctgtactgggactgatttgagattgaaatatcttcagcacctatttgcaacaaaatttaatttcaattatattaaacagagaagtgaaccattaatgtttcaaaagtcagcagtgtttcattggatctgttcagctacacataagctctacttctaagcttgcaaccttctttgtggacgttacctccacaagttactcatttaatcctcctagtgctt

SEQ ID NO: 230 - DNA, 2362 bp, Mus musculus
ccggcgggcggagacgcgcgcctggtactggacatggaccgcgcgcgcctgtggctggggcttctgctgcccgtggtggccgccctggatttccgatatcaccaccaggaagggatggaggcgttcctaaagagcgtggctcagaactacagttcgatcacgcacttgcacagcatcgggaaatctgtgagaggtagaaacctgtgggttctcgttgtggggcagactccaaaggaacacagagtcgggattccagaattcaaatacgtggcgaatatgcacggagatgagactgtagggcgagaactgctgctccacctgatcgactatctggtgagcagttacaggaaagacccggaaatcacgcatctgattgacagcacccggatccacatcatgccttccatgaaccccgatggattcgaagccgtccagaagcccgactgttactacagcaatggcagggaaaactacaataattatgacctgaacagaaactttcctgatgcctttgagaataacaatgtaacaaagcaacctgagactctggcaatcatggagtggctgaaaacggaaacatttgtcctctctgcgaatctccatgggggtgccctggtggccagttacccctttgataatggcgtacaagctacggggacactgttgtcccgaagcttaaccccggacgatgacgttttccaacacctggcctacacctacgcctcccggaatcccaacatgacaaaaggagatcagtgtaaaaacaagaggaacttccccaacgggattatcaacggctactcctggtacccactgcaagggggaatgcaagattacaactacatctgggcccagtgctttgaaattaccctggagctgtcgtgctgtaaatatcctcgcgaggagaagctgccgctcttttggaacgataacaaagcctctttgatcgaatatataaaacaggtgcacctaggggtaaagggtcaagtgttcgatcagagtggagctccattaccgaatgtaatcgtggaagtccaagacagaaagcatatctgcccgtttagaaccaacaagcttggagaatactatctgcttctgctgcccgggtcctacgtgatcaatgttacagtccctggacacgactcctacctcacgaagcttactattccagggaaatcccagcccttcagtgctcttaaaaaggattttcacctcccgctgcgatggcagccggattccatctccgtatccaatccttcgtgcccgatgattccgctgtacaaattcatgccaagccactcggctgccacaaagcctagtctgggcgtgtttttcatgactcttttcctctccaggccagttagcgtccctccgccgctgacccagctgctgctcatgggtattttcgccaagtccgtcttccacacagaacctggggagctgggctgcccaaagctctcctgctccctaaacacaacacagtaagtgctctcggtcccaggtctggattctgattgtgtcacgtcttgtttcctgctcagtaaaactccattccatggggggttaagagcactgactgctcttccagaggtcctgaggtcaattcccagccaccacatggtggctcacagccatctgtaatgggatccgaggctgccttctggtgtgtctgaagacagcaaccatgtagtcatacacgtaaaataaataaattttttaaaaggaagaattccaagcatcgtcttcaacggggaagcccatggagttccaggtggtcaagttcaaggccgatccttcaaagaagttcctttgactagtgactttacagcatcgtggtgtggaactgctctgtgctggccttctctagcacgccatgagctctttaagacaaggatctgcttgagaaataatttctcagagtctagccaaaaaacaggaaataaatggatggggaagtgtctcagctaccgctacagacctttccagaacgctaaggatctgagtaattttgtgtaaatgcgttttatgtttggcaacattcagcttactagtacacacacacacacatacacacttttcacgtgtatgtcaaagaacaaaatccaaagataaatgcaaatgggtgagctgtgaggcttgagggaaaggcattagctgttagccaatctgccttctagaccagaaaacaaattcttacagttcgaagtaaagtgtcccctgtaaaagtaactttattctaacattagaagaagagaaagctgggcgtgttggcgcacacctttaatcccaacactcagaaggcagaggtgggcggatgtcttcgtttacacagacagaccctgtctcaaaagtaaataaatta

SEQ ID NO: 231 - protein, 494 aa, Mus musculus
PAGGDARLVLDMDRARLWLGLLLPVVAALDFRYHHQEGMEAFLKSVAQNYSSITHLHSIGKSVRGRNLWVLVVGQTPKEHRVGIPEFKYVANMHGDETVGRELLLHLIDYLVSSYRKDPEITHLIDSTRIHIMPSMNPDGFEAVQKPDCYYSNGRENYNNYDLNRNFPDAFENNNVTKQPETLAIMEWLKTETFVLSANLHGGALVASYPFDNGVQATGTLLSRSLTPDDDVFQHLAYTYASRNPNMTKGDQCKNKRNFPNGIINGYSWYPLQGGMQDYNYIWAQCFEITLELSCCKYPREEKLPLFWNDNKASLIEYIKQVHLGVKGQVFDQSGAPLPNVIVEVQDRKHICPFRTNKLGEYYLLLLPGSYVINVTVPGHDSYLTKLTIPGKSQPFSALKKDFHLPLRWQPDSISVSNPSCPMIPLYKFMPSHSAATKPSLGVFFMTLFLSRPVSVPPPLTQLLLMGIFAKSVFHTEPGELGCPKLSCSLNTTQ

SEQ ID NO: 232 - DNA, 135827 bp, Homo sapiens
  misc_feature (1)...(135827): n = A,T,C or G
ctcatgtgggctcatcttattctcatacccaagctataaaatattcaatgcatgcattttggtttactcttctgtaagaagatggtcacagatgaaagcacactacaaaattttataagacttttctgagaagaaactgaaaaactctgcccagaacttggggtagctactcacagattacttgttggggtagagagagttacttaagagcgaatagcataaactctggaaatatactgccagatattatgaggttatcctaataacttcatatatccaatatccaatggtcccatgatgatgggggtgtctgctgaagggaatgagcccttgtcattgggaagaggtcagtttgagagtagggaacagagactctggaaggagcttatctggtagtggtaggaggaatattttctttgctctagatctggccaatgcttggcagtctcagggtcatgcaattgccggaagcatttctgttggtggagggtggctttccttgtccctgggcgattacctgtaagagaacctgggaccgtgccaaggaaagggtctcgggttgggtcctgactcggcagtgcgtctgaatcatgctctgtgccacgtgtcctttcatcatcagtacagtctgtcctgcattggatcagggaggggtccacatccacatctttgtcaggaccatgcagggaaatgctggaccccttccctggaggtcaggtgatggtgccaacagaggacaacagggctcagcagcagccagagtactgcctaggggtgttaccttgtaatatgaaaagaagcaatatctccctcttggttgtcacgagatttagaggaaagatgtgcaaagtgactggaattcatatcctcattcaacgtttattcatctcattacatggtgtagttacttcacgccaagctccaggcaataggaatacagcaatgagggagctgggtcaagtcactgctctcttagtttatatcctcttgagaagtggggacagacagtaagaagataaacacactgtcagggactgagatggggatttgggtgcatgtgatttattgaggatgttctcctcaggaaaacctgtaaaggatgaagaaatcaggatggggaaggggaagaagccaagcagaggggtgctgtggaaaaatctaacctgggcctgatccctgggggccctgaagtgcaaatcacaccttcagagttgtccttgaaagcaacagtggggagcttttgtacccgtctctgtcagtcattggccaccccagggtgttgtagtagcctctcaggtaaagaggctccttaggcaagagcgtttcttagaagaaggccatgggtgtaaggtgttagctgctgcgtgcccaggagtggggcacacgggctggttatgggtcatgcgcagagtctcaacaacatcagctacatctcttcataaggggaaaagtcaggcagtgggaacttctaggagagaatggaaattcagcgacagcagagggactgtaccgttgctttagactgcgtggccatgaaatgggcagattcagattttatagattttgagacttacaatttggaggtgcctttttaaagtaaaagactgtgaaatcatgaatacaaagctagcacaaacatgaaaatttattcaaaatgagaagacaaagaattacaaataaaagctaagaaataagcatcacaaaatccagaaaaaataattaatatttaattaaagttaataaaactttctgacatacctctacaataccttttcctacattatttggccatatatattttgattacctccttatatgataatggcttggtatttgctttttattaagagactagaaagacattttggtctttcccttaaagtggtaaaccatttgttgttaatacttctcaaaagtttttcagcttcacaacttgttatttggtaaaattatgtgaattttgaggatgattatcaagattgggaaaccctcaattaagcttctttcatatatgagctataagctttgaaaagatgccccacagatagcttctgactccacacatttcaaactcacttttgccaggcacagtggctcacacttgtaatcccagttattagggaggctgaggtgggaggatcctttgagcccaggagtttgagaccatcctggacaacatagtgagatcctgtctcttcaagcaaattggtcgggggtggtggctcacgcctgtaatcccagcactttgggaggccgaggcgggtgtatcatctgagttcaggagtttgagaccagcctggccgacatggtgaaatcccatcgctactaaaaatagaaaaaaaattagctgggcgcggtggtgggtgcctgtaatcccagctactcagaaggctgaggcaggagaatcacttggaccctggaggcagaggttgcagtgagccgagatcgcgccattgcactccagcctgggtgacaagagcaaaactccgtctcgaaaaaaaaaaaattttttaaagaaaaagaaaataaaaataaaacaaactcactttcctcccatactatccttgtcttctggtgctgggtgttgtaggacattttcatgttgagatgtctttgtgtgacgatagcaggtggtcggcagtgagtgatgagtattccaggaaatcattactatacaagagtaccacacaaggaagtgactgcaaaccacttacatacttcccctcaattcaatgaacccctaaatcaacttcccctttgccaggtcctccaaaggcctatagccactccaatgccaatggaagagaggcaagaggtagagaaaattggaataaaaagagagagtagccttaagttttaactgattgtggttaaaatattttacttttgcaacatttacaaaaacacacatgcatgtgaatagatcactagagtccctcccagaacttacaaaggacccctgcaagtgaggggctctgaaatgtaagcctcattgttttcaccataaatccacctctgtcagtgagggactgtttgaggagatgacatgtagctgaaagcacttagatgacattcagtaagttattattaattggagactcatggtaaatctactgcagtctttgaaagcagagatctcttgctccatcttgagtctcagactaacttatacaaggacaggaagacagcacttccccaggaaggcctctttaaaaatagaagctgccagtgtcagagaccatcccaaaattaccgcactttggccatccatgcatacagggaatgcacagtaacagtctgagtgtctctgcagcattggttggaatctataaagatctgaaatcaatgccttgtttgactgtgatttgcatcctctttttctttgctggctctgggtctctgggggaaggagtcccttgtgcctgccaggtgctcttgattagagtttggggctcccagcattgtgattatttgtttacctgcctatctcctttgcaaaagtgagctgtgccaagcaagggccctatcttatttatgcttgcatccccagggcctagcacacagcctagcacacagagggcactccattcatgtttccagatgaatacataattgcctatccagcaatgtatgaaagaaaaaaaatatcattccacccatttcttgatttcatctcaaattctccaaaacaggtaagttaatactttgtacaatttggtcagtaatgcaatgtttgaccctgaatcacttaaaaatatttctgtttttcaaatcatttgcagaaggcatgagcgagtttacataaataattttcactctttgatagaaagcattcacaaaatcaaggagaaataacatacaatatgcagttttcactctgggtgctctgcactggaaaatgcaacagattctctttcttatttttgagaaggacaagagagctgcttgtctagaatcactgttccctttgtcaataaataaaaggcccttgtatttgcaaggatttcacatgatgttaccaaaaaaaaagaaagaaaaggcgtgtaaagttttccatagcaagtgtgctcaccaaatttggctgtaccgcttaattacagaggacccagagggaaaacccagagttctgtgcggtgctattagaaaggcttcagggtgtctgggtgtcttttccttggggtctcctctttcctctctttcacaaattaaaaaaaaaaagttaattaaagctgaacagttgaagctgatttccaagggactgacaacatctgacaccaagctgaattaatagcagagaaaatatttttttcctgtattgaaactaccaacagtgtttagcaaaagtgatttaaatcctttataaagtttctagagttcttaaataaacactgtactaagataaaggcctagttaattccaaatgtttcaaagaggttaaacaatataaatactttcttaaaagttaaaatcgagatgaatctcgaaactagtaaatgaagattaactctggatatttagaaaagatctttatctatcaaatatctatgtttgtaagacaagaagagccttggtttcattaaggaaggaatagcaggggctggcaaatggaattttattaagtaaaggtcaatccacatagcatcagatgatagccctgtcaccaactgccctacttctatggataatttttaatgatattaaaagtttttgtctaactccacttagctatttctgcccactgttgtactatgtatgtgaaaaccctggcatcagcctcatttagctctgctaaaagaagttagttcttattaatcattaatagcttattgaattgacatttgcactagcaagaatgtgaaagaaagaacacagagtaagtatgtgggctacaggggtcaggaaggttgaacacataaaatggtttcctaagagtggtaaaggcagctgtccctgggagagatatcctctccctgggtggaacttgtagaatgaggtggttctggatgacaccctggactgtggtcatctcaccccagtcatgccatcttgaaggcttttcaggtgatgccggatcaccttctccagggtgtgttctcttctctctcaatgtggccttgcagtcgtggtcaaacccatgggctctgcaaccagactgaggtccattgctcaattacaatttcagctgtgccacctaggagggggtacttttttgtttatacatgtctgccccattaaaatgtaactttcatgagggcagcaactttcattcacagccatagaagagggctcagttcatggtgggtgctcaatacttaatttaaatttattaaaagaataaatgaataagtgactgagtggatgaagtgtttaacctctctgggcctagttttctcatctgtaaaacgagggtaataacagcactcagtatgacatctacacaggtagcaaccagtgtcagaatgcagcaacagggtttacctagccaaggggtcctttatattcttcctgtttagggagaatgtggtttcaggatgtgcagctgctggcagaagggtgaaagctaaagcaaccgcaggtgggtcctgttatgcgttgtttaatcatgctcacttggaaactcactctgctttttcaaggagatttggtcatacagatgaccttaggtcatgctgttatttttgttttcacaggacagccatttatatttaatgaaataaaagaaactcaaataatgtataattgaagaaggaagaaggataggagcaagactttccagttatatctcatggctctcattctcatttcacctacacgacttgggtaggaaagtatttttagaattcagtatgctcagttgcaaaataagtgtataaacattggtatctttcctacatatggctctgttcggttggaaaaaaaaatgaatatcgttttgcaatagcaaaactaaatattaaatacccatgaataaacttaacaacaaatacaaaggcctatgtaaagaatcctttacaattttactcagagacaaaaaaggaaacaatcaaatgaagtgagatactttatttctggatgaaaagattcattgttataaaggcatcaatttccaagtcaatttataaatttaatgtgaaaatttccacagcgtatttcttggatctattcaaaataattttaaacattatctgaaagactaaacttataaaaataacccatatcatttagaaaaatcagaagaatatggttaattatttaatgaaacacaccataaagctatagtatttaaggtataataaataagattgctagtcatgacctcctaaattatttcatagcctactaagggtcatgaactgcagactaaaaaacattggtttataaatatccaaaactgagcagtttcgttaaatatattataatatactcataatgcagaatatatgccattattaaaaataatgtggtagaactatataggtatggaaagatgtcgacaacgcatgggtgaaaaatttactagaatcaccctattttgaaaggaaaaaatatcatatatttttatatatgcagagaaagagcatatggacagaaaattaccaatatattaacaatagcccatttgtctgtagctgctgggtttatgggcaagtgtaatcttctttttactctctgtaatcaatatgcattagtacttaaaatatgaattttaaacattttagactgttacataatacatagattttgttcattattttcaggaaaaatgcagatttggtccttaatacataattaatatccattacatgattttttagcaaagatattataaagttatagtacttagagtataataaataagtttgctagtcatgacctcctaaattatttcatagcttaccgaaggtcatgaactgcagttttattatattttctgtcattttctttgacagaagatacgataaaatgaaacattcttgatttctttaacattaaatttacagcagtaagcaatcctcaatccaaataatcacatttttagctgcaaaataggaaacacttcttccaattcctgtcatagaacttctctaagaataaaacagctgcttagctatcattgcctttaaaggaaaaaataccatcattaaactgctgctttgggtatttgagtcgaggtgctctagtggctattgtaacactgtgcctcctgtcacgctaccaacctgctgggttgagtaggccatccaggcttagagttgtctctagccaagaacggtagaagtcaagatttatttatgctggggctgctgaataaggcagttactcatgaggacatttttaaaccggtacaagtaaacccaagcaacctttaaggggagaagtcacaaacaaacacattaagtctggagttggacatgtgtcttggaagaagagacatgggtgagggaagatgatgcttgcagatttccagtgtgcacctccctctttagctgtggctggtaaacttacctgagtcattgattttctcccctctagatgccgccctgaatttcacttttgtctgctttcataattgagtgaccagaataacagtctgtcaaccattccacaaaatatttgcctcaagtcaaaaatatcctagaaaagagttgttggtgaatataaggccaatttcatgctctcttaaaataatgacacttccaagggtagaaactgaataagtttcatagttcatgtctcttgttctagacttctatatcaggaaatgttataattttcaaggcatatagattcagtaaaaaaaaaaaaaaaaaaaaaaaaagacagagagaaagaaaagaaagcttgaactcgggaggtggaggttgcagtgagccaagatcatgccactgcactctagcccggtgacagagcgagattctgtctgaaaaaaagaaaaagaaatgttacaatctcactgttttcggaattcattcattccaaaattttgtgcatctataagttgaaagaactagatgagatgattttgaatagaagtactgagtgagaacattctctagcacattatctggcaatatgggatgttgtaatacaatgttaacagtatacggtgtaaagataccaatgtatactgttaacactgtaacagtacacattgcctcataatattaaaaactcttataaacttcatcttaatggcagaataatattctaagatgtgattaggaaatcattttgcaaaccttgtttccaatatttttgttattttaaacaatattatgatttctaactttatgaaaaaaacattttccaaatttcaggtcatgcctttaggatagatttacaaagtagaattaccataataaacattttaaggttacattgcaaaattattttctaaaaggcttgtagcaattttcatccctacctgcaatgtatcaatagccacttccttgtttcctcattcatattaggcgtctcatttacaaaaatgaatacataaaaaacaattttataaaatatttgatacattaataagttaagaattttgttcactgttgttttaatttgtatatatttttatttacagtgagattaaacacttttccatatgttatttggtcatttgtatttcctcctttgtgtattgttgtgcatgccttttgcctgaaaaggaccatttccttttcagtaataatcaacattaactaccatgatgactactatgacaggagagttgattcagcttgggcttgcggggaggaagcaacagaggtctgtctgctagaaagtgacctttgagtggatattcaaatgatgatggtgggaagtagagagattgggcagtagctttcctggcagagggacagaatcgtttgttttgaggcaggtctgacctgtgagtccagggctgtccagagaataagaatgctggctctaagggacatggacattctggtcaaatgaagaacattttcatccatgctttgatgagacagacctcaaactactatcatactactgtgatacaatagatgatgactactatgatatgattttttttcattcctagacaatgtagtataatataatctcatatcaaaactcagggtctaaaaccttctcccgtctaaagtgctaccttatcataaaataatgaaaggttttaagattgctaagaaatgtaggctgggtgcggtggctcacgcctgtaatcccagcactttgggaggctgagacgggcagatcacgaggtcaggagattgagaccatcctggctaacatggtgaaacccagtctctactaaaaatacaaaaaaaattagccaggcgtggtggcgggcgcctatagtctcagctactcgggaggctgaggcaggagaatggcgtgcacccaggaggcggagcttgcagtgagcggagattgtgccactgcacttcagcctgggtgacagagcgagactccatctcaaaaaaaaaacagaaatgtaatgccctacaaatttattataatcatttcttgccaaagacattttcatttatgctgatacttcaaatataaggactttttaatttcctctttttcctaaatgccataaaagtaattgtaactaatatgttgggccattaagaaattttatttacacaggataaaattcctttatgaatgaacaaaatattttttaattggattacattgtggtccaaaagaccttaaaaaataaaagaagctgaatgagctgaaactaattcttgatctattttcagccatcaatagaactatcgcaaaactttcaggacatacttatggtgtcatagggaaggcagtcattattttgttttcataagttgggtattttattaagtaaaagcactttaaatcagtgcttttgaaagtgtgaatcatgatcatgaccattagtgagtcatgaagttagtggatcagactggcttttttttttttttttttttgagacggagtttcactcttgttgcccaggctggtgtgcaatggcgtgctctcaactcactgcaacctccacttctccggttcaagtgattctcctgcctcaacctgctgaatagctggtattacagcgacacgccaccgcgcccagctaatttttgttatttttagtagagatggggtttcaccatattggcctggctggtcttcgaactcctggcctcctgtgatccgcccacctcagcctcccaaagtattgggattacaggtgtgagccactgctcccagtcttttttttttgtttaatgaactagaatggaagggaaaagaaaagagcattgcaaggtaagtattaccttgcaaaagaaaaggtaagtattacttcaagtggatgtgccacattgctacataaaatgcattcctattgtaagactgtggtcaaactggtttaaaaagcactggaattcaggcatggtggcttatgcctgtaatcctgccactttgggaggccaaggcaggagaaaggaccacttgagaagctcaagatcactctgggcagcatagtgagactctgtctctacaaaaaaaataaaaataaaaatatataataagtaaaaattagtctagcatggcggcacacacctgtagtcctagctactcaggaggctgaggtgaatgaattgcttgagcccaggaggtcgagctgcagtgagacgtgactgcaccactgcactccagcctgggtgatacagcaggaccctgtctctaaacaataataataataattgttttttaaacattttaaagcactagactttacataatagccggtacacttcttatttttaagaagtcttaaattattctatcctcaccccagcgattactctccattaacattagcctttaataaggtaaatttaaagttaaatgtgctgctaccatgtgttaggcactgttctaggccctgaggatgcaatggtaataaattgggatcctagctctcatacagcttccataaagttgggaagacagaagaaatatatgaaatacagagtcaagttgttctgcaagcaccaggaaaagaagaagcataatggcaaggcaatgactcaggtgcaattttatgtaggatggtcaaagaaggcatcattgagaaagtgacatttgaacagagtccaatatttaagtttttaatctagcatttttaatgttattttaaatttaagtgaacattttgataaataatagctaacaactgctgagatttaaaattttataaactatttcattccctattatgattcttaactttttgttcatttgcatatttagtcatttactcaacaaatatttattttgtgctcaccaagggctggccactgtactgagccttggggattgagctgaggaaaagacaaacttatttcttgctcttagaagtgtctggcctcctgaggtgtacactgaggcaggagaattgcttgaatcctggaggtggatgtttttgtacactggtgtgtacaaaaaaaaaaaaaaagaaagaaaagaaataggcaattccaaagtcataagtgggtcatgggttaaaacagattgcagttcccttcttggaagatcagagaagacttcctggagcaataatgattaaattgagatatagagggtaaaattaaattaaatttcaaatttttgcacacatccgcattttaaattttagttgaggccataggcttttagtggtgcttaataagaaactttgagttgtgaaaaaagtacttttaacttcactagattagtcattacccccgatttaaaaaatacagaagtttagagaatgtttacatgcttgttaccattaaatttacattaaatctataatcattctgtatcttgtaatcataaacttagatttccctctatttactaagaagggcaaagagtgtccctgtaatattcagaggtatgtttttccagtttgaagggctgttgatttataatctggagactgcaaatgttcgtaccgcagaactgcagtctacactgtcgaatgttgttgtagagaatcgtgtttgttcacttgaggttgcaaactgtgtttgtcacacgaggttaaacttgctcaccaaccccatgataattaaccagcaaggcctcactggtgttgttataatgaactcaaccagtataaaggcctgtgggttttcttgacataaggaaagtatttgaagctttttccttgtatagtttatgcaaataaaaataaataggtaaggctaagccaattaatttcaagcacaaccccaaatctcattcttccgcagaagctggcacgcaaggtggagcagaagagtctagttttctagatcaagggaaccgaatacagcagaggcctcaaggccaaaacaggcaggtttatttcaggaacttgaaagtagttcagatgcgaagcttccaggtgaagagggcaggttgaatagatcatgttatctctctccctgacccaaacttaatccactaatgcaatgccctccaaagatggcatttcataactaccaccacccaatttttgtccaaaagcatttatcactctctaatatactatatattttatttcgttattttctgcccccaacccattcccacggccattagaatataagctgatggagtatagtaattttgcctattttccttactaaagctccagattgaggatgggggagtaaagactgattggaagttcaaagctgaggcttattaattttgacctttactctaggtccaaggtgctttgggtagactattttttgactcccctcatccccacccttaacctccatgtcagtatttaaaagtatttccctttgggctggttggaaatttcccagagaagagtcttccagcctcttgcctggagggtaaggtctgggaaactgtcagattctgggagctgagtgggagacaggtctggagtacctgcatcatgggcattaaaatgcaagcagccgctacacctatgctttccacagagggtaccattccttcacctatgtctggtatctctcactccagagactctattttgccctctctagaagataaacctccagtcttcaaggggctatagcctcagccacccagtgatctggagtggggcaagaggtgagagagtccagaactccagaacataaaagccagtctgcctgccttcctgggagggtaaaggagaaaatcacctttccttatttcattgatgactctgatccaacagtgaactagttccaagtatatttctattttaaattattaatctacaccctgtcacattagctaacgccaatgaaacccagggaagctcattgctttatgatccattaaaagaaaagagctccacctgccttcataaacatttgttctctttttgatgtgctttttagggcatactaaataagaggcccatgataagacattaaatgttaagctaagcattgacctaaagtctgaatctgggttcccaatgtggggagaagagtttgggtttaaatgtttgacatattacacttgtacaacattcttgtagcactttgacaagtatactaattatatttctgatggcattatgaaaaatttgtattatctgtgtttaaggaaatatttgtgaatttgaggagggtagctcattctccccacccccataacccaggtttccaaaccttctctgaggaggtcagaggaattagaaaagaaacctagggctgggcacagagctcacacctgtaatcccagcattttgggaaactaagatgggcagattgcttgagcccagaagttcaagaccagcctgggcaataaggcaaaactccatctttacaaaaaatacaaaaattagctgggcatggtggtgagtgcctgtagacccagctattcaggaaggctgaggcggaaggatcacctgagcccacggaggtcaaagctacattgagccatgatcatgccactgcactccagcctgggtgacagaaaccttgtctcaaaaaaataaaaataaaaaagaaacccatttacttgacaatttgcctggggatgtttctgcacagcctcaacctttgctcagccctggtcctaagatctcttttgaagaggtcccatctgaactaaaagtctactcaagtctttcactacttaaggtccaggacttcagctaaggacacctgttatgaggtgaaagtattcatagcttcaactgaaaaaagttctaagtctttcggagaagctcttaaataccagtagatattaatgttgctctgtttcctatcacagtgacagtctacatgacgctgcaccttactgcaccaccccgtactcacccagggaagcagcagaagtcagaatattagtcattagcttcagcagacttattattaacttttctacatggcctttcagactcaggagcaaatttatgtccaagttagctcagttcaagacatagaagcaaaaagctgattatttgtcctgtcttctctttctatctatgcttccaacttctgctagtccccttcaacagtctggctgataatggttaggccccattcatcaactcaaatattaagatatggctgttcacttacctaagtctataatatgctccatatggatctctggcttcagacatcccctctctttcttcttcatccttctactccaaatgaactacaccttctcttcttattaatatttaggacaggagctgtcttatgtaggataggccttacttatttcctttacacaaggcaagcagaagcctcacatatgactgaagtcacatgtatttctgattaaagaaaatgaggtaaagggaaaaggaagcaaaggaactcacaggaacactggagttccataacaccgcatattcagtatgtttatgaaaagtttatggactccattaactctagcatatgtatacaaagatttcatttgatgaacttcattgatccatgaagtcatatcagcaagaaaactgtccttcaagatcaattccttctttgctggaccttccactaattctcctggttccaagctaccaagttgcaaatgagttgcaatgacaagtgaagatcactatttagccagcatttgcagatggggattctggaactctcagatagatgaagacacccttctgaaataatggtcgattatttacttaatgctggtttaacttgcttttttaacctggcagccaaaacacagtctgctgttggtaacaatggagaaattttattcagtagaattccttttagagagagcactgcacttgtttcaaattaatgtcttgataagacattttgggagtacttttaaaaagcctaacaacccaagtgtccatcaatggatgaatggataaacaaaatgtggtgaagggaaccagaatatgacaccccaaaatatgccactttggcataagaattattttgagctgaagacaatcaagaaacagcagacagaaaacaaaaaacaaacaaacaaacaaacaaaaactctctgccctccccctatctggctaaaagcaggacatgactttccatttttaatggaaaaaccaaagtctgcaaaacagtttaaagagatttttcagagccaacatgaagggccatgacctggagaaaaacaaccttaagtggtcttgagaaagtgcgctcatggccaggcacagtggctcacacctgtaatctcagcactttgggaggccaaagcaggtggatcacttgaggtgaggagttcaagaccagcctggcaaacatggtgaaacactgtctatactaaaaatgcaaaaattagttgggcatggtggtgggcacctgtagtcccagctactcgggaggctgaggcatgagaatcacttgaaccccggaggtagaggctgcagtgagccgagatcattccacagcactccagcctgggcaacagagggagactatgtcaaaaaaaaaaaaaaaaaaatcagagaaagtgtgtccaaagcagtcgggttatagtttggttgtatacatttcaaggagataggaattacagctaaagacataaatcactttatggaagacaatatcggttcagcccaaaaaggcaggacatcctgaggtggggagaagagcacttacaagtcataggtgggttttggggattctttagttggaaattggttgaaaaaattaagctttgtctaaagatttgaagtcggtagaaaggaatgtttaagttaaggaggttcattacccaatacactgggtcagagtgacctgtagggatgtgacttaacccttgtctggcatggtcataggtcctgtttacaatttggtatcttactgtcacaaagagtctgttttgtcagtcttatgatctctattttaacattaatactggtcagttgtgcctaaactccagaagggagggagtataaaaaagtgtgttcaacctcacttgctgtcatggttggaaattcagttcttaaggttttttgtgtctccatggccaagaaggatctgttcagtcagtgtgggcttaggattttatttttaggttatgcgtttataaaggtgtcctctcccttgccaaggaagagaacaactcttaatgcaatcacctgatggatttggtctaccctctgcacagacaaatccaatttactgagattgtggtattgcagtaaagaaagagtttaattaacactaggctggccacatggaagatggagttattactcaaatcagtcttcctgaaggcttggaggttagggtttcttaaggataccttggtgggtaggggactagggaatacgtgttgctgactgactgaggatacaatcatagggttgtggaagatggtcctcatgcactgagtctgcctctgggtgggggccatgggaccggctgagtcatgagtcagtagcgtcggtcagtggccaaaatgcaaaagtctgaaaaacatctcaaaagatcaatcttaagttctacaatcataatgttatctataggagcaataggggaagtcacaaatcttgtgacctctggccacatgactcctgagtagtaagggattatagaaactatattttagcagaatttaggccactcccatagttctaatcttgcggtctttcatcagttttacaaaggtggtttcagctcctgaacaaggaggggatcagttttagggagggattgtcatccttgcttccacattaaactagaaactaaatcccttccatggttagcttcctatgcccaggaatgcgtgaagacagccagtctgtgaggctagaagcaagatggagttggtcatgttagactcctcttgctgtcataatcttcgcaaaggtggtttcattaatcatcggggctcttcatcactggagatgactctagattcttttcagcccaaagacctggagaggaatgtatataacaaaccttactaaaccacccttttcttctatttatttccctatatatttccttcccacaagttaccaccattaggaatcccccttttcctttgtcttgtcaatctctgcaatgtatcaaatgtatcactgtttgtcaaaatgctgtgtcacctcttaggtctaactgcttctctgccccttcacttttctaggaaggcccctgtatatatacatgataaacctttcctcctgctaatctgtcttttgtcagtctaatttgcagggccccagatactgaacctaagaaggtaaaggaaaacatttttttcttcccccacagtggtatatgcataccatgaactattattacttagcatttcaaaggatggaaattctgacatatgctatactatgcatgaaccttgtggacattatgctaagtgaaataagccagttacaataagatgaatactataaaattccactggtgggagtgtctaaaatagtcaaatttatagggacagaaagtagaatggtggttgtcaggcactagggggatggggaaatgagaagttgtgtaatagccatagaagttcagttttgcaaggcgagaatgttctggagattagttatctaggggccaagggaaaagttccccttctccctatgaagtttcactgaaaaatcaactcacaaaaggcagactagtaggagaaataacatacaaatgcatttaatgtgtacatgggaaccttcagaatgaagacagaggaaagtgcacatttttatgcttaggttcaaaaagtatgtagagctgtttagaaatatgactggacaaaagggtatgatgtaactttaacagatggagtgaggaaacccagcaaggcctgtctgtctagattcttcttggcctctctgagcagcatttcttccttctgcgtatgggacaggaccctttctggaatgggggtcttatgacctacaatcaaacaaggtaggtccgatcatttccttatgaccagtttttatacagaatgtaaaccaaaagtatatgagacaggtcccgatcaatgtagaaagtttactttgccaaggttaaggacacacccatgacacagcctcaagaggccctgcctatgtgcctaaggtggtcaggccacgactttgttttatacattttagggaaacatgagacatcaatcaatacatgtaagatgtacattggtttggtccagaaaggtgggaccactcaaagtggggacttccaggtcacagggagatttaaagattttctgatttgcaattggttgaaagagttattatcaatagaaaggaatgtctgggttatgataaaggattgtggagacgaaggttttatcgtgcaggttaagccttcagagagaacagattgtaaatgtttcttatcagacttaaggagtctgttctatcaacaattctaaaaggaagagggtacaatgaggcatgtctggctcccccttcccatcatggcctgagcttgtttttcaggttaactttgggatgcccttgccaagaggaggagtctgttcagatggttggagtacttagaattttatttttggtttacaagaaaggcggatgaaaagtttgataatatttttaggttttatagctggctttcgggaaaaggggttctggtttctaggacccacgtggggaagagggattctagtttctatggctgccctcggggaagagtgggactgagagacaggaggcgagcaggagaaggtcagagaaaaccttttgcttctcaggctgcttctgaggccttcattttagggtgttgttttccatgtcccaacagtgacacaacagtgtgaatgtacttaaaactactgaactgtaggtttaaaaatggttatgatggtaaattttgtgttatgtgtgtattatcacacttggttttttttgtttttttttttgagatggagtctcgctctgtcgcccaggctggagtgcagtggcgctatcttggctcactgcaagctccgcctcccaggttcacgccattctcctgcctcagcctcctgagtagctgagactacaggcgcccaccaccgtgcccggctaattttttgtattttcagtggagacagggtttcaccgcgttagccaggatggtctcgacctgctgacctcgtgatccgcccgccttggcctcccaaagtgctgggattacagacatgagccaccgcgcccggccattattaccacaattttttaaaacctattttaaaaagaccacgaaacactttaaacattaaaaataatcaaatatttttttaattgcttatttaaatagacttatgatggcttttcaacctacacagttgttgagttttttgttgtttgtttgtctgtttgtttatttagtagagatgggggttcaccctgttggccaggctggtctcgaactcctgacctcaagtgatccacctgcctctgcctcccaaagtgctgggattacaagtgcgagccaccatgcctggctcattcaacttatacagttgtttttaaaataaaaaatacataagccaggcacagtgttgcacacctgtagtcctgattactcagaggttgaggtgggaagattgcttgagcccaggagttcaaggtcaacctgggcaacatggtgaaacctcttctctaaaataaaatatatgtaataaaaaatttaggctgggcactgtgtcttgcatctgtaatcccagcactctgggagacccaaggcaggtggaccactcgagcccaggagttcaagaccagcctgggcaacatggcaaaactccatctttacaaaaaacacaaaattagccaggcatgggggcatgtgcctgcagtcccagctacttgggaggctaaggcaggaggatcgcttgagctcactggaggttgcagtgagctgagatcacaccactgcactccagcctgggtgacagagcaagactctgtctcaaaaaaaaatttttttaagactataggtattttcattatttttctcatgactcttctcatccttctgatatttgtacctcaatcctcagaccactgtccctgtctattctatttgggtaacaaccagtaagtggacatttacaaatttcctagtttttactggggatgacagtccccaatgctaagttgcatcgccttttacctgcctgactggtatactaaaaaatcaactctcagttgttataggtaatcatcatgattaatagaaaatatgttactcttttcacctgttctgcagataggacaaagtaggtgcagaatcgttaattcacctgaacaagtcatagcaaaggtctcaaatgagggcttgtgcagggtcagctttctgggcttgagacctgtacagtcacataggttgccacatttagaggagctccatgcttgtttgatgttctctgttatcatcttgacatttttaatatatatatattttaacaaaaggccccatatttcctttttgcactgggccctgcgaattatcttgctggtccaggacttaggtcactgatctcaaaatatgatgttctagactcagcagtgggaagggtcgtacaagcaaagaagcattatcccttttattcaagattcagcgtagctattttatacacaatggtcatactgattttgctgtagagcactgcaatactaacactagaatccaccatttaaaagggaagctagagccctcaatagttacatccacgtttcagagagaaatccccacaaagacggatataattttctcataaatatttacaagttttaaatagttggatgttagtcaccccatttatcttggtgtttccttgtgaatgaagcccatccaacgtcgacatcgtattgagaaaaatctgtgaagctaatgaagaaagaagaatcaagagtgccaaaaataaatgtttccatcctgagccaaagaatgaatcacttgtgcattcatatgttatagaaaatgtgattccttttttccagttttacaaggccaacacctatcagcaacacaaattctgacttttactgacttagactaggtctcaaaagccataaaaaggccgttcatggaaatgaacaaagaatgtatttgtatctttatctgagaagtcatgccagaatccctttcaaatcagcagggtaacatttggttttacatttgtatgttttagtgagttttataaaccctgaagctaaccgatttttcttgtaaagtagagaagtaaactgattttgggagagacgcctggggatatagcagagctgaaatgtttgtgccttgtttattaaacatgatcatcctcaccagaaattaccatagcatcaggtttcccagaaggttctgagggccagagtttgtgcttcacttcttccttattcctaaggcaactaacacgatgctagcatgtgagaagcacccagcaaaccctctcttcaccctctctccaattttggcctctcgtgggaaaaccccctccttgcccatgatgtttcacccacatctgtcttgactgggcaatgcccccatgcagccaacttttcatattctctctttcacactttcattataatgtatttgtccttggtccaactgcctttgatttctaagataaaaatgatttgaaaactaactcagtcttaagttttgaagaattaacagcgtagtacaagacctctgttctcctttaggtaatttttttttttacaataacaatgatattttaaggcagtggccactggaattaatctaaaagttgaaatgtcttattaggcaatggggattttgaaacacttctgagtctcatcatttaggttgcagtctatggagaggactggctctttctaaaagatattcattcattcatttaatcatcaaacatatcctgaagacttactctgtgccagggactgctgtgggtgctgggatgcaacactgaacgggatgaccaggaccctattctcatggcattcacattctgaggtggcaggaatgtataaataaggagaaaatatgtaataatagtaaatggtatgacgaagataagacagagatgtgcaaggaaatgacagctggggtgcaggaactgggggctacatctaagtggtcaaaggtctctcaaagaggatggcattgaagttgaaacccgaataagaaggaaccagacatgggacgacttaggagaagaatgtgtctggcacagggcagagcttgtgcaaaggcccttgggtgagaggcagatctgtgtgttcagggcacgtgtggctataacatagtgttaccaagggatgagaggcaggcggggatagttcatatagggtctcagaggccaggaaggaagaggctttgggtttgattctgagtgtgactagaagcccctggagtgaaaagaacatgttctgattatgttttaaaacacccctctggcatttgagctataactagactacaggtgccagagaggaagcagggaggggattaggagagaaacgatggtatctcggaccaagatggcagcagtggaggtgtcacaaacagcattaggaggtatcttggtgatggagttaacagaacttcctgatgtattgcattggttggggtgggtggagagtcaaagactcctggggttttggtttgagtaacagtgtaaggtggtttcatttcctgcgacagaaaagctgggggtggaggggactgagtggaaggggtttgaggggaaaattaaaaaaggcatttaaaaatcccctttttaagtcaggaaacaacagaagctggagaggatgtgaagaaataggaatgcttttatactgttggtgggagtgtaaattagttcaaccattgtgaaagacagtgtggcaattcctcaaggatctagaactagaagtaccatttgacccagccatcccattactgggtatatatccaaaggattataagtcatgctactataaagacacatgcacacatatgtttattgcggcactattcacaatagcaaagacttggaaccaacccaaatgtccatcaataatagactggattaagaaaatgtggcacatgtataccatggaatactttgcagccataaaaaaggatgagtttttgtcctttgcagggacatggatgaagctggaaactatcattctcagcaaactatcacaaggacagaaaaccaaacaccacatgttctcactcataggtgggaactgaacaatgagaacacttggacacagggcggggaacatcacacactggggcctgtcagggggtgggtggctgggggagggacagcattaggagaaatacctaatgtaaatgatgagttgatgggtgcagcaaaccaacatggcacatatatacctatgtaacaaacctgcacattgtgcacatgtaccctagaacttaaagtataataataataataataatcccctttttagtatctaacatccaattaaaagaggagtcatggctcaatcctcaagaaagaaacatgattatatggagtctttgccttatgtggacacagtatgcattttggaaggaaaagtcagtcttctgggaaagtgtggaaaatccaaattggacagaactcattgaaaaaggcaagatttcagtcactggagctgtatttctcaactgcattttggaaacttttgccagcacattcttaagacagggagctcagaagggaatttgaatcatggagatgctactaaaggaacagtatggtgcccccttagctgaataaagaatcaccagagagctgtgtccatgaccactttttttttttttttctgagaatcactgcttggtcacagcacatcacagacaccatttctggaatacaggtttgaggataccatgtcagcagcttcaagaagagaccttcttgccaggacacaaaatgatgctctcctctgggaacctgctttgaatagtgggattcaaggacatgagaccttcttgctggatttttatgatacaatctctacgattttacaaataaaggaataaaacccagataagatgatgtctacccttcctcggggtggtctgctgattgtctggtgatggcgtcagggcagccaaagacaggataaaggccgaggagggtgtttgtgcccttatgttattagcaccattgttcataggacttgtgagaggattctggaaccaataaaggggtagaaacagtacctgattcataggtgaactggaacaaacaggaatttaccagacctgtgttgaagctaagccatatttatcgcaatgtttaagattctcagaaatcacattttatgtctatccataagtaaaatggaactgccattaatagagcttttacaacgtaacatgtgaactgtgatttggtgctctgaaaaaacacggaagagtgggaaggaaggttctaaccttggctcctgataacttgttctatgtgtggagcaaatcattaacctgtctgttttttactgggcaaatggggataatcaagcacaggtccttcggccaatgggttgtgatgattaaacaaggtaattttgtgcaaggagtccaggttttggagtcagacagacctaggtttgaatccaagtgctggtgatggcagcagtggcctgtgtggagtggctgctgccatgatgccagctgtagtgggggaggcgtggctggggcagcaggctccatggagccagtgggagccgggaacagacccttccaagttggcgggatgggatccctgccctcctgggtgcagctgcagctgcccagccctggctacagaccctggcatccctgcactcttggggcccaggaattccccctgcccctgcagactcagaggtgactgctcccactgtctaacctctccctgctcctggcacctgctccgattttggagcaaactgtggccaaacctgggtgctgacatgacttggccaagtgtgcatgctctgaggcactgacatgccagcaccctgccacctaggacccctccacactttgggcactgacgagcatggaaagcagtgtaggcctgcaggagccccttagcaggaacagcctgggcactgtgggtgccgtggagggcaggttgatggtggcaggaggcagacaggctcctgggtggaaaggggcaggtactcagtgaagccccacctccaagctggggacggcctgaagcctgggggctcggctttcagttctgcagactggaatgagaacttatggtgctttttcttggacacccatggccacccatggaccaatccatacacactttctcccctctaaagcctgtataaaccccagactcagccagactcaggcagacatgggatgacctgcctgaggataggagctacctgctctgggtctcctctcagctgagggctgcacagacctcaggacaacctgtctgcggataggagctacccactttgggcctcctcaagaactgttctgctgctcagtgaagctcctctctcccttgctcatcctccagttgtttgagtacctcattctttctggatgcagcacaagaactcaggacccaccaagtggcaggactaaaagaggtataaattaaacagggctgaaacatgcccccccacccccacacacactcaccatgttgtaagcaacaagaagaagagaagagctgcggccctttggggagcacagacctgggggctcctgaacccagggctgtgacacccacggttctgtggtcctggcatttctaagcttccattgactggacttctactacgcaccaggcagcatgctgagtactttgttttacaaatttttttaaatgagcttcgtaaagatttaaaattatatccacaatcactaagcgagtaggtgtcagtgtcctgggatccttaggggtgtcacttttccagctggaagcctctgtggctggcggcacctttgcctgagttttactcgggcctcctgggctcgttctgcccactcggcccagcaggctgtgctcagcttgtgctactggcccggattccacacctgccaaacatgagccagatgtggagcagcaaggggtgtgtgggcaagcaagcgcaggatccagccactgcacacagccaggcatgcaggctgctactgcagggcaggcagctccaggcaccagcacaggtgctggctccatgtgaggctgtggctggaccagacgtactgcacatggcttctgctgcagacacctgtgtctggatgaggggacttttcatctgtacttttcaactgtaatgtaaggtggtattactgtttgaaaattagatggcagtagtttgcatttctcatgatcagaagccaagatataaacacacactacctaagaaagctaaaaaaaaattgcttttttaaaatgttgagtttgagaggcctattaaacatccaagtagaaatgtcaagtgagcattgagatatgtcaatctggggcacagaggagaggtcagggatgaaaattgaaatcaggggtcactggcacatagatgggagttaaagccaaggggctggatgagattatctaaggagaggggtacacagagaaggcaaagagccaagaaggccctcacttggggaaggagagaagtcagcaaaggagcctgagagagataaaaatccagactgtgtgtgtctcagaagccaagagagggtagtgcttcaaggagagggagtgtaaactatgcccagtactgatgagaggctgccgcagaggcagacaaaatacgtgctccttggaggtctttggcaacctttatagggcagtttcagagagatgggaacagagtgaggggactgaaggaatgtatgtcatacgcttccaggttgggcaatacccccaaagccatgctagactagcagtatatgatgttcttaaaagtttttatttatttttctaaatgatgtggcacagagaaaatacacaacaaaaacatttcatgacatttctatcaccacctacaaagctggtaaatcttgaaatgccatgaaggagctcctaaattaaccagcatgaataactttatggggtggctctccaagacatcatgaaggaataactaataaaagcaattgtaaaaaaagcctaacaaaaatagaaaatctggctgggaataactcacgcctgatggatttctatgttgtaatgctgacaaagccaccataaacacacagcaacgacttctgtggtgaaggcattgatattataacccatcccacaactagcaaaacatttgtctagaattgtgacagacttttatttcacttgtcacaaagtgcaactggaatcatatcatgttccatttgattcaacgaatatttttattgagcagatagtaaacagaagaggctgtgcctgccactgaaggagacacacagatgagtcacaagtagcccttgtcaccaacaagaactctctctgcctccaggctgcaccaccatcagggcagggactgagcttgtctggattgccactgttacatagcacctgggcagagaaggcactcatggggcaatgtttgtgaatgaataaatgaattcaaaacagagaatgataagtatatcaagtacatagtaggtattttgtaaattatggaataaacatcttagaagatgttacaaaataaggaaaaaataaatacagggatataggactgtcagaaaagattattgaagagattgtggcttctgaaataggccctgaaagctagatagaattccaacagaagagtcaggaggaagaatattccatgcacggaaatatgaaagaactgctgctgtaagatttttaaccacaaaaggaaatccttgggttcttccattcctgcttaaaaaaaaaaagagagagaaaaaacatacctgctgaaggaggctcaccgttaccggggcacgtgaagtgtactaccttgagctcctttctaatatcgagccaagtattccgtaggagcaatgggtatgaatgtcccgtgctggctcccacagttataacttacatggaaggctgttctctgtgaaccagtacctgccttcctggcctgacattaccttcttgggaaacagtgattttggttaggtcacctgtaaattttggatgaaaatatcctaccattcacccttagccagaatcacacagataggccagggtgtaacataggcaacagagctcaagcctcatgttctccagatccacctgtaggcacaggggagggatacatggttggccacaaagggtttctctttctacttacttctgtgaagaaactcaggcgggcatcaaagacatctgcagaaccaatcaacaaaatgaaacctccatggaatcatgccctgtcctccatcttcccaacaatttggagaagacagagatcctgtgggaggcatgaaaagattataaataagacatacaaggggaaagtctctatctcttctctctttagctggtgctgtacctcagaaatgtcccagataggtgctgggatgaggggagggaggtgggcagagccagcttcataggtgtggggcctgcccgatcactcagagccctctgcttagaagggtcccatgcttttagtgcactgctgtccccatcttgaaatttttaataatttcattttgcactgggtcccacagatcatgtagcccgtcctggagatggggggctggcaagacatagccttcagagaaaagaaagttcaggctagactctcacctgggctttaaacttctctttctctggccaagtactctcaatgccagaacaaagtaacctcatactggctaacctgggtctaagggaagagcagggaccagctctccccagtggaggcatttccttgaaggcccatattttatcctaagcaaaaacccaaaacatatttgcattctgttctatgaaatatctattagatacatttttaaaataagataggctttccctcaaaaaagcaatctttaagtagcattgatgcttcaagaggatatacccttattatcacttggatatgaagtccttctggcccccagataatctcaaatgccatagcacaacatggcatagcacaacatgtcccggagaggagagaggaaactccaattcagcaaaaacccacacacggattgcagcttcctccctcccctcacatggtttcccatggccttcactggcacattgtgtaactgatggcatctggctccttcctttctgccctttgtccttttcctcttcttaggaagtcatgtttacttgctagaacactgccctaaaatagccttatatttccattcccagtccagggtgtgctcacagccagtctaggttattccatgaggcccccgggctcctggttgctctgctccctgggctctggcacctcccagtttccatgcctcctccctgctctggacatacgacccactcgctggtggtgggggctggcacggccagcacttggcatctgcaatatgaaccctaacgatgatgagaacctccaggctttcccttgcctatcagctttgcacacataataccctcttcctaaaatgacagaagattcccatctgtccctggggctcagtgtagatgccacttcctctgggaatccttccttgacatactcctctcccctactcaccaccaagatgaagctagtcctcccatcctactccttcttttccttgtaggaatacttaccacactgtacttaccacactctagttaacttgcctgtatccccagctaaaccctaagcatgatcaggtcagggatatgcttgccttgttcttcaatgtattcccaaaacctgaaagcctcaaaaacattgttgaatgctgttgaagtttgagcattgttaagtgatttttatttattatatcacaacaatcctaaaaggaaaggattagtgttctcatttaacacttgaggaaagtaaggctcggagaggttgagtgagtttcctaagatcacacagttgtaagtggtacagccaggctgtcagactttaaagtccatatgtttcattccatgttccaaaattcaatcagagaagcagaaccactaggagtgatatagactaatggatttgttttaaggattggaccttatgcaattgtgggagatcattaaaagctctatgctatggcttctgcacccggtgcttgggtctgcagtctgcagggaaggtagttggcaaggaaagatggacatgaagttggagaaggtaaagacaaactggagcctgtggggaagagctgggcctccagacagactggaacccatgatggtatctccctacctccaggcctaccacttccacgtgaggatcactttgaagaacagcggcaccttagtcaggagtaaatacacacctggcctgggggtcgcggaagctgaaggagcaatctggcaggctctataagggctggtggacccagctgctgcctcatgcctgtcaggtgagccagcagagaagcaacaatgtatgtgagctacagtggctctaatgccctggactgaccttctgagcataaaaagaataggcacttaactcccaccttccaaatcttggacaaagcttctgctgtggcccaatcaatccacaaccatgctgggaaaaaaattcagggaaacccagttccagtttagctaaattgatacaatataaatctatttccctttctctcctacttgctttactgttacaaattacaaaataagatttccatttcctgaaacccaagatttataacactaatatataacataatgtagtatattaattatttcctacctttttcaataccctgttggcgcgcattgggcgaatgaagatataccttagtggtatatcttcttgaagcatcaatgctactttatattaattatttaccacctttcaaaacctttttctacacagcagttattcaccttcttttagaacatgcaccttaatttccctctgaggaaccagccctgcctccactcttagtcaatatggtttaggtgtagctgtctgccccctcactccaggcatgagcacgtgaacaaggcccaagcacactgcatcctctggcctcagaggatggctcaggcacaggtgcataatcttcattcgcccaatgcaagccaacaagacctagctgaagctttgatttgacttaaagggaagcagactcttccaggtcttgacctggagatgagaggctgtctgagaatggagcaaacacagtgaatgcaacactgattatgaaatgagagaaaccaggtctgggtgccatcatttgagtccctgggcatgtcgttctgaagccagcctcacctgcaattttccattgctgtacctcaactgtgttcgcttgcttgtgcaccacaagcatgatccataattcaacaacctaatacaccttctttgaaaacctactgcacaacctccattgataatagcaacatttactgaatgccagacacattgttgagtgctttatgtgaacaatctcatttaaccctctcaaactccttatgaggtaggtgctatcaattatccacatttctaaagaagaaactgaagcttacaggagttaatgccaggaagaggatgaaggtggtaagtggtgaattcctaattacaactttaaacaccaaaccacagtcacgttggcactcagaatttgaatccttatctactgggctccagaatctgtactttttaatttatttacttatttctgagacagggttttgctccgttgcttagactaaagtgctgtggtacaatcacggcttactgcagccttgacctcccgggctcaagcgatcctcttgcctcagccccctgagtagctgggaccacaggtgtgcgccaccatgcccaactaatttttgtattttttgtacagatgagctttcgccatgttggctaggctggtattgaacttctagactcaagtgatccacccacctcagcctcccaaagtgctaggattacaggtgtgagcccagaatctgtacttctaacaacaaaaatagtttctaatacatacaaaatacttgataggcctgatggaggataaaggaattaataaagtatattttgtgtcctccgggagcttaccatttagtggaggaaatatgtattcccacaaataactgtggggcaccaagttatgagtacttttacctccactccaatctgccactggctactgagcaatggtccaaggttagagcatcatatttagccatagtatacattggcatgcttactgggttgtgtggcagcaataaatggcaactgaaccaaaagatgcaggagtctagcaagactttttacttctggagcaatttcaggcttccaaatccttactgaattacccttaattgcaatttctcgtattactgagatgatgagagtctaatcattgagactatttcctcctaactttgttgctatatgcaggcaaccaagcttcattctgactgggggttacgctaacttggattttaaaacccaattctgcagttcaagagagatgataaatggagtagagggacctcctccctaccctccccccaaaacccccaaagccttcccaactccctatattctctaaaagacagacactagaaactaaacaacacataatctgatgggctgatcaataatgcattggttttattacctgaatattttggggttactttttcatgtcagtctctcatgtcaaaaattctcatttccctaatgcctaccccctcaggccctcatctctcttccatcttcctcacgaatgataatttaaggtcataaaacagatagcttcacactttcaatataaactccaaaaaataaattgttagcggtatttatctgacccctatattctagctattatagtcagataataaaatccagggtgctcgagggaacagatcaaggggacagttagaaaacttaagcttcagtgtttctgttgactctagaaaggcaaaactaaaataactcatctgtagcctgaatatcattcccaataggagttagataaaagcctatcttggcaaagctcaaagtccttaaagtttgggtcttatttgtttgtttgttagactattttggatcttgagagtttgctttgggatggggaacagctattagagctgtttggcgagtggggatgctagaaatgggttgaaattatgacattagtataaatttttataaaaatctaatttctagactgggcaacatagcaagaccttgtctctactaaaataaaaaaaaattttaaaaaagctggccatggtggcacacacctgtagtcccagctacttcgggggctgaggcagtaggagcccttaagcctgggaagtcaaggttgcagtcagccctgattgtgcaactgcattccagcctgggcaacagaacaagaccctgtctcaaaaaaaataataataaataaaattagtcattatataaaaattctttcttttctttttttttttttgagacagagtcttactctgttgcccaggctggagtgcaatggcgcgatctcagctcactgcaagctccgcctcccaggttcaagtgattcttctgcctcagcctcctgagtagctgggattacaggtgcatgccaccatgcctggctatttttcatatttttagtagagatatggttttgccatgttggccaggctggtcttgaactcctgatttcaggtgatctatgtgtcttggcctcccaaagtgctgggattacaggcatgagccattgcacccggcctcaaaattatttctaatgtgtgcaaagatatctgataaaaactacatgactatgtaaaataaaacatactatttcctctgcctggactttctatttcttcacccttcaagttacagcttaaacagatccatcttctggaagcttttttgaactccacttaactccatttcaactcaatgagcaccttctgtgctcttgaatgcaggtttctgatgactttggaggttgtgccactggaatagagggaaaaaacttctaggactttcatggagagcttatgtgttcatgaatattgagcagaacaggagttatttgcatggactgagcaaacagaagaccaaaataatctttttatgattttttgcttaaaacgttgcttattctttgtgtttttcagagtcaagaaaacttttttatttggagctatttacagcttttaacaactgagtaaaatacactccagtgagcaaattttggagcgcatttctttctctctaccttatttctctgtaatttggaaactatgtctacgtatacttaatttatggtagtatcgctatttgcataagttcagtaagcatctgttttcttttgtaacaggacactattagagacactagttattttaccaaggctttgactggaatgacatgttttcagacttttcagactgctttgaggaattgaggttgagctacagagctgataaaaattccttggaaaaactggccaccttgtttttacaaggttcccaacctgtggtaagtaaaaatgtccctttctgataggcctaggaatcccaagttattttggtacctctagaaatgaggaattcattcaattcatacaggtatctgcaggcacaaataaatctttggctgggctcaagatgcttttaaaaggtctaatctgagattccttattaaaaaaacatccagcaaagccaattttttaaaaaggcctatatagcaaataattattcatgttatgtttcatgcaaacaattaggcctagtataaataaaaccaaagcttattttgcaaataaattggtcctgctatgatttgtctttggtaaaaatgggggaaaactggagagggaaaaattatgtttcaaaaaaaacctatagcatgcctgttattagattctagccttggctgggcacagtggctcacacctgtaatcccaacattttgagaggccgaggcaggaggatgaatcacttgagcccagaagttcgagaccagcctgggcaacatagggagaccccatctctacaaaaaattatttaaaaattagctgggtgtggtggtgcacacctgtagtcccagctacttggaaggctgagatggcaggatcactttagccctagaggtcgaggcttcagtgagctctgatcatgccactgcactccagcctgggcaacagagtgagacactgtctcaaaaaaaaaaaaaaaaaaaaaaaagaaagaaagaaaagaaaagaaaaaaattctagccttgtccattgtttgtgagcctatactaatgactcacatctgattggttcttggggatatttacctgaatccctcaaggcttcagatcagttctgcaaggactcctgaagctaagactttcacaccttgcattaggtctcttgtagtttactgttctcttaagtgctatactaacgatgtggataagaatactaacgtttttgttataccaacattggggacccaacaaggcacctgggaatacatacagacaactgcaaaatggtttcactcctcttaccttgggggcaacccttgccccaactataccccctgtcaacaggaagagcagttgtcagccttttcccatctccccagctcacacctcaggattgaggtgtgctgaagcacaagggagggaactgaaaccacctttgcaaagattatgacagcaagaaaagtctaacttgactgactccatcttgcttctagtctcacaggctggctgtctttgctaattcctgggggcacaaagagctaaccatgggagggatttagtttatagtttcacttggaagcaaggatgataacagtccctccctaaaactaatctcctccttgcttagagagtgaaaactaatgaaaggccacaagattagggttattggagggacctgaattctgctaaagtataggtatacttttataatcccttactgctcaggagtcatgtggccagaggtcacaagatttgtgacttccccaattgctcttatagataacatcactactgtagaacttaagattggtctcttgagatgtttttcagatttttgtattctggccatcaactgatcctacctggactcatgactcatgactcaactggtcctgtggcccccacccagaggcagactcagctcactgggacagttttccacacccctatgatttttttcccaactaatcagcagtacccattacctagtccccgcccaccaaactatctttaaaaatcctaacgtctgagttctcagaaagactgatttgagtggtaactccagtctttctgctctgctgccttgtcacttctttattgtaatttaaaaaaaaaaaacaaaaaacaaggtgaaggagccaggcatggtgtctcatgcctatcattcctgtattttgggaggctgagctgggcggatgacttgaagccaagagtttgagaccatcctgtgcaacgaagtgaggccccatatctacaaaaaataaattatctgggtgttgtggcatgtgtctgtagtcccaactgctcagaaggctgagatgggaggattgcttaagcccagaagttcaaggcttcagtgagctatgattataccactgcactccagcctgggcaacagagcaagaaactgtctaaaaagaaaaaaagtaagtacgttctgatagtatgtctcataatatcctgtaattttctttctgtaataggcatcaaaatggcaactgagtgactgcttatctctgtatcatctttcccaatacaatatgaactctatcaaagtgaggactatgtttctcttttacaccatggtattcatagtgcttagcatattattagatgttcattaaataattatcaacagaaggaatgaatgaaccaattaatcatgagtcatgaggagacaaaagaatttgtttggctattgtctgagtatatttataatttgactttccagaggtcattgttgaatagatatgatgtatgctgttttcaaaagggtcattgaaaagtaaatgattagatgaacttacaaattattaactatcttcaaacagtctctttgtcactctgctatatatacatttttcccttcttcccacactccccctgcctttctttctgctacaggtacagggtattaacaaagatggcagattctttctcaaatatacagtttttaaaaaaaaaaaaatccagaaatggttttctcgacatttgaaacaaagctagaaaagaaataaatttcagtaagtatattgtttcctaagagacaagagtatgactttcatctgctgttatgtcagattgtttgatatcacacaatccagattaaatgcagctaaataggactgtctttgctttggaaatcggccttattagagccaagaagctttcttgcaaatctataatataaacaaagtatagtaggagaagtaagcattattttgcactcaaagaccatgagtttaagagaaaaagtcactattgtaacaattgctttgtaattgtaaattatcacaaatttatggttgataaaggtctattccactattgcaaatatgttggaaggagctgggatgtggaaataaataagataaatataaacatatactatctgttgtatccctttctgtcttgttcatcttcactagatggtaataataataaaaatgaattcagcttgggacttataaagcatttataacaggccagacactgtttgttctaaactctttgtatatgttaactcatttaatatatgcaaccctgtaaggtcactataatcctctaagatcaataccatgagttagcccagtttacagaaaaggacatgaatgcaccaagaggtgcagtgacttgctcagggcacacagtaagcgacagagctggggtttaagctaagatggtgtggttccacagaccttacttttaataatttactattttagttattacatataatctcttgatgctatattcttcctagaataacacttataaatcagcaagcatgcactgagctctgacctagatgccatgggggaaacaaaaaatgacaccatttgatgcttcactcactctatttggggtgtcttcctgaactgaaattaatttcaaacgtttagatttttcctgacattgtttctcagctgatgtgttagggcatactggagtgtcaaactttgatctgattacattttaattttgcttcaccaacagtagatagaatgtgaagctaagaaggtcatgctgtgcagtacagaatgtggtacaaaccactaggggataagacacaagaagcagaaagtaatattatgccagctccccaagaaagatcacaggtttctttgaacatgtgaaattctttagtggagatttttggctcttgtagaatgtaagctacctaagggcagagatttgttctgtcttgtttacagtcgtattccctaggagcaagtgcagtgcctgacacagagtaaacaataaataattgataaggaaatgaatgaataattaaaaatcagagagtggggcaaagcagaaataggtttactctcacagtgacatagtgccaacaagggacaatagtgtgataacggtgcatgattttatagtcattgctgtgtatttttatattcttcctatggtacgctttttgattatgtagatagcatttttttagtccttttctttctttgtgccatgaaaaattctaggattcagaaatttatcacgaacacaaatgtgtatacaaatcctttctaaatctctcaaaggaatactaatgcatttacagttgcacatccaaaataaaagaactactctgtttggtttttgatagacaacttgcataacaaacagaaaacacagccacaatttctagagaaatgcttattaaaaagacatacagttctaaaaaacaaagtctactaataaaaaaataaaggaacaatttttaaaagatgcacagccaagactacagagtccttgttttaaacagagaatgcttgagttgagacatattctttcaatctctgagtcccactgtttagacatcacccgtggtagtttagggaaaggatcatcttggaccttaacaaaaaccatccagcttttcactaacaattttcttatctctagctataaatagcaatctttcctttctgaagaattgcaaggtcactttccttttttatcaaaaacaaacaaatccggttttgctgggggtactgatctgagttgggggagctactttgaaggaggtaggtttagtactgggggaggtaccaggagatcccagcttaagataaatgcccaaactccctcagatacatgagaagcagcagacaatagaaagaatcattgagcagcattagtataaggcattatattctacttgtgaaatttcaagaaaatgtgtctttaaggcctaggcaggcagatcacttgaggccagaagttcgagaccagcctgggcaacatggtgagactctgtatctacaaaaaatacacaaaaaaatagccatgcgtggtggtacacacctgtagtcccagctacccgggaggctcaggtgggaggattacttaagcctgggaggttaaggctacagtgagctgtgatcacgtcactgcactccagcctgggcaacagagccagaccctgtctcaaaaacaaacaaacaaacaaaaaacaaaataatgtaaaataagttttaccttattgggcgagttatttctgagcgaccatttgatgcttcactcacactatttggggtgacttcctgaactgaaattaatttcaaatgtttagatttttcctgacattgtttctcagctgatgtgttagctttatatacacacacacacacacacacacacacacacacacgtactcagcacatcttcaaattacttctgtagcacaaaaacacacaaattgaccaatggaacagaaataagccagtcacaaaaagacaaatattgcatgattccacttatattaggaatctaaactagtcagacttttagaaagaatgttggtagccaggagcaggagagagagagaaaaggtgggttgttgttcagtgggtatagagtttcagttttgcaaggtttgaaaaagttctagagctctattgcacaacagtgtgcatagagttaacacaactgcactgtacacttagaaacagttaagatggtaattttatatgttttatagcacaataatttaaaaaatataggaaggacatggtctcagaataaagggccatcttttatcataaagaaaaatttgcaacccaattccaacatgttaaggtgttctcttcttgttgtttcattgagaactgctaaaagtctcagtgcccttctcatttggatggtggtcctactcaaacgtttggagaccaaagccccatttggtaataagaaggatgtgttgcctggcctggtgctctgggcatatacacttcaggagaacctttcgtaggtaggggttaaggattggaatctgtcctgacagaacaatgtcttcacacaattaacacatagttcacatactagatgaaaacaaattccaagtggactacaaatataaatctgggggagggagagagggatgaataggtggagcacaggggatcactagggccatgaaattattctgtatgatactgtaatgttggatacatgccattatacatttgtaaaaactcatagcatatgcaatataaactatagatttagttaataataatgtgtcaatattggctcatcaattttaacagatgtgacacgctaacgccaagatgttaataataagggaaactgtgtatgtgggtagggcaggaaaagggtatatgggaaccctatactttctgttcaatttttctgcaaatctcaaactgctctaaaaaaattaattttaaaaaatgagatgaaagaagaaaaatgaaaaaataaaaataccaaagaaataaaaatagaagaaaatataaattaatttataatttaagaataaactttctaagaatatatcaaaaaactatgaatccagaaggaaaagactaatacacaaccagaaaaatgagcaaaagctattaatagactattttttaaaagaagaacaataaatgttcaataagactatgagagaaatgttcagtcacattaatactaaaacttaaaattatgagatttcatttttatctatgaaattggcaaacatttttaaaagagataatagtaatcatgaggagccaaacaggcattttcacatatcaccagtgaggactgtaaattggaatgacctttggtcagaaaaaatttttcaaaacttggaaagcaaaatatgattgcataatttgttttcatgttaggcattgcctaaccagtccatctaaggtgaattgaatcctgactcgttattacagatttgcacattttacaactgtaaattcaaatgttagtttgtagaaaattggtgagatgctatatttttgtccaatggagatataatttctgtcctgcacagatgaaaataattttgctctgtaaagatagcaccaaacattatggtttatcaccctgtaagacattaatcagatttatatctaatttagcaataatgtagaatgattttagtattcttttttatatatttatgtatatatataggatgtatatttacatatgtatattatatatagtatgtatatacataatataaatacaatatgtatataggtatgtgtacacataatacatatactatatgtatatatgtacataatatacataagtatatacatcatatacatatatgatgtctatatgtatagacatcatatacattatgggatgtacatacatatatacataacatatacatatattatgtatatattattatagatatatgtacatatatacatacatatatgtatgtagtaaatgtatatatagatacatatgtgtatacatatatagatgtatgtacatatatctatgtatatacttatagatgtatgtacataatatctatatatatacttacagatatatttatataatatctatatacttacatatatgtactatgtatatttagatatatacacatatttatacatatatgcatatacacatatacatatatatgtatgtacatatataaatagatatacataatatatgtatatacacatatagatatatatgtacacatatagatatacgtgtgtgtgtgtgtgtatacacacatattttctcatgtctttctttgaactggctttgttatcctgctggtttcctcattaataagttaaaattaaaacttgaactgtgcttactctatatttgtatgagaatactttttaacattttttaaattatacatttgacattttataggagtataacttggccaaatattttaagtcttaaaagtgtacatgctttttaacctagcaattacatgtctaagaaatgatcctaaggaggtaaggacatgctcaaaggtttagctctgagaatgtttctagatgtgctgtgtataataaagaaataccagaaacaaatgtgccacattagggcgctggttaatacctaaatgtgtgtgtgtttgtttgattgttttggggtttggggattttttttttttaagacagagtctcattctgtcacccagaatggagtgccatgcgatcatggctcactgcaacctcaaacccctggggtcaagcaatcctcctgccccagcctcctcagtagctgggactaccttgccccatccctaaatgtgttttaagaatggttgtttccaggtaagtaaaatttgtaagtttaaaatttttcttttatcttgttcagattttcttgtgacactttcaaagaaaaaagtttgaaagtcacaaagtctagttatactgttctcattcttgttgacatctattgaggtacttagccccgactatagttattccctctgtcccaattcctgctactatcttagggaaattcagagtccttaaacagaaccaatccaacactctggctttttcattccttaatttcccatttccagtgatctttacctcctcttcacttttgtaattcactctaagatattttgatcctgttttcattcagaattagtcattggtcctctctaacacttttgtgctttttcctctgctttgcttttaaattaaaatgccttcattgtttttccaatttaaaaaagcaatgcatgtttggtggaaaaacttttcagaaaatacagaaagatgtaaaaaagaaaattaaaacattgcaactcgtggatttgcactcagcatgttggtaaccttagaaacacattgctgggaatagtttttttttgtttgctttatctaaatgagatcttactatttattttacttttattatctgcttcttgcctgaacaatttgtctttccaagtgaataaatgcagatctacattgacattattatggctgaaaaacaattaattgtacagctataatattctttaacccagggtgtcttaacttcagcactattgacattttgggctgaataattctttgttgtgggaggctgtgttgtgcactgaaggatatttaatgcctccctgccctctgtatcagcactagatgccagtagctcccatccctagttatgacaatcaaaaatgtctcaagatattgccaaatgtctgctgtgggcactactgcctcaagttgagaaccactgatctaaccaatctgctgttgtttgacatttaggttttatctactttgtcacaatttaaagcagcagcacttatgaagctcctaacatatacaaactcaacacatcttcaaattacttctatagcataaatttctagcaaggaatggcacatataaaattttgatgtctattcccagatttccctccagaaagattgtattaatttagaacaccattgaaacagcataaatgtcatttcctgagatcctgtctacttccaggtattgtcaatctttttaatcttgctttgtgataagcaaaacaaagtattactttacccttttaacttgtaattctttgattgcttaccaggttggtaacctttactatatttattagctatttgtgttactgcttttatgaactgcttattcatctcctttgctcattctttattttgtaagagcattaattccttcttccagcttgtaatttttctcataacctgatttaaacctttcttcttataacctttataaggttttctgtacagaagtcatacatttgtatgttttcaaattattagcctttttattatggttttacctttaatggtgccatacttagaaagatcacctctaggtccaggcctggtggctcacacctgtaatcccagcactctgggaggctgaggcaggcagataatttgaggccaggagttcgagaccatcctggccaacgtggtgaaaccccgtctctactaaaaatacaaaaattagccaggcgtggtggtgggcacctgtaatcccagctactcaggaggctgaggaaggagaattgcttgaacccgggaggtggaggttgcagtgagctaaaattgtgccactgcactccagcctgggcaacagagcaagactctatctcaaaaaaaaagaagaaagaaagaagatcacctctaaaatctctaaacttcagtattttactctattaggctaaccttttattttgctgttatctttcatactcttaacactaaatttttttttctctcttgaccagtgcaccttaaacttgaatgtacatatacatcatctggaaatcttattaaaatgtgtgttctgattcagtaggtttggagtggagtgacagattctacatttccaacaagctcccaggtgatgccagtgctgtccctggcctgcactctgagttactagctcctaaaccttcagcactcagtcctctgtaccccctacctccattctctgactccttcctgaagttgcctcccttcctacctagtgtgaaccccaatggcagcaatttcaactatagctcatctctgtttttccagaacaacaatcctggcaatctccattccagtattgatgaagccaccatttcttccagtctccagccacagcaccctgcaggaaatcagatagtgtccacgtacttctcttaaaaagataggatttctaaggtacatcagcaagccttcactttgttcccacccagttccctttcccattcctagagtaactttgcctaaatttaatcttctcaagctccagtccccctcctcagacctcttagtcaatgaacaacaatgaaagggaaacgtcttcaacccttccagtggaaataacatttagcatagtgactactgcacaattaaaaaaaaaaaaacctactcaaagactctacaatgtcatactaagacttccaactcttaggccaggcaaggtggctcactcatgtaatcccagcactttgggaggctgaggcagaaggatcacttgaggccaggagttcaagactagcctggccaacatggtgaaacctggtctctattaaaaatgcagaagttaggcatgtgtggtgtaaaaatacaaaagttacgtaggtgtggcgatgcgtgcctgtaatcccaggtacgttagaggctgaaacacaagaatcgcttgaacctggaaggcagaggctgcagtgagctgagattgcaccactgcactcaagcctgggcaacagagtgagactgtatctcaaaacaaacaaacaaacaaacaaacaaacaaacaataaaacaacttctctttaagaaaaaaaaaaagatggccaggcacggtggctcacgcctgtaatcccagcgatctgggaggccgaggcaggcagatcgcccgaggtcgggagttccagaccagcctggccaacatggtgaaaccccgtctctactaaaaatacaaaaattagccgggcctggtggcaggtgcctgtaatccgagctactcggtaggctgaggcaggagaattgcttgaacctgagaggaggttgcagtgagccgagatcatgccattgcactccagactgggcaacagaattgagactccatctcaaaaaataaagaaagaaataaaaaattaaaaaaaaaattccaactcttggaaaattccctttaaagagttacgaattaagctggtttatttatgtaataaacgcttcgcacagttcttacaatgtgcctgccaaccttatttaggtaggtacaattaagacttccactttacacaccagaaaataaggcacagagtcgacacagccactgagtgtcagagcaagaattggcactcatcccgtgagcgcctcagttctttttttttctttatatatactttaagttctagggcacatgtgcacaactgtggcacatatacaccacggaatactatgcagccataaaaaaggatgagttcatgtcctttgtacggacatggatgaagctggaaaccatcattctcagcaaactatcgcaagggcagagcgcctcagttcttaaaccactcttctatgctgcggcagaatcactggaagtctcagggagtcctgagtgcgcaattctaggaaaagtatctatatctgtaagaaagaaggggcagggaatctaacggttctcagctcttgaaggcacattagattcattcaaggtcctctctaaaaatacactttcttgggcctccacgagaaaaattctattcaattagtcgtgggcttgcatccgtatttttagtctgtaaaagtggaatgttatctcaaatcagtggttttcaaactttttatattctgcggaccttgacacgggcccccaataccctgacacggttacttacaatccgggagagagtgggagaaagggggagagagggaaggggagagggggaggggagagagagagaatgaatgagaatgaatcttttagagaggtagagggggttggcccgtgccacaaaccacctctcaggtttgagtgaagccttcgttctctctcgtgcagagaccatgccatccttccagaaaggagcattttaggacgttttaggacgagagacctgtaattggcctaagactcaggtgcaggtggaggaagcatcggatttacaacagtggtcctgccttcttcgatgtgacttccagttttaaattcaattctaatttacacaaatcccacccactatgtaaacttgttggaaaatgtcctgcactctgcacttcgtggcatttaaaacttccacacacgcgcgcgttctttctcgaagccccgtgattgcttagcctcgctgggcagcttggcactgctgggagcttggctcgccctgccggggccgacgccgcccgtcccgcaggagcccgcgcggggctcagggcactcaggactccgcatgcgtcccggctccaggtgggccccggcaccgccaaccgcaggaaacccgccgagccctaaacgtctcccaagcggctgcagtctgcgacagagagtgtccctcggtggagcgccctgtggctgcccaggctacagccgtggccgaggcgaggacacacttctgacctggggctccagcaaagactgtccgcgagcggcgactccatgcccgcagccctccgcccagctcagccgcccggccgcgggcaccagcagccgcgccacgaaagggcgcaccgcgcgggcgccgtctctcctaggtgcgaaggcggctgaggccccgcccgggaggcacccgcgcggctccggagtgggccggagggacgtccgggggcggggcccgggcgcgcccgccctctgaccgggctataacacccggccccgccgggcggccgcgggtgggtagaggtgcgcgcctgggacctggtgaggctgggggtgcgcggggccgggcgcagctgtggcagctgccggacggcggaggcgccaggaggaggaggagagggaggcgcgggcggctgggtcgagggcaccgaggctgcccgtgctcccggtctctggttgcacggctcactcccgaaggtgttgcttccagcttttgcctccttaggaggcagggagcgtcagtgtcgggagaccctgagaccggagtaccgagacgtagctggtgatgcccccgcctgccctcatgtgttctcaggttcttcttatttttattcatctctagaacatggacttcccgtgcctctggctagggctgttgctgcctttggtagctgcgctggatttcaactaccaccgccaggaagggatggaagcgtttttgaagactgttgcccaaaactacagttctgtcactcacttacacagtattgggaaatctgtgaaaggtagggtccgtctcgtgaacactttgccaaaccctcagtcctccctttcagtattcattaaatatgccccagcttcctgtctgctcttccacgcacctactctgagtggcacagaacaagtcaaccggtaccgtgcgtgttggttgttttctgcttttgttgggaggaatagtaggaagaactgaattttactggacttgtccattgtaattcagtgtcactgagtcctttccattattggagttcttctgtctttttggatcttgcagacattggttatttgggatgtatgttttagttccttttcaagataaactcccaagtaagtccgtttatccgtttcagttcccctttgtgtgggcttctttatatatgacttggactgttaatgtcatttcttcatgtctcttttaaactgaaataatgcagttttgttggtaagatttctgtgtcatctgtagttagccttttatttaaagttatgcaaaactatcatttctgcaagtttcttttaatctaagtagtacagttctgttggttagatttgtgtcgtgtataattagccctatggcttaaagttatgcaaaaaagtggttctatgattaaaggctgtttttaaaatgtatccatttgaagaagacaatgctagataatgaatatatattagtagtgattgaaactcttcccagcattttcatatttatcattaataatttattgttctaagttagaaactacataaagttattttcatttttatagacagcaagtttgaatcagataaattaaataatttgttcaaggtctcccagatggtgaattttatagccaggactggcacccatccggccaaggcaaataatttgatcagatatcgttatttcatctttctttctttctttctttctttcttttttttttttttttttttttggtcagagtctcgctctgttgcccaggctggagtgcagtggcgtgatctcggctcactgcaacctccggcttcctgagttcaagcaattctcctgcctcagtctcccgagtagctgggattacaggaatgcgccaccacagctggctaatttttttgtatttttagtagagatggggtttcaccatattggccaggctggtctcaaactcctgaccttgtgatcctcctgcttcggcctcccaaagtgctaggattacaggtatgagccaccgtgcccggccgagataccattattacttaatcatcttttattatcctgatgttcccaaagaggttaccagaaaacttagtccttaaatcaaaagtttcataaattttatgcaatttggatctcaactttttgtaaggtgtgttcaaactctaccttgattttagctctgaacttttgagtcaattgagagtctcataattaccatattcttcatcatttttcaaaaaaatcaaggctatggcttctatattaaagaaaaagtattatataaatgtatttatgtgcaatgcgaagtcaatatcctgggctgtgtgtaatagtaactttgtttttaaacagcattgccaaagagatggtgccagaattactctatattgctctataatccaaaattatagaggttgggtgtgtgagaaatcatatcttgaatcagcatacgtattcagccttctgaaatcatttttccctagggctagagtagagcaatttaaaaagatctaggaatactaattatattaattaaaaatatatagaacacaactagcttgagttattgttcagtcatcatttcaaccacaagatgatgaggatgttgttaattttaagtactaagtgatttggtaaggttttgtattttcaaacacaatgtgcttgtgacagttgggggctctctttcctaatatgaatcagcagttgtgatctatcctgcatgatatcaaaccacaatcacagtgaaagtcagcaggcttaattttgtttttaattttaccttgtatgcactcttgcggttaaaggcttgaggagttatcatgtaaaaataaaatctgacactagtggttaaatatttgtgttgaatatgttgttctgaataataactcggattaagaaaaatcccaaatctgccatttggctccaactggtagatgaaactgtatgccagtaactgggagtcagttgccaaagtgtcactgcacattagtgtgacaattgagagatggtgctcctttgttggtggtctttttcactagatattttccctaaccattctgccctctgatgtaagataagtttgcttagaaaacagaatttatgaccaggcccagtgactcatgcctgtaatcccagcaccttgggaggccgaggcgggaggatcacctgaggtcaggaatttgagaccagcctggccaacatggtgaaacgttgtctctactaaaaatacaaaaaattaaccagacatggtggtgtgcacctgtggttcccgctactagagaggctgagaccggagaatagcgtgaacccaggaggcagaggttgcagtgggccaagatcatgccactgcactccagcctgggtgacaagagtgaaactctatctcaaaataaaagaaaataaacagaatttattatacacgtgttatttatttatttatttatattacatgtattaacgtgggcagtcttacccagaagggaaagtaatattcctaagtaactaaatacatgtttagtttttgtaaaaacttaaatatatgtgctatgcctatgtaaatatatgcatatcacatattttctttgttgtaattgtggattatattctgcttgttttttcatttcatgttatttccttagatatttccatgaattgacaaagtcggtagatgtgaattcgttgctgtttagtattctatcctcttgattatgtgaattttcttagtcattcacctctttgagcatctgtatagtttttggttaactctgttataaacagggatactataaaaccattgatacatgtcatgataattaccttctattattattggtgatttttaaaaacgtttttattttgaaacttttaaaatccacacaaaagttaaacacatctatacccagcttcagccatagtagaccatatttcagttgagccttttgaaggaaatcccactgcctagtgacatagtaaagaaaatcttaggtgaaacaagagaagcaaaaaagtactgatgacttagttcagaaaaatcagaaaaggtacagtgttcatcagttcgttcgttcaatcctccgttcaattaaggaagcacctcccattttttgccccaacccctttgtctagaaggatgcctggcacataatcaataatctatatctatttatttaatggatcaaatatttgctgagcaaaaggcatgggaagcaaacaaacgtgtgtgtcattcattccctgccattaggtagctcattttcaaatacaaatgtatttactgtgaatttctcagggtagtctctccacacacaccccaaaattagtttaggaacattttattatttttttaaaaaatgaacccttgtgttgagggttgactatcaatagatagcaatgaaagaactgctctgctacatacaaaaccccaaagggccattttaaatgagatttcctaccatctattttaagaatcttgcattgactgggtgtggtggctcacgtctataatcccagcacttcaggagaccagcctaggcaacatgggagactccatttcttaaaaaaaaaaaaaaaaatttaattaaccaggcataatggtgcatgcctgtggtcccagctacttgggaaactgaggcaggagaatcacttgagcctgggagttcaaggctgcagtgggccatgatcgtgccaccgtactccagcctggcctacagagcaagaccctgtctcaaaaaaaaaaaaaaagtatcttgtcttgcctcctgctaagtctgatcatcattgtatctgaatacagtaggcgggataataacaccttccttactagtgataatactattagagattttttaaagccagccaaatttagtagtctctgttatcaagtactttccatgtagtaaatagtttaagacattatttcgatctcagcaactcaaagtaggccttatcctcatttacaaaacaggtaaaatgaggcacagagaggttaattaacttgctgaagataacatagctaagtattagaagattcaaactcagatctgcctatttcccaagcacctctctattctcttttaaaaagcagcttgacatttaagtctttaatccatcttgaattaatttttgtataaggtgtaaggaagggatccagtttcagctttctacatatggctagccagttttcccagcaccatttattgaatagggaatcctttccccattgcttgtttttctcaggtttgtcaaagatcagatagttgtagatatgcggcgttatttctgaggtctctgttctgttccattgatttatatctctgctttggtaccagtaccatgctgttttggttactgtagcctcgtagtatagtttgaagtcaggtagcatgatgcctccagctttgctcttttggcttaggactgacttggcaatgcgggctcttttttggttccatatgaactttaaagtagttttttccaattctgtgaagaaagtcattggtggcttgatggggatggcattgaatctataaattaccttgggcagtatggccattttcacgatattgattcttcctacccatgagcatggaattgttcttccatttgtttgtatcctcttttatttcattgagcagtggtttgtagttctccttgaagaggcccttcatgtcccttgtaagttggattcctaggtattttattctctttgaagcaattgtgaatgggagttcactcatgatttggctctctgtttgtctgttactggtgtaagacttaaacgttagacctaaaaccataaaaaccctagaagaaaacctaggcattaccattcaggacataggcacgggcaaggacttcatgtctaaaacaccaaaagcaatggcaacaaaagccaaaattgacaaatgggatctaattaaactaaagagcttctgcacagcaaaagaaactaccatcagagtgaacaggcaacctccaaaatgggagaaaattttcgcaacctactcatctgacaaagggctaatatccagaatctacaatgaactcaaacaaatttacaagaaaaaaacagacaaccccatcgagaagtgggtgaaggacatgaacagacacttctcaaaagaagacatttatgcagccaaaaaacacatgaaaaaatgctcaccatcactggccatcagagaaatgcaaatcaaaaccacaatgagataccatctcacaccagttagaatggcgatcattaaaaagtcaggaaacaacaggtgctggagaggatgtggagaaataggaacacttttacactgttggtgggactgtaaactagttcaaccattgtggaagtcagtgtggcgattcctcagggatctagaactagaaataccatttgacccagccatcccattactgggtatatacccaaaggactataaatcatgctggtataaagacacatgcacatgtatgtttattgcggcactattcacaatagcaaatacttggaaccaacccaaatgtccaacaacgatagactggattaagaaaatgtggcacatatacaccatagaatactatgcagccacaaagaatgatgagttcatgtcctttgtagggacatggatgaaattggaaatcatcattctcagtaaactatcgcaagaacaaaaaaccaaacaccacatattctcactcataggtgggaattgaacaatgagaacacattggacacaggaaggggaacatcacactctggggactgttgtggggttgggggagcggggagggatagcattaggagatatacctaatgctaaatgacgagttaatgggtgcagcacaccagcatggcacatgtatacatatgtaactaacctgcacattgtgcacatgtaccctaaaacttaaagtataataataataaaataaaataaataaataaaaataaaaagcagcttgacacagatggggatgattccatggaagttgaggtcattagtagagggttttaggaccatggtttgggcacatttgacctgaaggtatagctctaccaaggatctagagctgttcaattcagtagccattagccactaagcaattgaggagttgaaatatgactagaccaaactgaggtgtgctagaaagtgactttgaagacttaatacaaaaaaggaaaatatttcactaataatgttttatattgattacatgttgaaatgataatattttagatatgttaaataagaaatatttttttaaattaatttcaaggccaaaagcagtggctcacacctgtaatcccagcactttgggaggctgaggcaggtggatcgcccgagctcaggagtttgagacccgctggggcaacatggcaaaaccccatctctaccaaaaatacaaaaaattagctgcgcatggtggcatatgcctgtcatcccagctacttgggaggctgaggtgggaggattgcttgagcttgggaggtggaggttgcagtgaaccaagattgtaattgtgccactgcactctaacctgggtgatagggtgagacccccatctcaaaaataaataaatatataaataaaaattaatttcacctgtttctttttacattattgtaactagcagaagattaaaattatatatatgacttgcattatattttgatcggactgtgctgctatagagtgcaatttgttattattaattttttcctgcgtacaaaaggaattctagttcatttagaaaatttggatcatacaacaaagcaccaaaaagaaaattaaaatctcaccatccaaaggaaacatttagtagactgcaatcatactacacagttttgagcctttttacccccctgagtcaaatatcttattttgtttgtccatgcaaacatgttatctctaaaacttgatttttaatttctgttttgtgtcctgtcaatagatattttattgtttaacttatgccccactggtgaatatttagtttgtttctaaactttcgctgttatgatcaatgctgtagtgaacatccttgtagctaagacagcaaaaatctgagcacaggctttggaatcacctgcccaagttcaaattccggattctcagttttgtagctacgtgaccatgggtctttagaataattcctggcacatagtaagtgctatgtaaaagctgctattattattattattaatacatacccaaaaaggaaattactaagtctaaagctgttttaagtatttgatatatataccaaattgccttccaaaaagattgtgttgatttataatttcttgggaaatgcatattaagaaaaataaaacaactcttctaaaacttacactagtcataaatcaatactgtcattagtgctttgaaagatgattgtagtatgtatttctcattgttatgttgtaagtatgagggagaatttatttctcttgcccctttccctaagaactctcaccttcccatcattaacagacattcactgaattcctctactaggagtcctataccatttcagatgttcagaaatctccctaacattggttaagattcttgctcctaagaggaaagtactatgttcacatacacagatctctcatgatcacttgccctcaactggatagattttagccggtgatttaccctcagaaaacagcattgtatataaaattttggcacaacacttggtcatccgtcacactctgctcatttcccaaatatgctcgtaaaaccagtttgcttgagatcctgtataaaatgcctattgtgatgcaaatactgacatattgaggatgaatatgaagaaaaccactaaaatctaggaaattcagctataatatacatgtttgtgatttaaagttatatgggtttagtaagcctttcccctttaacataatacgcagagtacctttctgagacatttatcagctatcagccttattcttattcttgaaacattcagggtttcttaaagacattgccttttttttttttctatatggagtctcgctctgtcgcccatgctggagtgcagtgtcacaatgtcggctcactccgcctcctgggttcaagcaatgctcctgcctcaacctcctgagtagctagggttacaggcacccaccattgcgcctggctaatttttggtagagacagggttttaccatgttggccaggctggtctcgaactcctgacctcataatctgcccatctcagcctcccaaagtgctgggattacaggcgtgagccactgcgcccttcctatcacttatcttgtcatgcttacattattccccacaattttaggttttttttttttttttttttaagtagagacaggtgtctcactatgtagcccaggctggtctcgaactcctgagctcaagtgatcctcctgcctcagcctcccgtagctctaggattaaaggaatgagccactgtcccctccgcccacaattttctaatgtcctccatagggtaagatgagcttacaattatctgagcctaaaaccaaaatcttttttgtatacaaatacaaaatatttccccccaacagttttaatatatactgaacttttcagggatgccactatatgtaaattgaggggaaattatattttgttttgctcttaacgtgactgagagatatttcatattcagagaatcctgacaacagtgaacaaagagccaaaccaatctgcatttgtaatctatatgttcacggtgactctcaagtatagatacaagcatgtgatttctttgtcttctagtggagtacccaagttattgcatatggataccatatcttatgtaaattgcattctttttttatttctgctttatatagtttgaacactatattgatcttttgaaattatgtatgtaaatgtgttagaattgtatgccagcatgataaaatagaagttgcaaaatattggatatgaaagcaagaggcatcatctgatagagttaagaactattggtgtaaaagcacaaagagagctgttaaggacccacttgaagctcatgtggccagcatccaaaaggtgcttagtttctgttcttaatccctgaacgtgtgtatctgacggtaacactgtggttacagcagtatctacatttgagatgtgataactgccattagtcctgattcctcctttcagtttgtgtgtttagaacacccctttctctaagaatgcaaagtaagaaagtaagatgtaaaaaaaaaaacaaaagaaaaccttaaagtgaaattactcaaaacacacacacacacacacacacacacacacacacacacacacacacacacacactctatatcaaataccaacatgcatttgggttaagggaaggagactaagtcaaatttagtcaaatcttcctgtttggagctaggcttggtcctgtagtcccagctacttgggaggtttacacaggagaatcacttgaacccaggagtttgaggctgtactgcactatgatcgcacctgtgaacagccactgcactccagcctgggcaacacagcaagagtctgtctctttaaaacaaacaaacaacaaacaaaaaacacttctgtctagtgatttaaaacaattgacattcttcctagcaattaaatgtaatactgtatagtagtttgtgaagaggttagtaagtcctaatttgaatttgtgttaaaataaaagacacaaaatgcacattaaaaatgtttctcatctctgttttctgaggactgctgcatgtcacaggttttaaaaatacacattttctatctgtgacctttcacatacatacctttgtcaagctcaactggagggcttaatctccactgcatcaaaaaaaaaaaaaaaaaaatgctgccaacttcaaacaaattgccttggagctggcttcacagagttatcacgcacttacccggagttgaagataactaccttgacagtggggatacaaaggcagtaatgatagtgcctactaccccagtctttagtctatcacagaattcaggagaagccaattaagtaatccttctgtttgtttaaagaactttcaattagttgcttatccagtttttaaattattctgatgcaaatccgtgaaaactagaaccacacttaaaaatcacaactaaagtatcatgaattgacagttattcaaacacataactaagcctcctttcccacataatacacacgcacatatacaaatacaggcaggtgaaatttagcataacatcatgtttttagagcacgaataaatgttagagaccatttgatcattcattacgttaattgaaacttagttcaaaatgttgcttcctccaggaagcctttttctattccctgggcagagtcagaatctccttccacacctcttctcctcttgagcgtcttccagtaactctatgttcacatagaggccaaggaccaggctttgttcagctttgtatcctaggcactaagatgtgcttattacatgtaacagatactctcaaggacaaagattaagagttattatgtgcttattaaatgaaacatatgaatgcaaatatattgtatgtagtatattaaataatacataagtatataggatgtacatttttaaatatacttttatattgttacatatattatatgtaactttatacacttttatatagttacctatattgtatgtaagttcttcagtccctcaagaaaatgacattgttttcttatgaactttttgttaaaattagttttatattagtagtaaataatatgataacttagagaggtagaattgggggaccacaattatgccccagttcaagataagtcactggcatgtaggagaaagcctcagagaagttacggactttcaggcagtaaaggacacagttgaattattcactggctagcctaaaatgggtctacccccaccccttgccttcagccccctaaaacactgaccaaacatgtaataagaaaagagtaattataggaggttcaccaccatcacactcacccctgccttcattaagaagtgtttaggctggttgcggtggttcacacctgtaactccagcactttgggaggctgaggcgggtggatcacttgaggccaggagtgcaagaccagcctggccaacatggtgaaaccccatctctactaaaattacaaaaattagccgggcatcgtggcaggtgcctgtaattccagctacctgggaggctgaggcaggagaatcgcttgaacccgggaggtggaggttgcagtgagctgagagccgagatcacaccactgcactacagcctgggtgacagagcaagactctgtctcaaaaaaaaaaaaaaagtgtttaaataaatgcctctggctttatttgaacagtccaggaataattcaagggtctgtcacagaattttgacaaagaaaaaaggtgggagggatcatgtgaagaaggccttttttcccccaagagttaagcaggggccaggcacagtggctcaggcctgtaatcccagcactttggaaggccaaggcaggccgattgcttaaggccaggagtttgagaacagcctggccaacgtggcaaaaccccgtgtgtactaaaaaaatgcaaaaaaaaaaaaaattagccaggcatggtggtgcacacctgtaatcccagctactctggagtctgaggcgggagaatcacttgaacccaggaggtggaggttacagtgagccgagactgtgccactgtactccagcctggcccacagtgagtctctgtctaaaaaaaaaaaagaaaaagaaaaagaaaaagaaaaaaaaagcttaagcagagatatgaaacccttccattttaagtgtcttttcccccctctatactcagaaatgttgtacttattttaggtgaaggcagatgatatgtctaactattcttgctgtgagtggtccagaagggcacagttttggaaatacacagatgaactgttgaaggtagtttcaccttaatttttagtccttgttaaatatttattcccttgtccattgttggtgactcagttgagcccactcgttaaaatccttttcacggggatagtcactcttatgaaaacatagacacctagagacatgtgggaagcgtagggtcatttaacatgtggcgattctacagcagttttcccattgtttaactggagagatttatttacagcttgtgttaggctgttcttgggttgctagaaagaaatactgggtaatttataaagaaaagaggtttaattggctaagcgttctgcaggctgcacaagcgtggccccagcatctgctcagtttctagggaggcatcaggaggcttttactcatggcagaaggtgaagcaggaccaggcacgtcacatggtgaaagcagaaacaagagaaagagggggtgggaggtgccacacgcttttaaacaaccagatctcgtgagaactcactcattattgtgaggacaacaccaagccatgagagatccactcccatgacccaaacgtctcccaccaggctccacctctaacatgggggatgacatttcagcatgaaatttgggggaacaaatatctaaactattcacaccttactaataatactaaatgtgcacagttaaatttcagataaagattgttcaattggggcagacacgtaattttttccattgctctttgggactcagatgaataatcttagtgtggtagagataagcctagctggtttgtcatgtgttactgtcagttcctttcaatttatgaagaaacagaaagataaattgggaaatgtcacattctagccttgacgaactttttagttggacttggccatctttcgagttgtaagaacatgtacttctaagggtacaaaatgtgtttccaaactctatggcatacagttctagcataacaccatgtcagtcaattgcagaaacttccaaacattttttacactgagagctctttggtcaaataattcttgcttggaagtaaatcccagtctgtgtgtgccaggcactgtgttaggctagagacagagtcatgagcaaatagcatctctgctctgatgtttcttacatgtgctagtgagggaggcaaacaaaaaacaaggcgagttcagattttgatcattgctatgaagcaaatacatagtttagtataatggagagtgacagttactgtggaacataggttccatgaaagcatggagcctatcctacttgtcactgtattttcagtgcctaaaacatagcagttactgtttgagagaatgttgtatggaaagaatgacaggaggcctgcctgaaaagatggtaggttaaagtggagatctgaaaggtgacagtcagctagatcttatagcctgattacaaagtgcacaaagtgcaagtgatgtgcaaaggcctcgaggtggaaagagtagaacagaagtgagaccagggtggctggagcccagtgagcaaggggaaagtggtctttgagcaagttggaaggtacacaggggacagagcatagagtgccttctaagccaattctaaagtggagagtttgaattctgttctgagaataatgggaaaccattgaagggttttaagaagagagtgatgcaatctgatgtgggttttagaaagataactttagctgctgaatacagaaaatggccagaatagaagcagggagactaatccagttacagtagtcctggcaaatgttgatgatggtgatttggagtaagatgctctgttaggaatggaggcaagtgaaaggattggaaatctgttttggaaataaaaccaagagtacttgctaatgggttgggttgggttgggttggattggattggattggattggattggattggattggattagattggattggattggaggaggaaggcgtgtgagcagaagaggaaaatcaaggatgatgcttaggttttgtgctcgactgagtgtatgaagtgttcttatgttagatggacaaaactggaagaggacagatttgggatgaaatcaagggctctgattcagacattttctttagaaattgtgaactcctcaggaggtatccagtggagacggttgggtatataagtggagctcaagagagaagtttggctgcagaaagaaagttgggagtcatcaacatagaaatggtattgaaacctgcaggactaataaaataatctagcaagagagtagagataaagaaaagaaggccagaatcgagctatagcaccgtcacacagttagtctgatagagtagaggagccaagaatggagatgggaaaaaatcagtaatgaggtagaaggaaaattaagagtgatgtcacagatgtcaaaaaggggagtggctcaagaaggcagttgttttggggagtaccatgaccacctactagtgatttgctggaaggactcactcacgactcaatatagaatcatattcaaggctaagatttattacagcaaagggtatggtgcaggaacagcaggatacagatatatggtggcaaaactagagaagtcgtagtaggctttcttgtcctctctctgtagggattccacatgtttctcaggaatgcatgtttctctccagctgtaaactgcagagacatatgcaaaacgcctccacccaggaaagcccactcaagtcttaggggttcagagctggtcaagggagctggtcgtgtagctatgtaaccagccaggatgcagaccccaaactaggtactaggatgcatcaggaatcttcatgtcaactttaaacaatgatactgtcttgatatattttgaccactgccttgagggcacaaaaataacataactaattagtaagcatttcagggagtttagtgctcaggatttgggtcagggtcattgctgtgactgcaggtgttcccaaagacaagcaagaactgagtaaaacatactggctatgttaactctttcctctagaggtcatggttaatgttgaatgcaggtgaaagtcaaaactgagagccataaagttaatttctatatcccaaagtatagttagtgaaattatatttctctccagatagattcattccacttatttagtaaacatttattgaatgcctaatatagttcatggcatgtgctagcatgagactataggggtaaataagttagacatggcacctgccctgaaggagttgacaaaccaataaacgcagatgtcattagctgtgtgcgagaatatgacagaggtctcacggctgagacctgaaggataagagatcagccaggtgaaaagggaaaggcgaggcaataaatagcacgttcaaaggcctggaggtgaaggagcatattgactttgaggagcaaaagaagttcagtgtggctggaggggagaaaggagaaggtgagtgtggggtagattatggaggaccttatacaggctgttaaacacgttttgcttcatccacggggagatataatcctaagggtttttgcttgataggaaaatgacagatttgttttcttgattgaaaaatttctgataattttacagttagttttgcattgcaacagagattctctctctctctctctttttttttttttttttttgagacaagagtctcgctctgtcacccaggctggagtgcaatggtgcgatcccagctcactgcaacctccgcttcctgagttcaagcgattctcctgcctcagcccccgagtagctgggattacaggggtgtgccaccatgcccagctaatttttgtatttatagtagagatggggtttcaccatgttgtccaggttggtctcgaactcctgaccttgtgatctgcctgcctcagcctcccaaagtgctgggattacaggcatgcaccaccgtgcccagcccagagattctctttaagaaatttggtgcaacagtcatttctgggacaaaaagtagtgagaaaatacaaacacaccagggtaaataaaccagagcgccacaaaatgtaatattaagtgtgtaaaaataataatccctgagagctatcagtgtgaaaagtttttatttgaatgccgtaattgaatggaattgttcatttaaaccttcaagtgaatttatttttatgtctaaaacttattagaaatgtttcaatggtgattatatgtagtttcttttttgccttcaacagagcacagatcacacagaaaggaatgattttttttttaatcagcaattttggagacaaattctatgaatgccaacctatacagaaactgacaagcattaattattcagaatgtaaagagaaatgccagagtattaaggaacagatacctagatttaaacataattttggaatattataattattatgaattacaaccacttatatttgaggcagtatgtaacagctgtgtgcgtgagcaggaacatgagagggaacgtaacctggtctcattttctagacaagccattcaagaggagcaaagagagtgggaaaatgaaagcaatgccactactgattattgaacatctttatctgccatgcactgtgctaggccctttacacattttccttctttaagctatttaaaaactgcgataagttccttacattcccattttataggcaagagcaaatagattttacagatgaagaaattgatgtcccaaaatgatatcttggtaggtgatagattcggttcggtaacccaaatgtgtcttttagcgatttatgtattcattcaacaaatattcattgagttcctactgtctaccagaacttttgtaaggggatgcaaagaagaacagacccaggtctttccctttatgaactagggcagtgggccttacacccaactgccgtaatgggaaaagcattgtaatggggctttgttcgttacagtcaacagtgcagtgtagggatgctttgtaagctggcctacagggtgattggtaaagttgagaaaggcttatcagggaggctgacatttgaacaaaggtttggatattaccaggcagagagatggaggtggtaggaattccaggtaaagcgactgggaaaacacatgctgtgcttgggtggcaggagcagtccagggaggacatggtgggactgtgctgcaagaagccttgtatgccaaggagatgagacttcccttgtacatacagccaaggataagaatttgatgacgatttctaatgtatcttagcatctaagttcccttaatttgtgctcactggaaaccacagagttttagaaggcttttgtcattgtggtttaaaagaaaaaaatagattgttcaaagaacagtgatacatagggaaaatattttgactcaggaacgtaatttctcactaaaattggcaatatttgtagccccatgggaactatgtttccataggacattctgttcgctgtccttgggaagctatctaaaaaaagaagaaaaaaacacaataaaaagaggtatttggggatcagtaataaaagttgtatactttattgaatgtgttactgtgtactagctacttatccatattattttaaatcctgacacctattaaataataggtagtattatccctgttttacagataggaaactgaggctcagaaaaaagtgacttgcctgagactacttagctagtaaggagcagagctgggaattcaaacccaggtctgtcaggattcaaaaccccagttcttccagtctctagagcctggtctctagagcctggagacttctgtggaggtgacctaggccacttcaataggtgaggagacagaggaccgcttggggatgcattccttaaatcagagcagctgattctatgaatgccaacctaatacagaaactgacaaacattaattgttcagaatgtaaagaaaactgccagagtatgaaggaacagacatctagatttaaacataattttggaatattgtaattattattaattacaaccacttacatttgaggtagtgtgtaacagctgtgtgcatgagcaggaacttgagagggaacgtatcctggtctcattttctaggcaagccattcaagagcagcaaagagaatgggaaaatgaaagcaatgccactgccgattattgaacacctttatgtgccatgcactgtgctaggctctttacacattttcctcttttaaattatataaaaactctgtgataagtttttttaagtatacagacttttgtgctaaattggaaaacccgtactggaacctgggggtgggggcggggcagaggtcttctaatgactggccttgtgctctttaagctgcactagctatcccactttgaaaagaatgtgtgaaacacagttgcagtcatgcatactccatctccaaagaatggattcattcttcaggccatagtatactgactataattttctgtttgtaattacccagattccaagcctgtttatagcatttatacctgaggaatggaatagtgaggatttgaagaggccgcagtccttgaggttttctttgataataatatctgtgtagctgcatcaaacacaaatttgatattctgtgtatctgtagcacaggtcatgtgactgtaaattcttttgatatcttgttgcatactgaggtcaaggaactggctcttgatgtaattccccgcatcctcatgggagttgttaccatcatactctggaaaacaaatgctgagatggattaactttttacactgggtttccgcatgggattttataggaataaaggttccactaccagcagtgagtagcctgaagtctgccacattgaccaggaacctttgcaagaataaaccgaggatgtgccctctgcaggtgaatgtgctaggctctctggggttgccaaggagtttgagtccccatccttgagtccccatcaactacatctagttgatgtacacgtgatcctttgcaaaggttctgagccctctaaaactgatcaaaattgcatctgttagaaaatattaaatatattctatatatcaagccaaatactaggagcttgtgtaagcaacagagtatcttggtggatcacgtgggtgttgggttaggcaaaagatcccactgttggccctccccacacccacatccttactatgctctgggcagacagagttactccaactatctcaaaatgcccagaaacccttaaccacctctactgatttgcctgtattcaggagcctccttcttcacagctgagattcagacttcattgagggacaaggtgaatgagagggtaggggacagtagggggcagaatctggtcatcaggaactttggactttccagtgagcacagactgagatacctcaggtgctaagactgcagcacccctggaggaagactgtacactagacaacaacaaggctggttggcaggacagcatctacccagcatccttaacatccgggaggagatgatggtgccgtgtagggacacttgaccctgcccatagcagcctcagcccctgtgcatcctgggagtgaagtgatcaggtcatgcaagtaactacatcagtcctcaccactgggatcattgctacagaggggaaggcttttccctgtgtgttggagatggagatagaagtgtattaatggaggaaaacaaaataagcttttacatctgctaaattaacagaatcccaggctgccaaaaccctgaggcttgctcaatcagcagtccaaactgtatttcctctaagggacaaattatgagctgctgtaaaggtacacacagtctagtgagaaaccattcaattttgagggggaaactctagggaaatagagtaagttaaaggagtagagtgtgccagtatgagaaggcaactctcctggagtttgagttccaaaactcagtgggctcataggtcatggtgtgatcttagaagtcataagtgaccaacaaggagtttaataacgccttttcttatactccctctttttacatagcctttataccaagttatcatctggcagtcattttagatataggtttctaagttagacggtagggtccaaatgaagtgtttggcaaagtcatcttaattttttaaaacttgatatgaaaaagatggtggtatcaggtattgaaattgaggagctatcagaatagggaaaaattccccatttatgcccatactcacaaatacacaaatatttataaacaataatgatacaggcaggcatggtggctcacacctgtaatcccaccactttgggaggccaaggcaggcagatcacctgaggtcaggagttcgaccagcctggccaaaatggtgaagccccgtctctactaaaaatacaaaattagccgagtgtgttggcgcatgcctgtaatcccagctacttgggaggctgaggcaggagaattgcttgaacccaggaggtagaggttgcagtgagctgagatcgtggtattgcactccagcctaggcaacaagcgcgaaactctgtctcaaaataataataataataatacaacttatttttttccctttggggggctttccagcaaaaaccagaaagcctattagacaaattttaaaagagctgtaacactataataagactgtttaataatggttgagaacacagagcccgaagaacacagattgcctgggttcaaatcctggttctgctgttcagtggctgtgatcttgaactactgtcttaccctatctgtgcctagttcctattttgtaaaatagaaataatagttctacctcgtaggttgtcgagagggctaaataagttaataaacataaagtgctcagaatatgattggcacataagtgctatggaagtatatgctactcttactgcagttacataaattgtgatatttggcagccttgaagcgtggccctgccatatgctttgtgtttaaaaccctcaaactactgtttattgagggcatctttgatgtcaggcacagggctaggcaatgttcctgctgtatctcaatgaatctacacaacaccctatgaggtaaataccaatttacagctttagatactgacttgccagtggttaagtaacttgcccaaggccacaaagcaagtacctggtagattcaggactgaagcttcaagtctagagagcttggctccagccgcagctgcagtttgggctgaccttgttcctgccagcacactttgggacctgggccatacaagttatagcatcctggacagaccctctattttatagaaaaggaacctgaggccctaggattaaatgaattgccagaggtcactctccaaagagactctgaggtccagattaggaaacctgaactaacattgaagccgtgtctttctgtataagatccaactgcttgtggtatgtttggccaaaaagactcaggttaaagtcagataccaaataatatattgacatctagcatatttatgcccagatgccgtatagcaaatcatccttcactttaattagcttatagttatatactcgacaatgtgaatgaacagagaaaaacaaggtatttttttttcatcttctaaatttgcttgggaaattcctccgtgtcttttacaggtttaaaaatcatgtttaacgataatgtagttatcttaggaaaaagaccaacccatttttatcactctttatcattgggccatcacagatgagagctttctatcttatagaatcatttgcacaaagtatatatgaggatatacagcattgtatttgtagcatttcttataatagtaaaaaaatgaaatgatacagtcatctagttaatgccactgagttgtacacttagaatggttaaataacaaattttgttatatgtgttttgccatattttaaaaaaataatagtttaagaaactagtgacttgtatacttaaactgagtggattgtatagtatgcaaattatgtctcaataaagatattttttaaaacccatacatttatccatagagaattggtcagattatgccaaacccagtcaatggagtattttacaacctttattaaagaattaggtagatttatatgttttgacatgggaggatgtccagaatatattgtgaagtaaaaaaaaagttgatgtgcatttccatatgctgtatacacacgtctacagttttgtcttatgagtaacactcttgtaaatgtcattatgcaacttggctttttcacttatgtgtgttatgttagaggttagtacatatagagatacctcatttttttaactgtttcaaactattctgtggtataatcttatcttagtttatttagtcatttccatattgatgagtctttaggtcatttataacttttagatatttcgaagaatgctgcaataaatactgttaaacaagcacattagctccataatttcccaagataggcactactaaatcaaaaagtacatgcatttttttcctcaagtttctttctttcattgatgatgctcttcttcctcctcttcttcctcttcttcttcttcttcattattattattattattatacttttaagttctgggttacatgtgcagaatgtgcaggtttgttacataggtatacatgtgccatggtggtttgctgcacccatcaacccgtcacctacattaggtatttctcctaatgttatccctcccgtagcccccccaccccccaacaggccccagtgtgtgatgtttccctccctgtgtccatgtgttctcgttgttcaactcctacttatgagtgagaacatgcagtgtttgattttctgatattctgatagtttgctgagaatgatggtttccagcttcatccatgtccctgcaaaggacatgaactcatcctttttatggctgaatagtattccatggtgtatatgtgccacattttcttaatccagtctatcattgatggacatttgggttggttccaagtctttgctattgtgaatagtgctgcaataaacatatgtgtgcataaaaggtatatgcatttttgtgcttgatggatactgacagattaacctacaagaggatgtattatttacactcccagccccacgtgagtatgtgtatttccccacatcctaaccaacactaatttttttccattctaatgggtgaaaaaaaaaatctccattttaagttgcattttcactgagcatggtggtacacacctacagttccagagacttaggaggtcaagatgggaggattgtttgaggccagggccaggagttcaagactagcctgggcaacatagcaagatcccatctctaacgaaaatttttttaaaaactagccaggcatgatggtgcattcctgtcattccagctacccaggacaccgaggctggatgattgcttgaacccagggccatggtcccaccactgaactatagcctgggtgacagagcgagaacctatctctacttaataattagtagcatttacatgattgaaaatcagaatgaacatgttttcacattaattcaacattagataaacattgaggtactgccccagatgaacaaacacaaacccctgcccctgtggaacttctgttaaactctattggtcatttctatttcctcatgccatttgcctgtttttctatttattcatgctttgttatgtgtgtggcaaatattttcacctcttctgtggcttgtcttttgagctccattttcagtatctttggccttacagaagtttttaatttttatgagatcgtattcgtcagtccttttctttatgcttttatgttccatgcctcacttaaaaaggccctctttcccccaaggtcataaatatattctatacccttttcaatatttttatggttttagtttttatgtttagcacctaactccatctggaatctatttttgggaatcgagtggtatgtagatagatttcatgtctgacaatatatatttttgagcactcaaatttttaaaaagtatgtatgactttggtaagcagaaagagccaagaggagtttgaagagacactcagaaagtggatgtccattctgggtgggcccaggagtttgcaattttagcagatacctccagagaaaagagaaagtgatgagaaaaaaaaaaaaaaagctgtgtcctgtggagtagattcaggtcataatggctgtaggtagagacacagcagaaagagtagccccgggttggccttgtatcctggtacctacagcaccttaggaaatacataaaatacatgaaatgtcacagctttgcaagaactagaagaccagccagaatgaatcagagaagggattcttcagtgtttctacttgtaatggaatttttaatccctcatctggtacaaaaatgagtttgagataatagtccatttaaaaataacccaagccggtgtggtggcttacgcctgtattcccagtactttgggaggccgaggcaggggaatcacctgtcaggagttcatgaccagcctggccaacatggtgaaacctcgtctctactaaaaatacaaaaattagtcaggtgtggtggcgggagcctgtaatcccagctacttgggaagctgaagcaggagaatcacttaaatccgggaggcggagattgcaatgagcccagatcgtaccactgcactccagcttgggcaacagagtgagactccatctcaaaaataaataaataaataaataaataaccaacccagccctggattaatgatgaattttcattctggctagcaaaggttagcaaaagtggatgactacatgtaggcatgttaattaacactttttagattctggaaaaagaatgttgtgtggcagaaatatgggtacaaatgtgcaagccttctgtagatgattctttaaaggcaggtggagtgggagccgctgggctaacctaccccaaatcactgcacttcctttcttcccttgtcattaaaaccatatgacccctttagtgtctgtgttgcactcatgagttcagaagttccaatgcatctatcaaacacatgtgtttgcctactgtgcatgttgttctaagtgctccttcactgcttctgacaaccctatgaggtactattataagcctccttttacacatgaggaaactgaggctccagagagttaaataagttgcccatagtcccacaggcagtggtggcattgggatttggactcaagttgtctagctccaggttcgcagaatcaccctaataatgtgccctccaaattggctatttcagcaactgcagtgttcaggaaagaattatactctgatgagccttcatgaggcagggttgaaaaacctgtgtcaggaaaagatatgacaccttactggttatcagaccatgctagaaggagcctctttaaaatcgaacaacagagccactgctctggtgcaagcagcactctcacccagccctctgacctcagtcacagtgtgagctctatagttcctggcaaactttagccatggggtcaaaaatggagaagcgtgccttcaggtataagatgtgatgtgttcatgcagggattagctctgtttaggcttaattctggaagccagggttcttaatttggttcccattccctgacggaatactatgcagtcctgataatgaatgatttacatttatacaacagtatgcatggatgcaccacaggggacagtgcctggaaataggcacaagggtgctttgaggctgctgtctacacaaatgtgtgtttagtttatgaaaatccacagtggcgcctgtaatcccagcactttgggaggctgaggcgggcggatcatttgaagtcaggagttcaagaccagcttggtgaaaacccgtctctactaaaaatacaaaacaattagccaggtgtgatggcggatacctgtaatcccaggtactcgggaggctgaggcatgagaatcacttgaacccaggaggcagaggctgcggtgaaccaagatcgtgccactacactccagcctgggtgacagagtgagactttgtctctcaaaaaaaaaacaaaatctacagtgagctcttcagcatatagctttctctgcatattgtattccatgtattcattgtactggattcaatgtacagtattctatgtatattgttatttcactgaagagttttttcttaatggcgtgaattagagtcagctgaggtatttgtgaaaaatgcagactcctgaactcacgcctcaagattcctgttctggatggggcccaggagtttgcagttttttacaaatacctcaggtaattctgctgcaggtcatctgaagatatacctgtaagaacatagcaaagctgcagacctggtctgctgttgatgtgcttaatactgggcatcaataggactctataagtagagcaaaagaatgacttgagaatgactaggctcacacattgggatggtaggaaaacagcctggtgcactgcaagggtaacaccatcttgaagcgaaaccaccacgatgaccgatgcttgagtcctgcatgccaaggtgttcttgcagcaaggccaagaaacaatgcctgtagcacagataacccctcataaacatgcttatctgacttccccagtggtcaccagtgttccccaggaggatctgagacatgaccagctgtctttactctaaacacttgctatataaaggatcatttctggtgggtggacacagggactcactttctggagcagcccaagacatcgcttctatttgtaagtccctattaaatattttttctgaagaactggatttatcagcctctttcttaagcctcttagttccctctgcctttgtgggtaggtttgcgtagacctactcaccaagaaacaaggctatatcttacatgtatccatgattttttttaatgcacaaaaatgtaaaaagactatataaaatacctacaacaagatttctgttggccaggtacagtggctcatgcttggaatcctagcattttgggagggtgaggcgagtggatcacttgagcccaggagttcaagaccagcctgggcaacatagcaagaccctgtctttacaaaaagtacaaaaattagctgggtatggtggtatgtgcctgcagtcccagctactcaggaggctgatgtgggaggattctttgagcccaggaggtggaggcagtggtgagctgagatcacaccactgcactatagtctgggtgacagagtgagaccctgtttaaaaaaagagagagagagagaaaaaaaaagatttctctgaatccttctcatgcgtatcatgagagatgttttaaaatgtttctatattttggccgggtatggtagttcacgcctgtaatcctagcaccttgggaggctgaggcgggtggatcacctgaggtcaggagttcaagaccagcctggccaacatggtgaaacccccatctctactaaaaatgcaaacattagccaggcgtggtggtgcatgcatgtaattccagctactcgggaggctgaggcaggagaattgcttgaatccgggaggtggaggttgcagtgagccgagatcacaccattgcactccagcgtgagcgacaagaatgaaactccatccccccaaaaaaaccacttttctgtattttaatgcacagtttaaaaatgccagacctggctctattctacttaggtttctgttcattagataggagtcattcatgtatgactgaatcactatgaggatcctcctctctctcttcttccccttccacccacatgccaggctgtggttcagactgccttctgctttctcacgggtctctgttgtgtgatcttgtgcccacctctctgtgtgttaaatggagagagtggcttgaacagtaccctcatggttggtcttcaagagctcatctaattctgaatggtagttgggcatgtctgaaggtattagcaattctgttgctcagcattgctgatgtattgagcaatgtgaaaaccttggcgaatcttgttgccatcttcccctaagaatctgcctcatcctgaagcccaaccatttgactctgtggtaaaatgaagtaacttcagtaaggtccatgtctaccaatttcttaatctcatttgaggtaaatagatgcacattatcagaaaggactggccactatgtactgcaaatgatgggcacagagttgtgattgtcccagcagacttgagatgagctagggatacatcagtccattatgagacggtatctgttatagtcaagagtgtctctggaatggcttcttgtaattatttggactttctaccaaggtttctgtgccatagcctatggaaaagtagattcctttcaagagacctgacttgccaagcatggtggttcacacctgtaatcccagtgctttcaggggccaaggcggtgggatcacttgaaaccaggagtttaggaccagcctgggcaacaaagtgagacccccatctctacaaaacattagccaggtatagtggcgcatgcctgtggtcccagctacatgggagggcaaggcgggaggatcacctgagcccaggagttccaggctgcagtgagccacgttcacaccactgcattccagcctgggcaacagagcaagacccagtcaaaagaaagaaagaaagaaagaaagaatgagagaaagggagggagggaagaagggagggagggacggagggacggacggcgggacggacagagggaaggagagacagagggagggaggcctgacttgtatatttatgtgcacgaaatccgttctaggcctctgaatatggcacctggcccactctttcttgagaacagtttgccagtgagcaatgtgcctcatgtcctttgtgaaactggcagagcataaattattaatttaaaatacacaaactaagatcaagataagatgtgctttaatgaacgggtaaactcaaatggcttattaacaccttcatttcctcatgctgcttctgaaatgggcatttctcaacttacattttaaggtaggagctgatctgagatgcaagttaattatacagtttgtcgaagccaaagagttgggtttgggagattttctgacctgaaaatgttcagtggcggtgcccatgtaatcttgggcctactctgacagacagttcagagccttaacattcagtgttggtcctttggatatattgaacataagctacagtttacgggtatgagaggacattattgactgagacttcaatagttccaaagggggaaaaaaagagaaagatggcttttttaaagctactgtcttcagctcaggaaaaaacatgtgatcagccgactgtaaatgcacagcttgagaaatttagcaattcccaaaataggttcaagtttctttgtgagcatgtaggcctacttgcaggtaacattgactttgttaacaacgtttgttaacaataacattgtaggcagttaatgtctcagagctcttatagatacaaaagaaaataaacttacaacttccagaaagcatcttctcattgatgagtctaaataatgctcatctattggagaagcaacttgttaatagtgactttttgtcacttttgtagagtggggagagggacatgggagatgaagctcttactttatttgggaagtgagatgtctcaagttctttattctaaaaaaggtaaacatcagttgcctctgaggtagtaatagaagaaggtctgttttactttggaggaacattaaccttagagtaaaacaaacgaaaacacagttcaaagcccaggctgtctgagcccatctcgtcatttgtaaaatgaggataataatacctgccttacttatctcatggtgtttctgttgaggattaaatgataaagcactttggaaattatgtaaaatatctgtattttaagcaggtatgatttcccgaaatccttgagtttttcctctgattccatgattatgacatcacttaaatatgccacccctctgctatcctaataccccaaatctcagtgaaacactggaaaagtccgaaaccaatagagatttctaaagcagatccccttattatgcccctcaattagtgatcattgttagtgggtctgctcagagcatcattgccaagtgctttgataagctgaagaaatctgttgataatttcttgaggcatggtatttcagtgtgtggaatacttgggtactagttcttgggagttttttaaagtaaaatacttatatttgtgttgactttgcaacagcaggtacagcaaatttcacatggtaccttgctacagaaattaattagtaccactcatggtttaaattatgtagaatgatagtatgctcatattcttcttggctgtcttaaaaatgaatagaaacaaaaaggtaaacaaagctcatatttacctctccttggaaagaggttgagtgattgtcatgtagcttctcatttatcaagtatgtgttatgatttcgttaaaggataaattgaaaggattcttaaagcaacaaaggtttggtcctgcattgatgcatattaagtaaagtagagctcctcagttggcattcccaggctgggtgacacagaggtgcctctttctgatactctccttcccagctcctgtgccatcccctcccctctccccttctctctcctctctccccttcttctcctgtaatacttctgctacttgctctgttctacccagagactgaaggaagtgagtggtgatctaattgagactgaataagtccgaacatttattttccttccccttcactccatccaaagtccaatcctgaggaagacatggaggttatgattaaacttgcccaacactcaaactttactgactgcttattcttatgttaatcacttggcctttgctagattaatgactgagtgaccagaagtctcaatgatcccataaatcgtatgattttaaactatttgtgtagcttttgctagttgtaataaaaattttcacatgattttttttccaaatagagaggtttaataaagctaatgtgcttgaccaggttttggagagtttacatactaatttcttaacccctttctaatatggttagtatagctctgtgttttcatcagagagaagcagactgtgaattcctcaccttggggcttccattctccctccaggtggcctcacctttcaggtgaacaacctgacctctctggctcctaaatcccacccttacaagccgcaggagccggtgcatgggggcatagtttcttacctttacctttttcaaacctttccctcctcaccagcttttttttaagactttattttcttagagcagttttagagcaaatttgctgtacctactgtggcaaagtcaatacaaatataaatatttacttaaaacccaagaaccagtacccaaaagcaaaattatctaaagcaaaattgagaggaaggtacagagatttcccacataccccttgtccctatccccacacgcgcatagcctctcccatgatcaatatcccccaccagagtggtacatttgttacaactaataaacctacactgaagtaggggtttggacaaatgtataatgacattgtagtatcatacagaggagtttcactgccctaaataccctatgtgccatcttttcatccttccctcctcactagcctttggcaaccactgatctttttattgtctccataatttcgcctgtttcaaaatgtcatatgcttggactcatatagtatagccttttcagattggcttcttttacttagtaatatgcatttaagtttcctccatgtatcttcatggcttgatagatcatttcttttcaacactgactcgtattccattgtctgagtgtaccacaggttatttatcccctcacctactgaaggacctcttggttcctttcaagttttggcaatgataaataaaaatgtaaatagctgtataatttttatatggacgtaagttttcagtttattttgttaaataacaaggagcttgtttgctggatcatatggcaagagtaggtttagttttgtaagacacttgcaaactgctttccaaattggccattttgcattcccaccagcaatgaatgagagttcctgttgctccacatcctcgccagtatttggtgttgtcagtgttctgaatttttgccattctaataggaatgcattgatatctcattgttgttttaatttgcctttccctgatgacatatgatgtgacatatgatgacatcttttcatatgcttatttgccctctgtttatcttctttggtgaaatgcctgctgtttccatcttttgtccattttttaattgagttgtttattttcttattgttgggttttcagaattctttctgtattttggataactctttcatcagacatgtcttttgcaaacattttctccaagtctgtggcttaccttttcattctcttgatccctccagctttttatttagaaaattttcagtcctatagaaaaaaatacaaaaatagtaaaataagcactcacacattattcatatacatccaccagttgttaatattttgccacatttgctttatctctctcatgagctccatctgttgattttactgaaccattagaagtgataaatggcatgtcacatcatcccaaaaaacaccaatatgcatctcctaagcatgacttcttactgcctaatcatgacacatcattattaaactaaaaataataactcagtaatatccaacaacatactgcatttttaaagttctccagtagttcccagaatcaaatcaagcaaggctcacccatcgtctacagtctcacaatctaggacagttcccctgcctttttttggcattgaccgattcatattgaaccaattttatgtcattggttgattcctaatgaaccatttccttgtctacaagctcttggcttgccctcttacagtgatgagttggagtctctccatgacagcaccagactggaaattcttaacatgctttccaggctcattaacattgagatagtcaaaatctacacgatgtcctcaataattttgagaacaggccatgaaagaaaatgttgtgaaaaatgtgtttatggttaatgattcaacacagttaacagaggtgacttggctttctgccctgccctcatggcaacatgcggcttcccagttcagcactgtcctctgctgttagggcctgggaattctgaatgagattcagtccttggagttgaaaaagtaatttacctgatgcttggtggtgtgaatgtttgtgacagtttttgtgctaatacattttgaaggacatgttctctcaaaatagccccttccactttctgaatccacactccagttttctttttaacttcagtgagtggtagtctatttgacctgatgtgcagatcttctggcacatacatttctgctgtctcttggcataacaaattggcagtctatccctatgttatgtacactgtttatattgaaaatttgtctttaattggtctgatactacatcatctgctagggccagtagtttgtcatcagccaatttgtacacctgaggccctcaaacaaacacgtgcttacaatgtttctggcactatttttaaagcttgtaagaattaaatgagatagcacaacaaccccatgagggtaagtaccgttaatcccataatatggatgaggaaactgattcatttagagggattaagcaatttgcccaataccacatggctagtaagtgacagagctgggttttagctctgacactttgattctggaacctgcacatttcatcattatgtcagatgccctgaagaggatactgtatatcatctcatctcacatgctgtgttcaggcaggtgacgtgctgctcaatgctggttttgatgtctttactaaactactgatctatttttgagatttaaatctcaaaacagtgatactagtgagaagtagtccacctttgttaatccaccaaatgttccggttagggaacctaattttggtaacttcaaggcctctcctgctattgggagctaagcatccttcactctggactctcacttgcttcactttagaatgagagctttttagggtaaaactcaggaagtaggatgactgaaagaaaagcctttcttctccacagtagcttatggggaaactagtaaattaattgccattattccttgccactaaaggatgagttcttatggtagcaataaatagacaatagggctgtgcagacctccaacaaactgtcttttctggggtcaaaaggggtctgaattaacctcttcttaaattacagctctgtgacacctgcaggcactcataacaaataagaacaccaggccaggcacagtggctcatgcccgtaatcctaacatcttgggaggctgaggtgggtggattgcttgagctcaggatttcaagaccagcctagacagcatggcaaaaccccatctctacaaaaaaaaaaaaaaaatacacaaattagccaggcgtagtggtccatgcttgtagtcccagatactcaggaggctgaggtggctgacttgagccctgggaggtcaaggctatagtgagccatgattgcaccactgcattcctgcctggctgacggagtgagaccaatagggcagcaagaaacaaaacctcaacactgaaccggaatgtccatgacatactgtaaaaaaagaaacctcaaatggacaataactgtatagtgctagttgtaatgattgtgcctttttttttttttttttttgaaacggagtctcgctctgtcacccagactggagtgcaatggcacgatctccactcactgcaacctctgcttcccgggttcaagcgattctcctgcccaagcctcctgagtagctgggattacaggcacacaccaccacgcccggctaattttttgtaactttagtagagacgaggtttccccatattggccaggctgctctggaactcctgaccttgtgatctgcccaccttggccaagaaatctctttaagtattcatttgtactttaaggtaatgctcgatctcgctcttagtacagctgaattgtccttcaaaaagatgatctggttatgtttgacctcttcctcaagggaccaaaaagggaagttctcagctttttatagtatgaggtccctagaggttttcactttggggatttaaaaacaagtttcctgtagctatatggaggaaaaaaaaaaaaaaacctaaaggggaacatggaagaattataatgattggggcatgataattatgtccagtttttaaaactccattcttaaaaatgtcttataatttataggttaaaaatttaaatgtttagaggaagcaggacaggtttatgagtctctgacctgggaatggagtgggaggaatagagaaggtggggttgcaagaggagaaaggcagaggaatttcctaccgtcttcctgttttttgttgatggttagtgattaatgagacaagctgttctgtttctctgggagtcttgactgtcttgaagaaaaaaaagaaaatttattgcaacccaatgcagcttcagatttttcctctatttttttttttcaattaaaaacgtaactgtccctaatttaggaactgaaattcccaaacctccccattcacctattcaggaagaaatgaaatggaacctaacatctacatttcttgggtataatatcaaaactttaatactatggggatgaacatgtaagcaaatgcaactctatctccccataatgttggaagaatctaacttgaaaccagacatttggtttggatcttggcactttcttgcatggaaatattccaagaaggtgcattgactcttgatttgatctagaaaactgggttctttccagagcccacccaggatggcacctcatagactaactatggacttttccatcaatactggaaaacagtttcatctaatccccggaccaaaggtgactcggactccaagtgagcttcctcaggtttgtttgttaatttatccaatcatccattcactcagcaaacatttatcaatcatttgctatgtatatgccagacactacaccagattttgcaagcacagagatacaaaatcccttgcttgcaggaaaacctttggtttcaataaatgataggagaggggttgcaggggtactatctatgaaagttcaaaggaagcatctaacttagggtggtaggggatggggctgagcagaaggatcaggaaggtgttggatggcaggaggcttttagctgagccttgaaaaggcaaggggaggttggccgctttgatggggtgggctaaggactatccatgcagaagaaagagcaggtattaaaggtgtcaaggcagggagttacctcctttgggaactacacataaagaagaatggctagggcctggtgtatgggattggggtgggaaacccaaggcaggaagaagacagatcccaagaggtctggtgtgcatgctgaggggatcaggtgccatctcaatgccatggggagtcattgaaggaaaagcagttagagccatgggatccagttcacatatgatcaatcacccaaacaaaggaaagtttactcaacaacatgttttcatttggacttcattttgtcaaagcatgaaagtgatgtcagaaatagaaatgagtgtattcatggcacaccaccacacccagctaatttttgtactttttgcagagaactcctgacctcaaatgatccacctgcctcggcctcccaaagtgctgggattacaggcgtgagccactgtgtctggcctaaaacacattttctaagatttctttacttctgggccacctccacaaaattttatggttctgggaacccctatctgaaaaagcacaggtatcagcaataagtataatgaacactcactagagggaaagtcattttggtttgggttggttatggaagcagtgtcatatgaaaagggctggactgtactgcagaaatagaagacccacaaattgctatggcttataacagaaaaataaagatttagatgtcactcatatgtccattattgaacagttgtgactctgctccctgtcaccttccctccaggaccgaagctgacagagcaccctctatccaatcattgcctgtcttatgtcagagggaaaggagatggcaaatcatgcatcagcccttaaagctctgcccagaagtggtacattaccatttctgcccacatttcactggccagagcaggtcacatgatatgcctgagttcattagggcaccagatgttgggcaaccaataatacaacccaccactgaggtctttactaagaagatgacctgggccttagggaatggccatgatttacctggtagacacagcaggggagcaaaaggaaaatatgacaatatttttatgaaatcaagacttggccacatgaaacttttttttttttttttttttttgagactgagtctcgctctgtcacccaggctggagtgcagcggtgcgatctcggcttactgcaacctccacttcccaggttcaagtgattctcatgcctcagcctcccaagtagctgggattacacgcaccaccatgcccagctaatttttgtatttttagtggtgacagtttcactgtgttagccaggctggtctcaaactcctgaccacaagtgatctgccctcctcagtcttccaaagtgctgggattacaggcatgagccaccacacctggccgtgacacccttagaaaactaacttcaaggcagaatgcttcacagtgacaaatcttaggatgccactttatagaaatattctgaagagagaaaaacccaggtgagtcagagcagcctggggaaacttcttagaaccaggattttgtggaattcagaggattttaaaaggcagaaaatccaatgaagccattttaagctaaaacaatgtaaataaggtggggctgtgcctagggtactagggtgcagaaaggaacctgcctcctgtgggcgcatttgtgttagcaggtagtgggaaattcgggtggagggcaggtgatggaggaccctgaacaccgagggaagactctggatgttatgtgccaatatttatcaagaaaacgcagtcctggagatacaccaataatttttgaaatgttacagtagatactaattgaaacctacagtgcgccaggcaccgttaggttagcagtgaacaaaaccagcaacctaaacaaaatggtgaacacaccaggcagtgcccttgtgggttacattttggtgagacagatagtatatagataaacaaatatacaatctcaaagagtgaaaaagttgtgaagaaagatgacacaggattagagagtgactagggtgtatatggtggcagtggtggtggtggtgcagccaaggggtggggtggaggacaagacagctgtgaagactggtgagcatgaggtagtccctggtaacaaccagcgctccacaccctaccctcagagtgccattgcagggttagcatactccactgagtaaagcttccttgtccaggcaatcagttagaagagccaggaatgctgggcccaaagaggttggccagagagaaaagtgcaggggacatggttcccagatccacgcagaacccctggggaccactgagttccacaacctcaacaaggcccagggttatactaacacagcaggtggcctcattttagaccccacaccagaatctgtgcaacgggaaattccagtgcagcagaagttggagtcaaatgcctgcctatttctcattccattttgggaagcctaaacagggaagccttctgtgttcctctcattcccatattaaactgaactgcaaaactcatggctctaagtagactttagaattgacctaggcagaagaaatagcccagccccttcattacttcagagcagaatagagcacttactcttatcacagcagcacaagacccctgggacacctgactccctgagacccttccttgacaggttcccctgtccataaacaaagtcaggaattcccagcccactacacagaatatgacagttaagcttcattgggatcctgtggctgacctggggcaggctagagggcatcacatctgtacaggctctcagctttgcgagttcagaaacagactgggtgttcatgtggactggcccaaacctgaaactctacagaaatcgcagtgcatgccaggtggtttgccatgaaaaaaggtgtgtgtcccagagacagggtgtgtatggtacaaatggattttgtccatgtctttccttcccttgccagtccagccaccctactgtctttttttttttttgtcagtttttgtttttttttaatttaagttctgggatacgtgtgcagagcatgcaggttcgttacataggtatacatgtgccatggtggtttgctgcaccttatcaacctgtcatctaggttttaagccctgcatgcattaggtatttgtcctaatgctctccctccccttgcccccaaccctccaacaggcccaggtgtgtgatgttcccctccctgtgtccatgtgttctcattgttgaactcccacttatgagtgagaacgtgcttaccctactttcttttcggtttgtttttttgtttgttttgagacgagttttgcttttgttgcccaggctgaagtgcaatggtgcaacctccgcctcctgggttcaagggattcttcagcctcagcctcccgaatagctgggattacaggcatgtaccaccacgcccagctaattttgtatttttagtagagacagggtttcgcgatgttaggcaggctggtctcaaactcccaacctcaggtgatccgcctgccttggcctcccaaagtgctgggattacaggtgtgagccaccacgcccggcctacctaccctactttcttagcctatttgctgactagcattcaaactgagtgcagggagaacacctagcagcctgatcccagaagtgcagctactccacattccacagctctggggcagagtgactaaggctcacctgtagtccttaaatggagagcaatttgggatgtaccagctaatcaaataaaaccaaggcagcaaacaatagccatcacttctcaaaccatcctcattgtgcccctcgactccctccttccatttccagttctccccagaggggagacagacaataacctcaacaacagaagccagtacacagcaagcttgcttcacacgttcacgtttcttttgtttttctttgatgttttttctttgatgttttccattttccatctctgaggtgattagcagtacagcatagtggttaagaacagagcagggactccacggatagactacccagtcttgtcctttgttacagtggttcttaagctttcaggtgactgggaatcacctggagagcttattaaaacgtagatttccagccgcgtgaagtggctcacgcctgtaatcccagcactttgggaggccaaggtgggcagatcacttgaggtcaggagttcgagaccagcctggccaacatggctaaaccccatctctactaaaaatacaaacatgagttggccgtggtggcacacatctgtagtcccagctactctggagactgagacatgagagtcgtttgaacccaggaagtggaggctgcagtgagccgcgattactctaatgcactccagcctgggggacaaaacaacaaagcgagactctgcctcaaaaaaaaacccaaaaaaacaaaacaacacagattactgctccccaaccccagagtttctcattcagcacatccaggatggaacacaaggatgtgcagttctaactagttcccaggtgatactgatactcttggtaccatgaccacactttgagaacctctgccttatgaagtttccaaagactgttgacttgtgtgtgaaaggataaccctatacctaccacttgtggctattagggttaaatgagtgaatatacgtaaaatgctttgagctgtgaataataaaatgcaagcatagctagtctggaaacttcgcccatgccttttgtctctgttttgtttgttaacctccatttgttttgtttgtaataaaccacttagccaggtacctcttcctctccttcaaatacagagggcgtgtgaactttggagaatgagtgtttaaactgacctaaataatatgtgattttcaactcttctgtggattcactcattattcaatgtgggctttgcgtgccatatgtgataaacttcttgtgtgtggggtatagtgggaatgtgcatacgtgaaattgatgtcagatctttggatcgttgttagggaagataaaaggaactcacactacagtgcagccttgccagtagggctgttattcccacttacgtggaagaaactgaaactcagttcattgaggaaactctctcaagcttggacttaggtcagaggtgacttgtaaggatacacacagagaaacatccaagcctgggaaaccagctgatctattactctgtgtaccagaactttatgtatcagaccaaacacacaacaagcctcacgaaaaactggaatgtgcttcacatcactgcagctttgtcccaatgactgggccacccaaggtctctgcttctccctaggcatgtcccattgagactctccacatagagatagtctgatggagttgtgacattaacacccaatgtggaatgtcccggtggggtggcctcggattcagttgtcttgttctgtaatcagtcatagccaggaagaaagcccagtcttgctccaggagcaaaccgtagcagcatgctgctgaaagaactgcctggggactttttccccagagtggggttggctttggcctgtctagtactttcagggacattgaggcagccttagatcctcagaagagcacagatctttggaatcagacagacttggatttgaaccctgtttctgccacttaagtttcctcaactatgcattgtggctatcacacacctcacaggtgtgaagatcaaataacataaagtgcttagcagagtgcctggcacatagtatctgcacttaatgaatgatagggtttggtttttttttttttaaattaaaaaaactggaaagatggaaaggtgaaaataattactcagctttatcatcctatcatttagcctcttatccctgacagtgtgccattttcaatcctgtagggatgcattcattattattaattttttaagagacaggtcttgctgtgtcccaggctggagtgcagtggcacaatcataattcactgtaacctcaaactcctgggatcaagggatccttgcacctcagtctcctgagtgtaaggttcttgtattggttggaaccctgagagcgcgccaacagaaaacacgaggcggtgtgaagcaacatgctgttttaatgagcacctgggtacaggcaggctgaagcctaaaatggcatcagccccaagtgaggacagggcagaggttttatagtctcttgtaaacaggaagtgtcctagtctgacgtaactgctatgttgtacccaggtggcctgtttctcgatcaggggtacatgtcttcgtccagggtaggtgtcttcctgccggctctcttcctgcttctgctatcttgctgacacacgctgctgacacaagtggacttgcgccttgggactgggcctgagaagggaggagttattcatctccttaagctttcaggccccggggagaatcttataccgcgtagctaggattacagacacatgccaccacacccagctaatttttaaagtttttgtagagatggcatcacactgtgttgcccaagctggtctcaaactcctggcctcaagtaatcctcccacctcagcctcccaaagtgctgggattacaggcatgagccaccacacctggcctcatccattatttaatttaaggctttatatgctacgaagctataggtttttaatagaaagtctgttttacatggttgtaattatataattttgcattctttttccatactataaaatattttaatgttataaattctgtacgtaattttagtgaacatgctataatttacataaaattccttatcattggacacctaacaatagagaattgattgaataaatggtagtgcattcatataataaaatattaatcagccatttaaaaaggtggattagaagtatacttcttaacatataaacatgttcacgattatgtataaaatgaaatgagtgtacctaaatatcaactacctctcaagtctgtctggacattttcctacctcagtctcagcaactttcaaactttaatgagcctcccaatcaccaaaggaacttgttaaatgccagtttcacgctttaccccaagagtttgactgagactggggctcaggaattggcacttttacaaggatcccaggtgcctctgatgtgggaaagacacctcacctatttctgcctgttgaagctatacttaattttccaagcttctccttcttctttctcctgaagtcctgtagtattttgtagcacttgtctgctttcttgtcttagagatcttagcaaatgcttctaaattgtaaaacttttcctgatcctccaaccaaacctagttatgcacccatgtcacagccccagaatttgtgttaaaccctgtgtgagttgctgaatataaatactgaaatctctggaatccaaacttcatttactttgtggtggagagagagtggctgagtacttcagaactctttagaacacctgttatagcaggaacttttgggaataaaggtggtctttctaaccttgatttaaaacaaaaacaaaaacaaaaccttgtttagattacttttacttacctgacagtcaggttgtgaaaagtaaatagtttgtcctttgtgcatttgctctggtctaggccagagatagccagtaagctggagagggcagttaaaacccttcaagaggcctgtcattccaaagaatagttttcttcaggtctgttggttggttttcattctcagactgtgtcactgaggttgttcaaggtaagattcttatcttgcagttcacttagggaccacttatgctaaaattgagactgagttactcatcaaagtacttcttcacttagatttttatcagtgtgatttccctccttctttaaataatattggatatccatatcaagtcaggtttatgtcatcttacattatcttttatgtaataggccagcttgcagatgcatagttataaataactattgataaatattatattgagatgacactgaaattttgtccttgcttgtaagagaactagatcatattctgtataattagttaacacaaaagaattcctcagaaacaaactttaaaagccaggtataacagctcactcatgaaaagttccttgtttcatatgaaaatggtaactttgtagaagtaaagctccagacaacaaagaattgacagggttggggaatggaaggttaatgaaattggttaatcaaatgcttctgatggggaatcaccacatgtagtgtacttgtccacatggcaaactcggaatcactcttcagaaccttgtgtagaggcatcatctataaaaccctgcatctgtaaggctttttcatcagccccctccttggaaaaaatttctttttttattctatgcccacaacagtacactacacacacatctatcatatgtcacactctagtatatgcttgtgtgttactattatccaatagatcagaaattcattgggcatagagcatgtggcttatttgtgcaatctgacccaggttcagtgcctggatatagtagtattcattaaatagatgtatgaataagaattctgcactgaacagggtacataaatcatataaactgcattttgtgggtgttttctgagaactcctgcagttaaatttaaagcatcaccttatgacaaatttccataaaatattgttataataaattatgaataaatgttgaaaataacaagcccagtatctgctgttccctgagtccctgatggcaactgcatgctccccagtctgtgggactcctgatttaaagagctagatctgaacttctgcagaaacctgctcaacatttgcccattggttgctgtgaaattcctctcctgggctcttaaattccacagaggcttaattattacagatatttaaactttgtacatacatgacggatatcaaacatacccacatctctaaggtaaactgtattaaaagtgccagacaattttaaaattgaaagggacttcgtcatttttactggttaggaaaccaagcctcttaagagacaagcagtttttgttagtgggaggagcactagaattgaagtcaaatagaccagagttcagttcttggctcaggggctcaaatcacagcctctgatcggcagtgtgatcataagccctttacttaatatttttgaagatcagttttttcatttgtaaagtttggttaataatccgtctcagtgggtcacaacaagggattacttgagattacctgagccagagcagcacacataatatctgcacaaagcaaatcctcagtgagcttttgtctctgccctttcttgcccagatcacacagagctaagacttagacgctttctttgggttgtggttcccagttcacctgacaggactcacacatatcaaggatgctcccaaggggctgtgtcacatcagcatttaaatacagaattcaggatctcctgctttaaaaacaatctcccttctgagttactctttttaaattttatttatttatttatttatttttgagacggagtctcgctctgtcgccagggctggaatgcagtggcgcgatcttggctcactgcaagctccgcctccggggttcacaccattctcctgcctcagcctcccgagtagctgggactacaggcgcccgccaccacgcccggctaattttttgtatatttagtagagacgggatttcactgtgttagccaggatggtctcgatctcctgacctcgtgatctgcccgcctcggcctcctagagtgctgggattacaggcgtgagccaccgtgcctggccctgagttacttttattgctgttgtttttttttctttccttgtactgcgagttatgacaccctcccagtcaaccatcaactataatttaactttatataattgtgtgaattagcaagatcctaggaggctccaggatctcaaaggctccaggatctcagggtaatgtatatacacattttagaagagtaagatctacatcgcctaataagtcttcagcttttaaaaatcacattctaaaataataagtgaaatatttgtgctgaattgaaagggtttccataaattctgacggtaaacgatgagtgttttaagcatggagatgttagtcatacaaacttaagtcaccatgaaacaggcgatcaagtgggggaagcagcatcctgtttcctagtcttaccagagttcatttgtcattttaagagacaacttacttttccatcttttcttcttttcctgtaaaggtagaaacctgtgggttcttgttgtggggcggtttccaaaggaacacagaattgggattccagagttcaaatacgtggcaaatatgcatggagatgaggtacgtatgtggcttgaatttctgaaatgtcaccagagaagcttcccctagggtctcttgagctctgtataaatgctaccgaggaagcctggagaagtctccagcatgcattgtacaaagaagcaaggcccagagaggtcttcctgtgaggcctgtgggaggttaaggaatcagggtccaacaaccaccacagctgtatggttgtgtacccagcaccctgtcagagtagctggagcttgttttgtgtttggggccggaagaacaacagttccccagccctgaacttctgccagccaatccctgcatctcctttctgggttaagttttcccacctcctggtcagcatgaaggtgacccagcaaaggagctgtattgtatccgaacccacaaccatcagaaactcccaaatagctacccaaattcctgagatctggcttttcaaatgcttttgttactctctcttaaatctaacactcattgtcttcagtgctccagtttagacaatcacacttatgattctctcctactcaccattcaacaaacacttggctgggtgcagtggctcacacctataatcccagcaatttgggaggccaaggcaggtagatcacttgaggtcagtagttcaagaccagcctggccaacatggtgaaaccttgtctctactaaaaatgcaaaaaattagccaggtgtggtggcgcatacctgtaatctcagctagtcgggaggctgaggcaggagaattgcttgaacccaggaggtggaggctgcagtgagccaagatcgtgccactgctctccagcctaggcgacacagtgagactccatctaaaaaaacaaaacaaaacacaattttaaattccttaataatatcttgcctcttttccaacttagcagggataaactctccttttatttttaggttctacaaaataccatttaccactgttacctacccagccattcttgccaggcagttgaagatgttcacctctgtttctcaccttgcttcctcagaatattttgagaccatgacaactgaaatattttctgtttaccaggactctataaaactgagcgatcaaagagtccccagccatcccagtaaggaaactttgcacaggaatgtgggtattaccctgtaaaacacaacttataactttagggactttctcatttacatacatattccaataagtactacctgctgacttgttaaaacacttctggatttgcaatagtatgggtggcatgctctaatcagtgctgagcttcctgttctggcttaagccctccccaaactctataggaactggatctacccttcatggtacactccgcctgcccttgccaggcatgctgcccaacctgtcctgctgagagaggatacttcttgcagctgcagctaagatgcaagcacctgcccctagcaaaggaataagtttttgaacccgattttggggtgggtgcaagtttagcccatctgtgactttttgagcatcacgggcggcttctttaaaaaagactacgttgcaaggagtctgaccaaagttagttttaataaaacaactgttcgttatagacagcagctcagactgcgtttcccttttgctatcttgtctattgatcgaggtcccttgatcaaggtccctcagaatgcttttttttttttttttttttttccgatggaatttcgctcttgtctcccaggctggagtgcaatggcatgatctcggctcactgcaacctccgcctacaaggttcaagcaattctcctgcctccgcctcctgagtagttgggactacaggcatgcaccactatgcccagctaatttttttttgtatttttttttttttttagtagagatgggggtttcaccattttggccaagctggtctcgaacccctgacctcaggtgatccgcccgcctcagcctcccaaagtgctgggattacaggtgtgagccaccgcgcctgactcagaatgcatttgtaacaagagacatatggcattcattgtctttagtagtttttttattgctggcatttcagaggttccagctatctactcagaaattagtcctcagaactgaaactcccaaagataagcaagagtcctttccgtcccctacccccgaatttgtttattctttccatgcactttcctaaatttctggcatcttgttgtctggtgtatcgttcaaatcagggctcgctagtgcgctctgattctttgagaaatgctgagggctgagactaggcagcggggaaaagtcccagtgtattttggggtgggaatctgaagcacttttacccccttatgtgacccagctcgtggcaatgtctgggggctctatggggctagtaagaaatttattattctgaatttgagaccttatctattctgtcctccccatgccgctaggagctgaagaaagtgatggcttaacattggagcagagaagtccttctgaatacaggatataacaaccccctttttcctcccatagatcttttgaaattgaaagcatttttaagaagcaacagagctaacattttagggcagtgattcttaaccttttttggtgtattccttgctattctgttataaatttgacctgacttcagggtctgtggattacctaggagtttatggaccttaggtggagaatcccagcagggaacacatacacactgagtggcagggtggacagaattggccacactatttttaaaatgggaccccacccccactgtgcgtgtgtgtgtgtttgtgtgtgtgtttccacacttaatactatggctagatgacaggaagcatcagctgcatcagggagactcagctctgctgattacacctgccattttcccccatgtatttttattttacttatttatgccttgttttagaattgggtctttttttaaattagaaattgtctggtggccaaaaagcatatgaaaaagtgtctaacaacactaatgatcagagaaatgcaaatcaaaaaccacaatgagatatcatctcataccagtcagaatggctattaataaaaagtcaaaaaataacagatgctgatgaggctgcagagaaaaaggatcacttacacactgctggtgagaatgtaaattagttcatccactgtggaaagcagtgtggtgatttctcaaagaacttgaaacagaactacgattcaacccagcaatcccaatatatacccaaaggaatataaattggtctgccataaagacacattcacacgtatgttcattgcagcgctattcacaatagcaaagacatagggttagtctagatgcccaccaatggtagactgggtaaagaaaacatggtacatatacatcgtggaatactatgcagccatgaaaaaagaacaagatcatgcacttgcttatagaacaagatctataagcaaactaaacagaaaatcaaaaaccacatgttctcacttataagtgggaactaaacattggatacacatgggcacaaagaagggaacaatagctaccagcatctacttgaggatggagggtgggaggatggtgaggataaaaacctacctgttagatactatgcttattaactgggtgatgaaataatccatacaccaaatccccacaacacacaatttacctatagaaccaatctgcacttgtacccctgcacttgtaacatttacctatagaaccaatctgcacttgtaacatttatttttaaaataaatgttaaaaaaaaaaaaaaaaaaaaaagcaggccgggcgtggtggctcacgcctgtaatcccagcattttgggaggctgaggtgggtggatcacctgagtttaggagttcaagaccagcctggccaacatggtgaaaccccatctctactaaaaatacaaaaaattagctgggtgcagttgtgggtgcctgtaatcccagctacttggtaggctaaggcaggagaatcacttgaacccagaaggcagaggttgcagtgagccaagatcatgccactgcactccagcctgggcgacagagtgagactgtctcaaaaaaaaaaaaagaaaaaaaaattattacaaaatcaacatatgttcatgttagaaaaagtataaacaaaacattatatactgaccttcccaaaattagtgctcttaatttcttatttgtttttccagatatttgtgtgtgcatgtacttttaccaaaagagatatgctatttgcaacacttttaagtaaatactagctacctttttgtaccaataaatctttatcctatctttatcttatcccccactttctagtttctccaattgtcctcaaatgtctctaaaattacccaaatcaggatccagtcctggctcatgcatcgcatttagtggatatgttggatctcttggatctcatttaatccagtatctttttattatgatactaggcttgataaagagcccaatcagttgtctgccctgtagaatgccacatattctggatttttggtttgcttctttatagtatcactgcagttgtacctctagtccctgactttacttcaaactggaaattaaatctaaaggtttgttgaatttaatgtggctaatacacatcttaggagttgtgacgataggttcatttgattgatgctgagggttcaggctaattcacctggctacactcaggaatgccaaaagcaaactccgggtagcaaaatcaacttaaaatggcccattttcagccaagtattgttacaaaataagtaaagttaaactcactcctcattttgcatgaatttcacgtattctcttattcttgcaaaggtcattgttctactaggatcatggctcatactgtagatatttttcttgtcttcagtgaccttccattgtctcacatgctttctatggcacaggctcactatgccacattaatcaggctggcaagttgcctcctcaaacagtgctttacaagaaaataataacaatagctaacatttatggagcacagatgacaataagtgcattttaggcctcgtttctttggatcacctctgcagaaggcatgtttattagtcccatgtaccatgaagggggcccaggtttatgcttggtcaccagctgtgggaacccggagcctgaacaccaagctttgcccagctgtggatccactcctttactctctcttctctgtttttaaaatgttctgttttatggttttcattcttaagtatagatctatgatctatctcaaattaatttcactgggatggatactaagttgttgcagcaccatttggtgagaggatttgggcttgctgttatgtaaaagagtaacaagctcttggagggcaacactggaataagtatcttccagtcacctacctgtccctttctttcccctactcttcacttctctctccttgactgctggggagctgacagacatagcactcgtggtgagcctttgtcaccgatgtttattcattttttggagcagcatgggagaaacatttctggggttctttctcattttaataagactagtaggtgtttttctggttcatccaggcacacacattatttgcacacatattggcatgttggattgaagcctcaattctaggtttaatttacgcaagctcctaattggcatcacttggcatacctacagttgaatcttttttttttaattggaagggttgatgccagtgcaggctgaatggggttctctgccattcctgtatgctacagatattcagattgcctgggaacaggatccttgtcccctcaccttcccccatcacctcattctgctcctggcttggtgtgtagtaaactataaccaatactctaaaatcagagctatactgaaaactgggaccatgccctgaaaccaggagcatctaacatcctcagcctaaatgtggatgcagaagagaagcctgggaaaatcttccccagccctccctactctttgttttgtgcttatcttctatcccatgtttttcaaattttgcagaaaaaatacttttcttgggtaatctctaggttggtaagacatctttaattcctgcctaatggaaatattgaagcaaggcatgactgtgtgcttaaagaattgggtgcccaggccaggcatggtggctcatacttataatcccatcactttgggaggtcaagctggggagattgcttgaggccaggagttcaagactagcctgagaaacatagtaagaccttgtctctaaaaaaaaatttaaaaattagctaggtggggtggtgcatacctgtggtcccagctactcaggaggctgaggtggaaggattgcttgagcctgggaggtcgaggctgcagtgagccatgatcacaccactgtacttcagcctgggtgacaaagcaagaccctgtcttaaaaaaagaattgaatgcctagagttttaagccaaccctagtaacattaagcaaagtatcataggtcagagcctgggttcaaacccaggtttccttgacctcagtgccaagggtcttaaatactgtactgtaggagtaactattgaatatgcttgtaaaataatttaactaaattgcaattattttttattttagagttgggatctcgctctgtaacgcaggctagaatgcattggtgtgatcatggctcactgtaacctcaaacacctgggtccaagcaatcctcctgcctcagcctcccacatagctaggtctagaggtgtgtgccaccacaccaggctaagttttttattttttgtagagatggggtcccacagtgttgctcagactgttctcaaactcctggcctcaagcgatcctctggctttggccttccaaagtgttgggattacaggcttgagccattgcgcccagcctaaattgcaattctgcttttttggggagatggggggtaggaatttttttaagccttagtttcttaaagagcaatgaagtatttttactaagatagacttaatatgggcttttgtaactgcccaacaggttcattttgcctgttgtccagatagagcagatttatcaagacaggggaattgcgatagagaaagagtttaattcatgcaaagccaactaaacaggagaccggagttttactattactcaagtcagtctccccaaaaattcagagactgggagtttttaaggataattttgtgggttgggggagagacagtggggagtggtgattggtcaggtcggagacgaaatcatagggtgtcaaagctgtcctcttgtgctgagtcagttcctgggtgggggccacaagaccagatgagccagtttatcgatgtgggtggtgccagcagatccatccagtgcagggtctaaaaaatatcttaggttttacaatagtgatattatccctctgagcaattggggaggcttggaatcttgtggcctctggctgcataactcctaagccataatttctaatcttgtggctaatttgttagtcctacattcaggaaaaggctattatcatctttgtttcaaagttaaactatgaactatgttagtttagcctatgcccaggaatgaacaaggacagcttgaaggttagacgcaagatggagttggtttcatcagatctctttcattgccataattttctcactgttatgatttttgcaaaggcagtttcacttttgaaaaattcgcatcacatttagaattttatgattgtggcattggtttatagtttattgtattccagaaatataggttgaaaagagaaaacattccctgggtaatagtggccatatttgtcaacctgaaaataaagagataaaggataaatgactttcacacaccttctaagtataagagacagttgatgagatgtagtttgcatgtctaaatgttttacttagggggtattttaatggtttacgcagacagtgggacacaatatctgaaattatggccgttctggaaaatctgggaagtacagtcaacatgcagtagaggttcccaacttatcattaaaccaaaacacaacattaaagcttgtctttctaaatgccgctgcccaagctccttttcctaccactatcctcaggtgatagtaaaatgtcctcagtaacgctctgtggtttgaataattaaattctttctttttagatttaggcagagctcattgttttccaggtgaaatatctaattcattttaagcatgttttaaattaatgaactgtttggtgaccagatatcccaagtccctgtcatgagcgtaattgttagcctgtgcctctataaaatgtgttcggtatttaaaaatccttcagataaaatagcttgatcatttgtacatctccccttacaaagcaccttaagtcctcatgtgaatttcagaaagttcttcctcaggatagtcttgatcttataatgaattttcaacagtagtttattagcaattatttattgaatacatgatataccaggagctggacaagctacaccaagaacacagggatacagagaaaaaccgtgaaggtccctgacttcggggcttcgatggtggagttagagaaagggaggtcagtcaaggtcagccaagtgattgtaacgtgtgtgacccgcattagataacacaggtgtcatggtgaacccagacttgggaggtcaagaaaagtatgctagataaatgtcatgtttaggctgatatttgaagaagaaggattagctaggcaggtcagacaaataacttaaatctataacacacacaccactgtggagccccacagcccgatgactttccccccagaagctgcatcacagggtagcatttcaaaaacagattccattgttaggatagctgaagattctctctctctctctctctcacacacacacacacacacacacacacgcatgcgcgtgcacacacacacacaccacacaacactgcctgggttgtagattgttccttcaaaaatttttttctgttttttttaataaacattctgtgaagaaccagaacactcatttgtatctgtgtggcaaattccaacttgactgaattgaactgcagctgatagagaatgtattttctgctttctgggtgactgccattttaaccaccggatgaaggagatggagtgagagtctccggaggccggtgtgtccatcaggcccccgtttcttcatgagggcttctccctgaagtctgtgctctcacaggaaggaagccagcatgctgggtgaaaggctgcctgggcaattggagactcttttgaccacattcttttttaaaatttggactctccagggtttcctgtcaaagacttaattttcaatgaagggaggtttatacataaaacatgaatgagtgtttgaaacatttatattaaggttgggaagaattaatttgaataatatttggcataaatctgctgttacagaggcaggaaaagatggcccaaaaagaaaggaggattttgtttaactgcctctgaaatttcatctgtttatctcagcatttaaaaaattatctgatgcttagttggttctttatcttattttcaagatttttatttacccttgcaattgagaacttgtgatttgttgtggactattgagacacacaaaaaatactttggttacatacttgtttccctgaaagaatcatgattttattatttttgtaaaaatgacataggttttctttaaaaagaataagaggaaataaaaatcattcagaatactgtacccagaaatagccatcattaatatttgtcagacatcattgtagacatctatatatttctgtagtaagagaatgagaggaattaaaagaatataaaataaaatgtctcatatgttatattgtatgaaattttattttatttgaattaacagaagaataaaactgaagtgaaactaaaataactggtgaaattgatgctttctcaaaataagaaattgattatcacatttgtctttcttttttttttttttttgagacagagtctcgctgttgcccaggctagagtgcagtggtataatctcggctcactgcaacctccaactcccaggttcaagcgattctcctgcctcagcctcccgagtagctgggattacaggcacctgccactacacctggctaatttttatgtttttagtagagacagggtttcaccatgctggccaggctcgtctcgaactccctacctcaggcgatctgcctgcctcagccttccaaagtgctgggattataggaatgagccaccgcgcccagcttgatgatcagatttttctaaagttaagaaaaaagattattaaaaactttgaaattgtagtcattttatgtgtatatattttaacttttgatagtattttatgtccccttactatgaaatgtgaagtaattaacactttgaaaatttctccctcaacttcttttttttttgaggtggagtcctgctctgttgcctaggctggatggagtgcaatggcacaatctcggctcactgcaacctctgcttcccaggttcaagcgattctcctgcctcagcctcccgagtagctgggactacaggtgcccaccaccatgcccggctaatttttgtatttttagtagagacgaggttttaccatgttgcccaggctggtctccaactcctgacctcaggtgatctgcccacctcagcctcccaaagtgcttggattacaggcatgagccaccgtgcccggcctcaacttttatattttgttctatacccatactaccaagactgcttaatctaattctgtatctaacagaataccaactcaacctagcctcctaatcatggtttctttactcttccttttcactttctttcggttgggtgaatttcattgccaactcgtgtcgtgattgtttgcatgctggagagtgtatgattcagatagctaagagacaaattcacatttagagtcacatggggattctgatatcacttcctctctgttcttgacttgggactcagataggccagggatttttgccgattgaaccatactatggcctctaaccagcatttagacatttaaggaactatgggactcctggtcacttcctcctcaccttcctgtacctattcctccccaaacccttctgagaaagcttcttaaaccaacgatctttttcacatttttttggttttttttcgagatggtgtgtctcactctgtcacccaagctggtggcgcgatctcggctcattgcaacctccgcctcctaggttcaagcgattcttgtgcctgagcctcctgagtagtggggattacagtcacctgccaccatgcccagctaatttttgtatttttagtagagatggggtttcaccatgttggccaggctggtctcaaactcctgacttcgggtgatccacccacctcggcctcccaaagtgctgggattacaggcttaagcctccacgcccagccccttttcacatttaaagttactgtcacagttttatgttaccagctcctccccactggctttaggggaggtcataagtagctcatcaaggttacttccaaaggtgctggaccttcaaaaacctattatatcttaaaattggaacccagtggggtgtacaagtgacttttttggttattagcttgtaaggactttttccagtgacaattttgactataaaaacaaaaatctggccgggcgcggtggctcacacagtaatcccggcactttgggaggctgaggcaggcagatcacctgaggtcaggagttcgagaccagcctggccaacatggtgaaaccctgtctctactaaaaatatcaaaattagccagacatgctggtgggcacctgtaatctcagctacttgggagggtgaggcaggagaattgcttgaatccaggagacggaggttgtagtgagccaacatggtgccactgcactctagcctgggtgacagagtgagactctgtctcaaaaaaaaaggtagtggaagaggaagataaaaaatgagtaggaaaaaaagttgaagtcaggattggacataatctgactctaaattttatggttgcctatgaatctataattcatatatcccaaattttctttctttcttttttttttttttttttgagacagggtctcactctgtcacccaatgctggaatgcagtggtgcgatctcttctcactgctgcctcaacctcctgggcagcacaagcgatcctcctacctcagcctcctgagtagttggggccataggtctgtgtcaccatgcctggctaatttcttattttatgtagtgatgggatctcgctatattgcccaggctggtctcaaactcctgggctccgccttagcctcccaaagtgctgagattacaggcatgagccactgccaccagccccaaattttcttagtcccaatttcaattattctgtgttcattaggataacaaatgtttaaaatgtggtctctttatgtgccagtgagggaatcaagtgagaagtggtcatccaaggaccgcttatcctttgtcacaatgttgaagtcctacagtgaaatcatgactggaaattcttctgaggctccatgaaatcttttcttgcacagtgtctacatgaatgtgcctgcagcactctcctgattttctcacctgctgcccctgagttctcatttactaacccctcaacaacatctgttcttctgaagcagattccttgaacctaaaatgatagggagaatttgatgtagtctaagcagatcttcctatgataaggctgacatttaaattactttttttaaataagaaaaataatgactctctctcctggggagggattataaagcaagttctctcacaggccttcagtttcccaagccttattgatactgcaagctaatttaggtggatatgacagcttttaacattttaatagtcatgcttttacttaatatatattagaaatatatatctagaaaagtgataatgatatgaagtttctcaggagttggaagccagccttagcaacatagcaagaccctgtcttaaaaaaaaaaaaatctacaatgtgatgattttaagtctgttatccaccaatacatacatgataagcttcatatgcaccatgcattctcatggaaatacgtgattcctgtgcttctctgtaactcaacctcttgctctcccactccagaagatactttggaaggcaaccaaatgaaaaatgttgtaagaatcattattgcggccgggcgcagtgtctcatgcctgtaatcccagcactttgggtgtctgaggcaggtggatcacttgaggttaggagttcaagaccagcctggccaacatagtgaaaccccatctctactaaaaatacaagaattagctgggcgtggtggcacacgcctgtaatcccagctactcaggaagctgaggcaagagaatcgcttgaacccaggaggcggaggttgcaatgagccaagatcgcgccaatgcactccagcctgggtgacggagttgagactgtctcaaaaaaaaaaaaaaaaaaaggaagcagcagcagcagcagcattattccactctaattcatttttgcaatatgtaaactatttacaaataggtactttcactcttactagcatttttcagcatacctcaggactgatcgccacctgatggccacttggcagagcataagcatgcttgagaaagagtgatcttacaaactagtttgggtctgagatatcatgtgtagagacccctattggggaatttgtaccgtagggagtgctttccttattgcctctgacctaataatgtcctcttttctctttaacacatatagactgttgggcgggagctgctgctccatctgattgactatctcgtaaccagtgatggcaaagaccctgaaatcacaaatctgatcaatagtacccggatacacatcatgccttccatgaacccagatggatttgaagccgtcaaaaagcctgactgttattacagcatcggaaggtaaagaggggctggtctatctttacttgaaaacaacacaacacaaaggctcccgacaggcacctgttggccttggcaagaggagatgtgtcatggtgagagccctcagagccggtgtcatgtcgctgatgtgccaaagctcaaggcacatcagggctgcctccggcttgcaggaagaaatgcaaataaggctactttgccccggtgcccacctagcctctccatcttcatttgccactccttctctctcccctgcctcctcccctctaggcctccttcctggaagtaccaggtgctttcttacctcagcattttacacacaccgtttccctgcctaaatagcatttcctccaagactctttctctcgacctgtcatacactagatcccctgataaactctcacatcacctggcactttactgtcagagcacaacttttaatatctaatttcttgcttcatgtctctccccccactacactgcaagctacctgcaggcaggaatcctgtccattgtgtttgtcgttgttagatccgcagtgcctggcagagcacccaggcccttggtaatgaccggttgatttattaggccagtagtccaagaactaaccataagcaagaacgggtcttgaaggagctctgatttaaacagtttattttgtttcaagctgccttgggaggtttggaatttctcagatgtctaatatacattcatatgtatgcaatttacatatatgtgtttgctttaccaaagctgaacaaaatctcaccacttgattccctccaattttaagtttttcaaatatatttaaacatggctgttccacgtttcacaagtacttctgtgtaatgtgtttagtgttgtttctgttatcagttgctacttaacgaaccaccccaaaattagcgacttaaagcaacagcctttttatttactgttgattccataggtcaggaatttgggcagggcagagcagggatggctactgtccgtgccacaggtctggggctcagctctggtctttctgagacaatttacctggagccatggactctccgtggactctccacgtggcgaccattgggatctcaaggtcccaaaagggagcatctaagagcagaagtcccaaatacaaacacttatcaaacctctgcctgcatcacaatagctagtatctcattggtgagagcagatcacgaggcaggggatgccatgggatgtaagtgccaggtgtgggtcatggcaggccacaagggcagccatccaccacacccatactcacgtttggaaagacacctggagcctaaaccaaagggcaagacactgtaagaatccactccctcatgccctatcaataagccctaaaatattctttcttttaaagggaaaattataaccagtatgacttgaatcgaaatttccccgatgcttttgaatataataatgtctcaaggcagcctgaaactgtggcagtcatgaagtggctgaaaacagagacgtttgtcctctctgcaaacctccatggtggtgccctcgtggccagttacccatttgataatggtgttcaaggtaagcaggtgcgggtccagttctggcttcttaagtccagagtggggctgaaaactctctgcctctggatggggatcagctctcccttcccctcttaacttctctggcagggtgaaaagagcttcatgttcccaactctagccatccttcctgtgattcttcaacagcagatgggcagtgtggctgaactgacaacccacagctggacatgcatcagtgaattagtgaaatttagattctagaaaatacaatctaaatagtcagattttgattctctgacaagagacaacatggctaaaataacataaaactggaacaactcacttttttttttgctaatcatatatgaacaataattgttgactcttcttaaaactctgtgggatgaggacccaaaatattacagtagctttattcacccctataatacctaaagaaattgtccttacctccagaaattagcaagagtgactgagaggacacttaatttttaagctgatttaggagtttggatttgtatctgacttatttgggggctatcaccttgcatatgtttattataaagtagaaagaagaatagaggaggtggatgaaggatttctctctagggaaattagagcatgtgtgtgtgatgcgattatgtctttgctaatatggtgtttgtgtttcctcttactctcaagtcagtttaaaggtcttggttcatcttttaaatgcagcaactggggcattatactcccgaagcttaacgcctgatgatgatgtttttcaatatcttgcacatacctatgcttcaagaaatcccaacatgaagaaaggagacgagtgtaaaaacaaaatgaactttcctaatggtgttacaaatggatactcttggtatccactccaaggtgagtttctcttcatttcttccattctccttattgccttcacccagaagtgccagctggtttattttgatccagcagttgttaaaagaactttaggcacaataggcccttcactctgtccttatcagctaatatcataagagcagtggagatgactgattgtttgagagatgctcagacatgttcctcattaccaagggccttcttcattcattcaggtacttattctgtgtctgcctactgtgagccaggaactgaaagatgaacaagacacacacctcaccctggagttgaataggggagacagacacgcagataagtaattgtgatagcagtgcaattagaataaaaacagatttagagaaggtgcagtgtaccccaagggtgcacagagccaaaatacaatagggagtagtgaagagcttggagaaatgtgatgcttacatcccatctaacagggacagctgctactagatctagctaattattgtcatgcagccttggggagccaatactgccagatcttgcagtttgtaaagagaagctgaatttgtacatgaagtatcatgattttaaagccattttgcgggctcaacaaaagagctcttcagacaggatacagtgggaggagggcccccagttctccaatcttggaataagacagccgggtaagggacaggatgagattgtcatgtaggcaacatggaaggagagatattcttattagagggaataatataaacagaaacccggggtaggagggacctagggtggaaggacaggaggagagacggactggaactggatttccatgcctcaggggaaaacattcccttttagactcgttagcctgaccccaccaacagcaagttgcggcatgcatttctgcgtgcaggccacttccaaaggtgccttccctaattgtcactttggatgcacaggctttcaggtaatctttcacaagctggtatttttatgcctgggtggctctctgtcagttttcctggtaatataaataagcatagaccacaactgataggcaacaggtccaggcagcattccaaacctctctctggtgtccaagatacagccccctctcctaccttagggcttctgcatcgtccctgctctccacaatttgtagctaagaaagggcccatcctgtccagtggcagagctgtccttcatgttcactgtctaactttcgaaggcaaatccagatgtgtaggaaattagctagaaacggttgctgctgggaattgttccccagtgtgcctgtgtgtgagctgtgtatccttctcagacaaaaaacaggtgaagccagctgccttgaggagcccagaagaatgtgcctggcctggcctggatgttttgttggccaggcctgacccgccttatccagaactgccccctccacgcttggcattctcagttctggctatctgctagggatccataatgcctgcctgttttgctatttaaaacaaaccctttgaaagtaagggaccagaggagagaactggaaagtcagcatgagcagtggcagcctgggctccacagggggccgggccgttcacctctgagaggcagtgcagcactctttctttgatccccaggagcactctggcatattggggaagcccacaggtgctggcggaaggtggcctgcactccagtgtctgtcatttactggccaaaacccctgagcacttttctttaacatctgtgatcatgtttcctcatctgtaaagtaggggcaattgctgtgaggattaaatgagctgatacaaagcacttcatatggtacctggcaatagtgaatgttggcccatgattcccccaaattagcatgcttagctttgcttagtaagtgtatttataaatgatttgtagaaatattttaaaggaatcttattctagcttatatccatgtaaaatgtaatttaagaaagaaatgaaattcaaagaatcatttttgtaatgtaggatttcaaaaaataaaaacaaaaaaggacccttccttcacccgtcacttaattttgatgcacagttgaacttcagtcagctctgatccagttacccatatgggaatatttaggattgtctagtcacgcctgggtaatagaatgtcaagccctgattttacaagctaatatgtcaaattcattttttcctgtttacatgtagctgtctgattcatttgtccccgaggcacgtgatacttggctccactccaattttagaccctaacaaaaattaaatatgcttgtgtttaggtggaatgcaagattacaactacatctgggcccagtgttttgaaattacgttggagctgtcatgctgtaaatatcctcgtgaggagaagcttccatccttttggaataataacaaagcctcattaattgaatatataaagcaggtgcacctaggtttgtaaaattttcttattaattccctattaatacaaaatagagcatctggcaagacctctgggttgactaaacgcaagcctttatttatgctttgtagttatagcctcatttcagtgccagatctgatggttaagaattctctctgcatgagtatctgcagtgtgtgagaaatgcagtgcccactcattcatagaaaaggaagcatgatgcatgttcctttaatatgagggtataaaaatccagagtaccaggtggtcgtggtggctcatgcctgtaatcccagcactttgggaggccgaggcaggtgtatcacctgaggtcaggagttcgagaccagcctggccaacaaggcgaaacctcatctctactgaaaatacaaaaattagccaggcgtggtggcacacgcctgtagtcccagttacttgggaggctgaggcaggagaatcacttgaacccgggaggcagaagttgctccctccgccaaggagccaagatggtgccaatgtactccagactgggtgacagagtaagactccatctcaaaaacaaacaaacaaacaaacaaacatccagagtccccctaattttacatgttgaatgatctagaaatctggcaaaatatcaggaaaataggctgctactctgttacatcatctcccatttagaaaaatactatgtttgcttgtcactcaccacgcagtaccaaggaccctgagaacactggacataccactttgcattttttccagaattggggtggtgagctagcaccattaccttcaacccctctcacctccgaactctgccagatgtcctggtgctagaaatcttgccagcctgtttgctgaaggctggctggcccttatcacagatagacagactaaatgtggcagagagtgatagctttcaaacgtgcagtggactcaccgggagcgcttgctaaaacagattgccaggccccaacccggagtttctgtttggaccaccttaccacgtgatgctgatgctgctggtccagcggctatacttagaaagccattgcactagagaaacacactgctagagatgatgatggaatcttgtacagttcaagtttattaaccaggtggtgtctctttgggcaaggtgtggaaggctcttctatatttacagaggtgaagttatctttctccattcagaatggcttggggagagaaacatatcaggaattggcataatagctatgataccacatggagagagagagagagagagtgtgagtgtgtgtgtgtgtgggtgtgtgtgggtgttgaaaaggtttgctgcatgggcctactgcataactgcataattcccggaattttctgcatgattcacagcaaagctttcctcctgctacaaagaagatggagaaggatgagggaaggtagcacagggccagagggctgagtgcaaggatgattaggacccttcctcggcacacatccctaaaagggatgcccctgccctctttcatacctgtatccccagcctccatcccctgacctgaagagaagtacacaaagattactggtaaactcacagggctatgtctaactggctgagtcgttcatggactaggttgactccctgtgataggggatgttatgaaatatcgttctttctcaccagcatcttaataaagattataaacttattattgggactttcaccttcttcattatgtcatcaaacgttgtcttgggttctctcttgcttagtattctggtaattctttctccactagattttcctcatgaggcatgtcatgtattagtctaacatttctattatatttctacctctattgatcctttagtttgttaatctattactattattatcattatcatcattttagagacagggtctcactctgtcacccaggctggagtacagtggcacagtcattgcccactgtaccttgaactcctgggctcaagtgatccttctgcctcagtgtcccaagtaagtaggactacaggtgcacagcaccacatccagctaattttttaaacaattttatatagagacagaatcttgctatgttgtccaggtgagtcccaaactcctgggctcaagcgatccttctgcctcagcctcccaaagtgctgggatcccaggtgtgagccaccgtgactggctctgcctatccttttctgaaattcattcttcaccagtatcaacatgggtatgggcgtgcaagtgaacatcaaatatgctctgtgtaactgcactactattttcagaacctcaatctagctgtaaagattatttaccaagcactgaattaaggtgggctttgaagtatcatgttgatgtaatattgccagggaaagggcaatataaattgcagtatacctattattatttttaataatttggaaggcttaccagtccatttgcactaggttttgtttttttgtttttgagacggagtctcgctctgtcatctaggctggagtgcaatggtgtgatgatctcggctcactgtaacctccgcctcccaggttcatgtgattctcccactcagcctcccaatttgctggaattacagacacccaccatcatgcccggctaattttgtatttttgtagagacagggtttcaccatattgcccaggctggtcttgaactcctgacctcaggtgatccgccggcctcggcctcccagagtgctgggattacaggcatgagccaccatgcccagcccatttgcattaggttttataaagaatgtgtatctgcctgtctctataatcagatgcaaacaactcactcaaaaaatacatatattggcacatcaaccctgcccccttgtggtttaagacagatgcataacatggtttaataatgaaaccatatttcaaaataccaatacagtgtggttattactacttaatagaaaggttctctccctactagtgcccaataagaaactaatgaatattttgtttgtgaagaatggcagcaaacacccctttattggtattgctctggtttaaagacattattgatattcgtcaaactgcattgcatttactggttccattttaccaattgctaggatgcttctgagtttctgaggttttgacccatctggaagtctctgagccaccttgtctgggaaggaaaggccttctgctttagtggaagggccttgccaagagggtagaggcttaggtagagcccaagctgttttgtcatctggcgatgtttgcaatcttgagcaagcacttgtctgaatctcagtgtagtcaacagaaagttgagagtaatagcatcagccttgcctcccaccagcctgttctaaggcttcagtggtgttattccttcaattagaactcactgcagacctcaactgaaactcgggccccttggtgctgtgttgtcctgcttagaggatgatttactaggttcaagttgagatgagggtgtcggcagacattaaaaccaaagtagcaaaggagggcaagtctgaattctagaggcttaaaatgtcttgcttgtcccggtctctgaggagaagcaaagatgagccagacacggtgttacctgcctgctgcggccctgtctttcccctggactcctcaaagcagatctgaacctagagagcaagggaatggctcacagcatccagaaacctaagcaacctgggcataaaagaatctggtatgtgctgagttccagaagcctgtgagccacagatgtggatctgttatcacatccaaaataggaggcaactgtgaccatgcggtggggacatgggcacaaacaagcagtctcctaagtactgtcccagctccgactctaaattgtggccaacagatgcagaattctagtgcttgcccagccaagacttttcattcatgaagctctaatccatttccaagggaaaaagagctttacatttctcccatgtatctccccatctggccacagaatttatatctcagattttatgtcttctcatttgtattgtatctgagcatttttcaaattttcctttttttttttttaatatagtgttggctctctctgcgtctcttagggtctaccagtctttttttcaatgtttcaacttcagcatatagaaataaatcacattttctggtaaaacaattacttccctcttaagtaaaaggtttggtggtatgtagacaaaatattgtaaagacatatacaagctaaagcacgcttttatttggctggtgggaggggttttcctttgaatataaattccatacataagcatggtctgtgtttgcccagtaacagtgatattcgcataccccaggcttccatagctggaagaaccatctttaggtttaggtaagagtcatatgaaagtgagtctttgggcctgtaatcccagcactttgggaggccaaggtgggcggatcacttgagatcaggagttcgagaccagcctggccaacgtggtgaaacccatctctactaaaaatacaaaaattagccaggtgtggtggtgggcacctgtaatcccagctacttggggtgctgaggcaggagaatcgcttgaacccgggagatgaaagttgcagtgagccgaactggtgccactgcactccagcctgggcaacagagggagacttcaatttaaaaaaaaagaaagtgaatctttgggttattaggggatgacgaatgagggtcaaactggaatatgaagattttcagacatttcttcaaatgcaaattgttcttcctttttctatctttgagggtaggcagaccgcaggttgactggagccttgattcagctgcagcacacactgatacgtaggtgttgttcaagtccctgaggccatccaaaatcactgtcatgtgactgtcaaaaaagtcaaatctgttctattaaagtgtaactgcttctagccaagaagaaatttgctgcctttttttaaagggtaccatgactttttttttttttttttttttttttggtgtcttctgccaactactcattactagtaccctgaattctatttcatcattatctccaatgttaaagaatggtgtaatgttagccgggcgcgatggctcacgcctgtaatcccagcactttgggaggctgaggcgggcggatcatttgaggtcaggagttcaagaccagcctgaccaacatggagaaaccctgtctctactaaaaatacaaaataagatgggcgtgatggtgcgtgcctgtaatcccagctacttaggaggctgaggcaggagattgcttgaacccgggaggcagaggttgcagtgagctgagatcgcgccattgcagcctgggcaacaacagcaaaattccatctcaaaaaaaaaaacaaaaaattgtgtaatgtcagtttcaatgatagctctgcttcattttttatgcacttgattttcttcgatttggttggttttggggaagtcaacaaaaaatacaaaagatgccaacagacacaacaccatccagcacaagttaccttgctgaaacgcatggattttctaagtggcatgaagactgtaaactagctcagagccctggaaaaggaaataatatgcatagcttcttccctcacatattcctgctttgtggaacaaagttgaattaagactccagaaattcatctaatatattctccccccgccacaccacatagtttttcttaatccaaataagaggaaaggaaagaaagccaggcctggtggctcacacctataatccctgcactccagcactttgggaggccaaggtagatcatgtgagctcaggagttcaagactagcctgtgcaacatggcgaaaccccacctctacaaaaaaatacaaaaattagccaggtgtggtggtgtgtgcctgtagtcccacctacttgggaggctgaggtgggaggactgcttgagcatgggaagtcaaggctgcagtaagccctgatcacaccactgcactccagcctgggtgacagagcaagaccctgtctaaaaaaaaaaaaagaagaagaaaggaaagcaagaattaatgtttgttgatcctcctgttctgtgttacttacatttaatcttcacaaccatcctgggtggtggtatattatccccatttcataggtgataaaattgaggcttgggaatgttcagtgacttgagaactagaattcaaatcaaaacctgactaggttctttctgtcacaccaagctatgatgatgggtacacgctatatttatcacatatcaaaggacctcctaaggggggcacagtgtaaatagctcttcaaaataatgccattgaagctgagtgtggtgcctcacacctgtaatcccagcactttgggaagcttaggcaggtggattgcttgagcccaggagttcaagacaagcctgggcaacatggtgaaaccccatctctacaaaaagttaattaattaattaaataaaacaaaataatgccactgaaacccaaggaataaatgcgtaatcaggttaccaaattattaccaatttatgattgggtactacctaaacatcaaaaggatatgtatcaagcagtaggaataaatataaatggaactgtgtttaaaaaagagagggcaaagaggaacacacgaagtgaaaatagaagtttacacagttgtatagagaaagggagaaggaaatgtggcattttcctcctcaggagacaaaaaatgaagagtcaggaactaaataggacagaaagtataataaaaggcaacctaggtcagatagaagtttgttgaagttcaagataaacattgttttgctaaatgccaaaatttttatttttcactttaaccgtttctgggggaaactgttacgtgtgcctcgtatttttctgccctaataaataattattgagcataactgtttggggagagttcaagatcatcttactattgtagctcttcattctcatttatgttattggggacttaggcagcttcaccttaaggtaatatgatttgacgctggagtaaacaaactagatgtgacacgtaggatctaaaataagaaaggtcttaaaatataaatggctttttaaaaattgtactcctgaaattttgagaggggctgtcgagactatcatgggttgacggctaggctgggccacttcgttggctgtgtgagtttgaggaggttattttaataagccagagccttagtttttttcatctgtaaaatcatgataataattgatgacacagagctgatatgagaatttaatgagaaaatgctcatttggtagttagtacagagcctggaatatactaagtgctcaataaatattggctgctgttactggccaatcgattccatgcttccaagaagccttgtgattataattttgcttcccatgtagttgcactacaagacaaaactattgagtccctcgcacacgtaaatattttgttgtaactaatacattgacaccgtttttatttaggattttatggaatccaccaatggttgtagtacagtttggtgactgagtaaataacttggaagtgacaggaatggatcttaggttgtcatctgtgttctctcactgtgataatacgtactaatataaatgggctattcaacaacgaacaaatttaagctataaatcagattagtaattttgactgtattttaagttacatcaaaaataagttttttccctctctaacacttaatattaactcacaacattgagttagctaataaatattgcatatattgttcttaaatatttataataatttttatatgccataaaatatggtattaatatttaattttatttttgtcttgcaggtgtaaagggtcaagtttttgatcagaatggaaatccattacccaatgtaattgtggaagtccaagacagaaaacatatctgcccctatagaaccaacaaatatggagagtattatctccttctcttgcctgggtcttatataataaatgtaagtatgcaatgctagttattgttattaaaatattatagaactcataatacttattcacccagaaggaatccaaaataagtctaggaagttcaaaagtagatccatcgagacagaaagaaaggatagtgtcagacttgcaattggcaggaggtggaagaggtggaaattatatgaaaaaaaaaaaaaccacaaaaattcatattttttccctgatggcaatttttaaaaaatggaagccaaatcctatctcttgtgatatcttttatgattaaaatgtaacccgattaataataaagaataagcaatgtagcaaaggtagtttatagtttcccaggatacgacacaacacccattccacggcatacactttctactataaaaaatgaattggataaagttccttagaattcattttataagtgaaatctgatccacaaattttaacactatattcagcaaatgataaacatattttgcagcccttttttcatcgatgcaagtaaaatttcagtctttaattccataaaatatatatttctgagtcattttatccgaagacaggaaggcatggactaatttgagcctgagtggatttatgtgaaagaactaaatgaataagtattgatatagttggccagattttgcctctttctctttgatgtgaatttctctgagaaattcaggattcttctattttgcttagtggggcttatgccaaccatagcagtcattctatatagagctaatcctgggagaaggtagtcatctcttctgtagtgaaaactgagttggtattttattatttcatcttgaggacatcatggaaaaaacatggtttttagtttataaaactatagaattcagagcctccatgctccatgggttctccccaaggtgcctagatgtgaggcttatcaattgctaatccttttaggaatttctactcctgccgagaaaatggatagagcttgaaaaatctcaactcactgtgaatctttgtctaaaaaggccctttattttcctcctatttactgtgatatttctattctatttaaaaatatgattttccctgtagtgaatctaaacttatatgcaacctcataaataagccacacctttagaataaagttatgaattgttcatttcccattagttagactaacacagtacacattgaccctagatattagttctaggataatatttgaaggtaagactctggacattgaaatgaatgtgtaaaatacataccaatgagtggttatgtaaatgtcattccccattttttcccttctccaccatatataataaaagcatttctcagtagacattgcctgtagttagtttagcatttgtcttgtcctgatcatttcctccactaaaaaaaaaaagaaagcctaaccaaagattcaggctgatatgaacaaaaccaggtaaaatcaaagcttttaaaggagggtggatgtggtggctcatgactgtaatctcagcactttgggaggctgagaggcaggtggatcacttgaggtcaggagttcaagaccagcctggccaatgtggtgaaaccctgtctctactaaaaatacaaaaaattacctgggcatggtggtatgcacctgtaatcccagctacttgggaggctgaggtaggagaatcgcttgaacccgggaggcggaggttgcaatgagccaagattgagccactgtactccaggctgggtgacagagcaagactctatctcaaaaaaaaaaaaagaaaaaagaaaagaaagaaagaaaagcttttaaaagaagcaataggcttgtaggtcagctgaaaagaaattagtaagttgagaaaataattctacttgaaaataatcttgatatccaaggaggatgttaaatacacacttgggacaaagggaaagagttatctctttacccttctgccccacgaaaaggatggtggcagaaacatctgctgcttccttctcttgacttacattgccagatgaggtacccatctgtccttatttcattttgtaattcttggcaacagcattcacaacgctggtctctgtcaacaggcattggataactcagcctgcaggaccaaatctgttgctggcccagaggtctggtagattgttacatgcattgcacaaaggctgcattttagtgatggatatcagtgttttcagtgtgggcaccacgaaccatcttaagtcactcatataattgtctcttgtttcttctcaggttacagtccctggacatgatccacacatcacaaaggtgattattccggagaaatcccagaacttcagtgctcttaaaaaggatattctacttccattccaagggcaattggattctatcccagtatcaaatccttcatgcccaatgattcctctatacagaaatttgccagaccactcagctgcaacaaagcctagtttgttcttatttttagtgagtcttttgcacatattcttcaaataaagtaaaatgtgaaactcaacccacatcaccacctggaatcagggattgctcactccaggttactgcaaccctaactcactctagtgggaccttgactggagaaactccacgatcttcctgaagaagagaaatggatgtttccaaattccacaataagcaatatgtggtgataatgaaaagaatgattcagtcttgacggtgaatggaagacacttacctaacaagtactgctcatttacactcaaattaatcttgaagtagtcttaaaatgtgtaagaagttaaaacttgagaagcaaaaaaatgcctgcaaaaagaagatcattttgtatacagagaaccggatgaatataagcaatgaagatgaacatttattgatcttctacatacaagacttcaccataaggccaggagcagtggctcacaccttgtaatcccagcactttgggaggccaaggtgggcggatcaccctgaggttaggagttcaaaaccagcctgaccaacatggtgaaaccctgtctctactaaatattagcggggtgtggtggcgggcacctgtaatcgcagcctttcaggaggctgagacaggagaatcgcttgaaccctagaggcggagtttgcagtgagccgagatagtgccattgtactccagcttgggcaacagagtaagactctgtctcaaaaaaaaaaaaacaaaaacaaacaaacaaaaaaaacacctcaccatgagtgctacatgtgaatagatattaagtgccatatataattagttctcagaagaagggagaaatgatcataggactgggaattgttttgcaaacgttctaggagatgtgagagaaaatatgtaaccacatcttagtggcccaagaaaatacaggcctgaagggataagattgtgtctctatagagcttcaaagcatacaggtcaattaagaaagcccctctctctccagagccgtttccctagcttttggcacctggatgccacagtcctccattaggctgatgactccaaagatgtaactctagcctcttgcctgagcttcagactcgcgtcccactgcccacaggacacatccacctggatgtgactcacaggtacctccaacccatcatgtggagatactcatcctgttccccctagagctgctcttcctgctgcattctctctctcaattactgggaccaccaagctaggaacctgggagtcatccttgatactttctcttcctccttaatcctgtgtattcagcaagtaactaaaggttggtgttggccaggcatggtggctcatgcctgtaatcccagcattttgggaggccaaggcgggcggatcacttgaggtcaggagctcaagaccagcctggccaacatggtgaaaccccatctctactaaaaaaaaaaaaaaaattagtcgggcgtggtggtgcatgcctgtaatcccagctactggggaggctgaggcaggagaatcgcttgaacctgggaggcagaggttgcagtgagccgggattgcgccattgtactccagcctgggtgaagaagtgagactctgtcttaaaaaaaaaaattggtgctgataaatattgatgaattctgctctctgctctctatggttgtcaacactgcagagttgaggcctcatatctcacctgcactgctgcaacagcttactggtcccttgctcccagccttctcctcttcagtccatcgtccacacagcactggggaaggggagccacttgaaacaaaagtcaacaactggttgtagttcataaacacagagctgtttgtgtcccctgtatctggaatgccattatgacccactacattttttctttcctacccctcttaaaactcagttcaggtagcagctccactaggaagccttggctgaccataatcccattcaattccatttcacctcttcgcaggcagtctggggttagggaccctttctctttgctccccaaaataaactggttatctctactattggatttacaacattgtattataatcttctccatgtgtgccttctctagtagaatgtgagctctttgaggccaaggtctatttaatttgtttgaaaaattcattgttatatcctcaaagcctagcacatagtaggtactgaatgaatgaatgaacaaggggtgccaggagactgctactcccagtccttcccagaaactgcctagggctttgagtcattttatgaagctaggtcttaatgcgtaggcaacctcccagctcactatgaacgctgacagaagagtgttttcatgtctataatcaagaattccagatacattccttttactgaaccttgaattgatcctaagattggtagtaaaggtattatgttacctcctaacagcactacaaagtacctttttttatcagaaaaaaattttaccattaggactcaatttgaagtactaatgcttctcaagttctccactatgagagttaccctgtattagaccgttacctataagaattaaggggtaaagcactaaacagaaaagaaaaaaaaaatagcaactctggtgagcagatttctttcctttcttccttccttctcctcttcctaccttcctccctcctttccctctcctccccttctctccctttccctccccttcccttccttttcttctttcctccgctcccctccccttccctccccttcccatccttctttctcttttttttacttaatccccagtgtgacagtaatataggctgatttctagaagtgtggtgtattactcatggaaagtgagttgccttggttattactttcaattgaaagttctatgggatctagaaatgagacatactggcatggagagtgagaacgacaaaggaatgaagagctacaggagcatttaggccatttctatgccaagcttattctacatgcacaaaatcatacatgttaataaatataaacaaattggaggcttatttaaaccaattatgaaatctggtaatttgtgcagcagcaatagatgataaccaaaaaaaactcataataatctgaatatcttgatcatttgtatttaaagaagcagtaattatatacttgaaagtacataatatagtattgcaaaaatgactttggtatattacaaattaaaagtatataagatgaaacttgatttgctatcaagccccaagcaatttttcaactgggcattgaattctaacttttctaagatagcaatttttgaagagacacgaacaaaaatctgaattagttcatgagccttaatgtaaatctcttgctgaaatagtttttaaaatcagaatttagttatctatcagactcaaaatcatttaaagactaacaaaacacaatcatgatattctaactgtggtcaaaccaggtacccaagccacctccctgcccaacgcctttccggcttttcccctccctcttgggctggtggttatgctcctccagctctagttcagctataattccttttatagagaaaccaacctgatacacactttcatgatgggagaaaaatgtgggagtgaaatggtatttagaaagcagcagtcaggcacggtggctcatgcctgtaatcccagcactttgggaggctgaggcaggcggatcacttgaggtcaggagctcgagaccagcctggccaacacggtgaaaccccatctctactaaaaaaaaatacaaaaattagccgggcgtggtggcaggcacctgtaatcccagctacttgggaggctgaggcaggagaaatcgcctgaacccagaaggcagaggttgcagtgagccaagatcacatcactgcactgcactccagccggggtgacagagcgaacctctgtctcaaaaaaaaaaaaagaaaaaagaaagaaagaaaaaaggcagaagccctggattcaaatccgccacacattcagtttctttatctgtaaaatggagaccaccccccgccacgctgaacggtgattctgtgactggtaagagatgctacatttttggtgcttgttcaggtggaggaaagatgatagttaacactcaggtaataagtattttgaaggcagtataatataccttcttaaagagtatacctactcaaatgttggtaaatgttgacatgattgaatctaaatggcaaagagtattttagaaaaacattaagtccctgcagataaatgacagtgttgatttggatgcttaattacattcagacatgaactgttggatgtatctgaaatgttaaaagctttttctcaacatttccaaaagtctttccaagaaatcaatgttatgttttgttccagaagcaaatttgcatttgtgatctgtttctaaaaatggtacaagttagctctgtttagaaagtaaaaatatctgatgttagattggaagtatctcttcctggggaatccagaaagataagcatagcatattgtcttactgcaatagataagttgcttattgagaagtctggttgttattctatatggtaacaatacagttgatgtatattttatgatagatcctttatattttcctcatgactttagaagggggaagggggagaaaattatgatgaccagactagttaaagagcattgaaagtccacagtactgtagctaaagtagaagtttgggtttgttatagactttacattatatcaactaataagcagatactgtacagtattgctcaccattttatcatacttttgcatatgaactactccattgccttttatagatgttttatagctgatcttaccagttttcctggtaactttttttatttcttttttttttttttgagacggagtctcgccctaacacccaggttggagtgcagtgccgtgatctcggctcactgcaacctctgcctcccgggttcaagcaattctcctgtctcagcctcccgagtacctgggactaccggtgcctgtctccacgcccggctaattttttgtatttgtagtagagacggggtttcaccgtgttagccaggatggtctcgatctcctgacctcatgatctgcctgcctctgcctggacctcccaaagtgctgggattacaggcgtgagcccccgcgcccagccactttctttaatactataactaagaatttattaaaatgcacaaattgtctaagactgtaaagtttattggggagaggccatgactacctctgaatttagtaaatttaaaatatttctgattctcaataaagaactaatatccatataaataatgcttttttcccattatgttacctgaaaataagtacttatgcaagtataacaaagtccactaaaaataactgattaccaccaaataaagcttgggaaagaccaaacttaatgaccttttatgaggcaataacattgcaacaactcttcaaagtccagatagttcttccagaacaagttacatatgctatatgttatatatattatatataatacattccaaattaatttgtgttgtggggcagtgtgttccatggacaagatgatggatggaaagtatgccttctggtcagaaaaaatatttgaaaattcacaatttatattaatgtaataaagaatctgagaaatgcagaaaagaaatggatttcccaaacatgctaagctatgggaccatttccttaaataatacagcctcgtaccatccctttggattaacatacctatatttccaaacacattttgggaaatactgatatatagagaaggcttttgttctgaataacaaattttattgatttccaggtgcttttgaaatacagagaacagtggtaaacaaagaatttgcctccagtaggaactggaaaactaacagtcctaacccctgctaatatcgacttagtcataggacagaggatgggctcaagcttacatctgctctttgaaacacgctaaacaaataatagtttaaatgagacattgctgagtaggaaatggctaaattacaggtaccaatttttaaaaagtgacgtctcaatttagaaaataaacaggaaatagtttctctgttttcaagagaatttcattacatagaagcctcttaagcagaagttccctggtatatttacctagacttcaacgtttaaatttgcagctttttttttttttttttgggacgaagtctcgctctgtcacccaggctggagtgcagtggtgggatctcggctcactgcaacctccacctcccaggttcaagtaattctcatgcctcagcctctcgagcagctggaattaacaggcacatgccatgacgcctggctaatttttgtatttttagttaagacagggttgcaccatgttgcccaggttggtcttgaactcctggcctcaagtgatccacccacctcagcctcccaaagtgctgggattacaggggtgagccatcaccccccagccaagggttttttgtttgctgtttgacaactgagaatagaactattatttctctgctctcttggagtggtctctcagcgctgttaagagtctaccaagcgtagtgactcacatctgtaatcccagcactttgggaggccgaggcgactggatcacctgaggtcaggagttcgagactagcctggctaacatagcaaaaccccatctctactgaaaatacaaaaatttgccaggcatggtggctcatgtctgtaatcccagcactttgggaggccgaggcaggcagatcacgaggtcaggagttcaaggctagcatggtggctcatgtctgtaatcccagcactttgggaggccgaggcaggcagatcacaaggtcaggagttcaaggctagcatggtgaaaccccgtctctactaaaaatacaaaaaattagccatgcatggtggcatgcgcctgtaattccaactactgggaggctgaggcaggagaatcatttgaccttgggaggcagagtttgcagtgagctgagatagtgccactgcactccaacctggagtgagagactgtctcaaaacaaacaaacgaacaaacaacaacaacaacaaaaaaaaaaacggccaggcgcagtggctcacacctgtaatcccagcactttgggaggccaaagcaggtgggtcacctgaggtcaggagttcgagaccagcctggccaacatggtgaaaccccgtctctactgaaaatacaaaaactagccaggtgtggtggtggacccctgtaatcctagctactctagaggctgaggcaggagaatcacttgaacctggggggcagaggttgcagtgagccgagatcgcgccacttcagtctagtctgggcgacagtgaaactccatctcaaaaaaaaaaaaaaaagggtctaccgttagtggacacctttagtcttccaacgagatacttccacctcccaccttgtggttaaaaaatgcttaactttgggctgggtgcggtggctcatgcctgtaatcccaacactttgggaggcagaggcaggcggatcatgaggtcaggagttcgagaccagcctggccaatatagtgaaaccctgcctctattaaaaatacaaaaattagctgggcatggtggcaggcgcctgaatttccagctactcgggaggctgaggcaggagaattgcttgaacccaggaggcaaaggttgcagtgagccgagatcatgccactacactccagcnnnnnnnnnnnnnnnnnnnnagtcatgtagtttttatcagatatctttgcacacattagaaataattttgaggccgggtgcaatggctcatgcctgtaatcccagcactttgggaggccaagacacatagatcacctgaaatcaggagttcaagaccagcctggccaacatggcaaaaccatatctctactaaaaatatgaaaaatagccaggcatggtggcatgcacctgtaatcccagctactcaggaggctgaggcagaagaatcacttgaacctgggaggcggagcttgcagtgagctgagatcgcgccattgcactccagcctgggcaacagagtaagactccatctcaaaaaaaaaaaaaaaagggtctaccgttagtggacacctttagtcttccaacgagatacttccacctcccaccttgtggttaaaaaatgcttaactttgggctgggtgcggtggctcatgcctgtaatcccaacactttgggaggcagaggcaggcggatcatgaggtcaggagttcgagaccagcctggccaatatagtgaaaccctgcctctattaaaaatacaaaaattagctgggcatggtggcaggcgcctgaatttccagctactcgggaggctgaggcaggagaattgcttgaacccaggaggcagaggttgcagtgagccgagatcatgccactacactccagcctgggtgacagaacgagacttcgtcccccccaaaaaaacaaaaagcttaactttgaagagatttggtcttctcagatgcctcctataaaaagaaacaaatgtgagaaaaggtagaaaaggccttttttgtagggagcaattttttctaaaaaggcttttcagccaagaccctctctcttacaattctgacaccatatcaacttttaagactacttttttcttagaatgcttcttttttgccatttattgcacaaacaataatttggggggggactttaaaaaatcataatcaggccaggcacagtggctcaatgcctgtaatcccagcactttgggaggccgaggcaggtggaccacatgaggtcaggaattcgagaccagcctggccaacatggcaaaaccccatctccactaaaaatgaaaaaattagctgaaataacacagctacttgggaggctaaagcaggagaatcacttgaacccaggaggtggaggctgcagtgagccaagatcacgccattgcactccaccctgggcaacagagcgagacgccatctcaaaaaaacaaacaaaaaatcacaatcagtgagattaatgtttaatgaacatactgttattttttatttttttaagagacaagtctccatctgtctcctaagcagagtgtagtggcgcaatcatagctcattgtaacattggactcctgggctcaagtgatcctcccacctcagtctcccatgcatgccaccacaattttttggatacagggtgtcattatgttgcccaggctgatctcaaactcctggcctcaagtgatcctccttccttggcctcccaaagtgttgagattacaggcgtgagtcacagagcctggcccaggatgttattttaaaattgtctttttgtcttctaaatcaacaagaacttgatagttgctttcaatgccaatcaacatcctttactactgtatacacaatgtatttatttgacatttgaaaggagatacggctgggcgcggtggctcacgcctgtaatcccagcactttgggaggccgaggcgggcggatcacaaggtcaggagatcgagaccatcttggctaacacggtgaaaccccgtctctactaaaaatacaaaaaattagccaggcgcggtggcgggcgcctgtagtcccagctactcgggaggctgaggcaggagaatggcgtgaacctgggaggcggagcttgcagtgagccgagattgcgccactgcaatccggcctgggctaaacagcgggactccgtctcaaaaaaaaaaaaaaaaaaagaaaggagatacaaaaggatgttacaacctgctatggcaagaagatacaaaggaacatattggtatgaacagaatacctcagagttgagtgtataaaaaaggcttaattcaccagatgcagtggctcgcacctgtaatcccagcattttgagaggtcaaggtcaagacacgaggattgcttgagcccaggagttcaaggccagcctgggcaacatagcaggactctgcctctaaaaaaagtatatatatatatataatgtacacacacatacatacataaacacatatgtattatatatatatatgtaatatatgtatattatatataatatatatattagccaggcatggtggcaacaggcctgtgttcccagctactcaggaggctgcagtgagtcatgtttgcgccactatactccagcctgggtgacagaatgagaccctgtctcagcaaaaaacaaataaaaaacttcaaggtggagtaggggttaattcaaggctacctaagctggatttggggtgattatggtcgagtggatgcaaacagaatattaaacttccattcattaaaagtgcttactacctgccagaccccatactaggctctatagatttattgtctctaaggtcactaggcgagtaagtaccagatctgtgactttgaacttcccactacaataagcttatgaactttgtttaagcaaaaaaggtttgaaaagtgaaaagcaagcacccatttcatagtgttctaaaagtctaaaataatccagtagaacatcagagataaaatccaaaaagcaagtttttcccccaatatttaaatcagggaagcaacatgatggtatctgtaaactataactgaaccaaaaataggaccaaacgtagtgaaatccatttagggagatattactgtgatcttgaaggaaggcctacttaatacaggacagtgggctggggaggtgtgaaccaaaaatagacacaggcaaaagc

SEQ ID NO: 233 - DNA, 2394 bp, Homo sapiens
gtgtgcaatggcgtgctctcaactcactgcaacctccacttctccggttcaagtgattctcctgcctcaacctgctgaatagctggtattacagcgacacgccaccgcgcccagctaatttttgttatttttagtagagatggggtttcaccatattggcctggctggtcttcgaactcctggcctcctgtgatccgcccacctcagcctcccaaagtattgggattacaggtgtgagccactgctcccagtcttttttttttgtttaatgaactagaatggaagggaaaagaaaagagcattgcaagcatttcttccttctgcgtatgggacaggaccctttctggaatgggggtcttatgacctacaatcaaacaagaacatggacttcccgtgcctctggctagggctgttgctgcctttggtagctgcgctggatttcaactaccaccgccaggaagggatggaagcgtttttgaagactgttgcccaaaactacagttctgtcactcacttacacagtattgggaaatctgtgaaaggtagaaacctgtgggttcttgttgtggggcggtttccaaaggaacacagaattgggattccagagttcaaatacgtggcaaatatgcatggagatgagactgttgggcgggagctgctgctccatctgattgactatctcgtaaccagtgatggcaaagaccctgaaatcacaaatctgatcaatagtacccggatacacatcatgccttccatgaacccagatggatttgaagccgtcaaaaagcctgactgttattacagcatcggaagggaaaattataaccagtatgacttgaatcgaaatttccccgatgcttttgaatataataatgtctcaaggcagcctgaaactgtggcagtcatgaagtggctgaaaacagagacgtttgtcctctctgcaaacctccatggtggtgccctcgtggccagttacccatttgataatggtgttcaagcaactggggcattatactcccgaagcttaacgcctgatgatgatgtttttcaatatcttgcacatacctatgcttcaagaaatcccaacatgaagaaaggagacgagtgtaaaaacaaaatgaactttcctaatggtgttacaaatggatactcttggtatccactccaaggtggaatgcaagattacaactacatctgggcccagtgttttgaaattacgttggagctgtcatgctgtaaatatcctcgtgaggagaagcttccatccttttggaataataacaaagcctcattaattgaatatataaagcaggtgcacctaggtgtaaagggtcaagtttttgatcagaatggaaatccattacccaatgtaattgtggaagtccaagacagaaaacatatctgcccctatagaaccaacaaatatggagagtattatctccttctcttgcctgggtcttatataataaatgttacagtccctggacatgatccacacatcacaaaggtgattattccggagaaatcccagaacttcagtgctcttaaaaaggatattctacttccattccaagggcaattggattctatcccagtatcaaatccttcatgcccaatgattcctctatacagaaatttgccagaccactcagctgcaacaaagcctagtttgttcttatttttagtgagtcttttgcacatattcttcaaataaagtaaaatgtgaaactcaacccacatcaccacctggaatcagggattgctcactccaggttactgcaaccctaactcactctagtgggaccttgactggagaaactccacgatcttcctgaagaagagaaatggatgtttccaaattccacaataagcaatatgtggtgataatgaaaagaatgattcagtcttgacggtgaatggaagacacttacctaacaagtactgctcatttacactcaaattaatcttgaagtagtcttaaaatgtgtaagaagttaaaacttgagaagcaaaaaaatgcctgcaaaaagaagatcattttgtatacagagaaccggatgaatataagcaatgaagatgaacatttattgatcttctacatacaagacttcaccataaggccaggagcagtggctcacaccttgtaatcccagcactttgggaggccaaggtgggcggatcaccctgaggttaggagttcaaaaccagcctgaccaacatggtgaaaccctgtctctactaaatattagcggggtgtggtggcgggcacctgtaatcgcagcctttcaggaggctgagacaggagaatcgcttgaaccctagaggcggagtttgcagtgagccgagatagtgccattgtactccagcttgggcaacagagtaagactctgtctc

SEQ ID NO: 234 - protein, 441 aa, Homo sapiens
MDFPCLWLGLLLPLVAALDFNYHRQEGMEAFLKTVAQNYSSVTHLHSIGKSVKGRNLWVLVVGRFPKEHRIGIPEFKYVANMHGDETVGRELLLHLIDYLVTSDGKDPEITNLINSTRIHIMPSMNPDGFEAVKKPDCYYSIGRENYNQYDLNRNFPDAFEYNNVSRQPETVAVMKWLKTETFVLSANLHGGALVASYPFDNGVQATGAKRSLTPDDDVFQYLAHTYASRNPNMKKGDECKNKMNFPNGVTNGYSWYPLQGGMQDYNYIWAQCFEITLELSCCKYPREEKLPSFWNNNKASLIEYIKQVHLGVKGQVFDQNGNPLPNVIVEVQDRKHICPYRTNKYGEYYLLLLPGSYIINVTVPGHDPHITKVIIPEKSQNFSALKKDILLPFQGQLDSIPVSNPSCPMIPLYRNLPDHSAATKPSLFLFLVSLLHIFFK

SEQ ID NO: 235 - DNA, 45364 bp, Mus musculus
  misc_feature (1)...(45364): n = A,T,C or G
tcttttgatttttattgtttaattcactccaaccttctgctgggaaccagagctgtacctctagtgctatctgtcgtttctttgactcttccctccttcccttttatggctccatatgatgatgcttgattgtgcagataatccaggatgctctcccacctggcattcttaatctggtcatatctgcaaggtctgttttgtcactaaaggtcacagggtcacaacttccagaggttagggtgtgcgaatttttggagagccattattctgctctaccacggtggatttctctagactttatgttgagtgatacaactttgatgggttaaaattagctatgttgggagtatttaaacacacaccaaaaaaaaaaaaaaaatccagaaaaactagaaaatcaaaaagctatgaaatgccacacatcggggttactgtcctgaggagctgctgttaaccctttcttgcatacatatctctagttacaatggcaggcttattatcaaacaaagagaatcataaatgggtgtgctggctaacacctgtcattccaacaacatggctgggcctgggaactgccatgaattccaaccaggagctatatagtaagtatgaaattagtctaggccacagagtgagaccttgtctcaaaaaagtgaatggaaaaatacgagaataatatataggataggccactaagaatcaatatcgggagaaagaagatttagggccgaggagctgctttagtgggtaaagtcccggactccttagcacttaggtaaacgctgcacacagtgttgggcatctataatccctgggctataggatataggaaggtttcagcgctcactgatcagccagcctaactgagatggctaactccgggtttgatgggagacaaaacataaggtggaagagctgggagatagctcagcagttgaaagcatttgaaccccaatactcttgcagaatactggagtttggttcccagcacccacaaggcaggggtccagtgccctcttctggcacctggcatggagtcagtacactcacatacatgcaggcaaaatgcccatacacgtacaataaaaagtcaattaatagagagatagataataaaatgaagagcaattgtgacctctccctcctacacacacacatagttagtgttctattgtttgagacaggatttccctgtgtagccttggctgtcctggaactcactctgtaaattacaaacccagagatccacctgcttcagtctcccaagtgttgggattaaaggtgtgccctcacaccctgcccccactgcctggccatggcaattcttgtataggaaaaaatttaactggagctggcttacagttcaaaggtttagtccattatcaccatggagggaagcatggtggcatgcaggcagacatgatgctggaaaggagcaggcagaaggaagagagtgacacactggtcaggtttgagtatttgaaatttcaaagcccacacgtcctctcacaagatcacacagagagagccaccctttccaacagtgccagtccccatgagcttatggggtcattttttattccaactatcacagcaacagaacacagagatggagtcactacaggcctgaaggaatgttatctggtgatcttgggctccttgctggatggaatgattccagttttagggtagaaggtggatgtggggcttactctttaggttataaaagaattgtttgaggcttcggggttgctttagtttttgaagtgcaagcatagagagaagggtatgtgctgatattgagcattcaaaaagtctaggcatagtgtacgtctgtcattatctctggacagtcctcaacggtgccaccttcatatgcttggacagtgtgtgttactgtcgcagactgtttgcccgaaacagcttgagagaacaacaacttattttggttcacagtttccgaggggtctcagcccctcaaagagaaaggggcaggagcatgttgtggctgtcccagaggagggagcatatcgcagagctgttcacatgacggtcatccaggaaacagaggagggatattagcatcatgagtgagtataaccttcaaagaccctcttctggtcacccgttttcagcagtcaggactcacttctgaaaggttccacagctttccaaatagtggcacaagtggggaccaagcatgctcaaagcttgtaccttttggggtcacttttcagatttaaatggtagcaggcattatcccacatgtgagagggtacaccttctactaccaaagctaacaatacttactgttaatttcctagcgtactaggcccaaccaagtccattcccttttaaaattaatttgtgggtatctatgtgtgcctgttttcctgtgggcacctagtggtgtgtgtaattgggggttggagggacacggagcatgccacagtatacacgtggtggtcaggagacaattttgtggagtcagttctcttcttcttcctccttacacaggttccagatatcaaactcagatagatcacgaggcgtctgcagcaattacatttattcactgaaccatctctttgaattcccaaagacaagtaaaatcaggtgattttgtgtgttttgttctttctctctctctctctctctctcttttttttttctccagataaagtttcatctcatgctggcatgggactcacttagtagcccaggacgactttgaatgtctggtcctcctacccccatctctcttatgataagattatagtatgtgcccctgcatctggcttatgtagtactgagaatcaaatccagggctttagacatgttaggcaaacactctatcaactgagcctgacaaattaagggagaaaagccaattcagaatttgtgagtgtgttggttgagcctatgtcaacttatacaaactagagttatctgataggagggaaacttaattgagaaaatacttccataagacccagctgaaaggcactctcttaattagttatcaatggggcatagtctagcccactgtggatggtcccatccctgagctggaggtcctgggttctataagaaagcaggctgggcaagccatgggaaacaagccagtaagtagcattcctccatggcctctgcatcagctcctgccctcaggtttctgaactgcttgaattcctatcttgacttctttcaatgatgaacagcaatgtggaattgtaagccgaacaaaccctttccttcccagcttgctttttggtctggtgttttgttgcaactatagaaaccccaaccaagacgatgtgtgaatgtttactgctatgggaaagtgggcataggattgctggggacctcagacaatgcgaaaggaaacttagaaaggttcccctaagagacagggaagctgaactcagctgagatctggctttgtaacaggaagcagggtatgctttgtgggttgttgagaaaactttccagtttcagacactgcctcttccctttcctctttccttaaatatgacaagacagcttcggctgcagctctaaacttaacaactgtgagggtaagataggagtcagtggggcatggaggagacacatgcctttaatcccagcacttggaaggcagaggcagggtcgatttctgagttcgagtccagcctggtctacagagtgagtttcaggacagccagggctacacaaagaaaacctgtctcgaaaaacaaaaaacaaaacaaaacaaaacaaaacaaaacaaaaaaagtaacagggatggaggggggtggcgtgggtgtcagaagatactggctttgatattgagccattaaaacatttttttttttaatgtcattgcagccaggttttctgttatttgtaggcaaaggcattcagattcctaactgacttactttaggatcacttgcagccaaggacacggtctctgactctgaatcaaaagatagctctaagtaagcagggactgtagagactctttctggcatgatagtagtggcagttctggtggcaccagccagtgtgctgacacttcagatcttattttgctccccgatggccttcatcaggggtacagacaatggcttctttgttctgagtaataactgttaaccattgttttctaagagccaagtgtttttataagctgtatattttttttttcttaatttatatcaaccctttcagttgggtactaattttgttcttggaggttaagtgaggataattctaagatcactcagtaagtggcagatttgggattcatttttgggtcagcgtgaccccaaagttagattttaactcatccttgctatttcttttggcaattcctaaatgtgacctgggaccctgatttaagatgcagcctggggccctgccttaggagggggagtaagatgacagcctcccaaaggccgttgtctgccatcagcccctcctggcagaggatacatgatctgcccgaatgcacgcaggctctgagccaggctgcacagatgcacacagtcctctgagccaggctgcagggatccatgctgtcctcccagccaggctgggaagtgctccagatgagctgccagaattctgtgtctgaaaccctgagagataagggaggagacttgggtagcactcttagagacaaagctattctgtagatctggaatgtgcctgaaacccagcctccccattaccctcccccaacccctccctgcttccaaccaaaaaaaaaaaaaaaaaaaaaaagaggtgataacatatgcaaagactgctgcaactcctgcttacaaattgattacctacaagcctgtcctccttttctcttatcagctacagtttgggggctgagaccccaaaccaaaaccctatccccttctcaacttcccatctcccatacctccaagtttcagagccaacttcttaactttttcatttagtcaaaaatctccaataaatatttattatcaattttgtgccagagcacaaggaactatagagagaaagaaactaatagggggagaaagacatcaaaagataattgcacccagcacttgggaggcaagggcaggtggctctctatgagtttgaggccagcctggttaatatagtgatttccaggttaaacagtgctacatagtgacactctgtctcaagacaaacaagcaagcaagcaacccccaccccaacaattattattataggactcactgaggaggaaaagcagcagtgttggaaatatatgcgtgctgtcagctcttcctgtactgtagcaagatgcctgagactggataacttgtaaggcatataagtttattcctcacagttctggaagtaggaagtcctcaaggtggctgataaggttgtgctctgggtttctgagatagtttcttgttgccaagtttttacagggtagaaggtaggagggcaaagggcatatagctttcaagtcttttaaaggcatcagtgctatctatccataagggtagagtcctcatagcctaatcaccaccacctcctcctcctttccctcctcctcttcttcctcttcctcctcctcctcttcttcttcctcctccttctcctcttcttttctccttcttctccttctcctcttcttcctcctccttcttctttaagttttatttacttattttatgaatgtgagtgcactgtagctgtcttcagacacactagaagagggcatccgatcccattacagatggttttgagctactgtgtgggttctgggaattgaactcatgatctctggaagagcagtcagtgctcttaaccactgagccatatctccaccccctgcttaatcacttctttttaaaagtcccaacacttgctattgattagaactgtttcgatatgaattttaggggaacacagttgtatacagttgtagtttcatgggaccagatgtgctctaagtgatcacagcatttggtttccctctatcctcaccatctttgttactgccataaggatggtttctcttaccttttttttttttaaagaattatttattttatgtatatgagtacactgttgctgtcttcagacacaccagaagagggcatgagatcccattacagatagttgtgagacaccatgtggttgctgggaattgaactcaggaccactgagccatctcttcagcctggtttcacttatcttggaccatatatttcagtcttctctctcctaaacaaatatatatttacgtattttaaaaagtatgtgcatgtatgtatgttgctgtgtaggtacatgcatatgagtgcacatgttcttggaggccagaggcatcaggtccccctggagctggagttacaggcaattgtgagtcacccgacatgggtgctgggaactgaacttgggttcttcacaagagcagtacggattcttaactgtggaaccatctctttagtgcctgttctcttttttaaaaattacagattattatcaaattattactactgacgtgtgcgcgcgcgcatgagagagagagagagagggagagagaagagagagagagagagagcgccatagtaccacgtggaggtcaaagaacaactttgtggagttggttctttccttccacctttatgtaggttccagggatagaactcaggtcattaagcttttcagcaagcacctttactcactgagctgtagtgccagccctctttctgacctttgatgggtctgtcttgcccactcaagactatgctctacagaacattgctaaaatgcaatctaatagctcttccattacagtctgcccctcctgtgggggtacagcccaggggcagagcatcggaccccacttctcctcttgaggggttggtttagcctcttcgtccaacctatgtcaaagctgtccacaggcactactcacctcatcttggccaaattcctatttctaccgttttacccatccatctcagcccaggaaatgattattctgaattcaaggcatttgctggatatgcgctagatatgagccaattgtagatgaagcattgtggtctgggcacagaacagaatcagctaaggaaaaagaaaacaacaaaaacaaaacaaacaaacaaacaaaaaaagccagcagcaagctactgttttttcccgggtgtagaactggaataaggtagcatagtgtttggaaaggccaaatatatatccttcaatatatagacatgtatacagcaggtaatgttttcatcctatctgtcactggagtcataagtgtatgcatctatatgctcagtcaaaacaagcagttcctcagcatattggctgtaagttatgtttcctatcattgttttacaagatgacttcaaaaaggctgcttctatttctcatcacaaccctataaattatcatcccagttttacaggtaaggaaatggtctttaatttgtgtatgtattatgtatgcatgtatgtgggcatgcatgccatttcaaacgtgtggcgatccttccaccttgatgtgtattacagagctcttcaggtttacgtggctggcacttttaatccaggaaccatctcactggccccctctcgtcccctctttcttctattgctcttggacgcatggatggatgatctgtatactttgtgtccctactcacaaaagagatttaggagggtaaaattggttagggggaggggctgtctgttctgagctgcatatagactcatatttaaccttttgattttgttttgttttgttttggcaaattgttgctttgtagtccaggctggcctcagactcagagtcgtcctatctcaatcttcccagaggtgagatcaaaggtgtgcatcacaactctgtttgatgttaagacagtatttattggttaaacttttaaattttaaacgtattttatttattgaccaggcaagttggcccatacttttaaatctaacactcaggaggcaaagacaggcagagatgtctgagttcaaagctagtctggtcttggctctagggtagccaagggtatgagaagttttctcaagagaaaataaaacaaaaattttatttgttgtgtgagagattgaacccacatggaccatgaatgactttttgaagtcttctctccttctgtcaggtaggtgttggggaatcaaactcaggatttggaagcagatgtctttctccagttgagtcatctttccagcccaaatgtatttgtttgtttgaggcagggtctcactgtgtctggaactcattatgtagaccaggctggccttgaactcacaaaatcaacctgcctctgcttcccgggtgctggaactaaaggtgagcattaccacacctgcccctgaaatgaacatattataaacggatgatttttgtgccataatttggtatgttgtcatttctgttttaaacaaactgggagtcataaactgggggaggccagtaaattgtccaaagcaccttgatcaaagtcgggactctagtaaagggctcggagtcaggaatggaacaacttacgtctacaaccagaggcacccaatgcctcaaatgttcccagatctatctatcactggggatgattaaattcattggttctaagacagtcaaatgcgtgctctgtttaaagtttcaacatctactttgtgaccttggcaagttattcagcttcctcatttgaagctccgaggatgtaatggtacctaccgcagagagttgctattaggattaaatgaaaatggtttgagcgctcagcacaagcctggcatgtagtcagcgcacagtaaatggtagctattattacatgaactgtatttgttgaatgattgactctggcatataacacctgcattcaacttgaacgcggagttgtcagtcatccagtcgaaggggtaggaaccatagcacagcactcgccaattttttttctagaaataaatctttgtgggaggataatgaccggttggaaagtgttaagtccggaggaaacaaagacgcgatcccctgtctaagaagcagggaggcgaagactgccctgcaggctgcagttacagctctgaatcgcacacgggctcattagcagccagctgggcatacatagcttggggcgatgaagcctcaaaagcaagatttttaaggaatgggacaagatctcctttaattttgctcatttcatttcagggaccacaccctacagggtgggaggaagaactccgaagcctgaggcggaagcttaagcacagccacggacctgaccatctatggtcacaaaacgcacagagcaaacaggaagtggggcgcgagtggaagattttctccaccttcccagccctagcctcggaatcgagcgagggcgagcatgcccagacgctcaaagcctactctattagcctccgcgaccgagtccattgcttttctgtactacagacagggaaaccaaggcttgcacgcccagccaggggcgaaatttggtcccggtccccccaaccaccagacactgggtctcagagccttctagccccactgttgttccctgaacctcttccggactgaggctaaaaacgtaacgacctcagtctccgagcacaaattgacaaaacaagcagccactcagctgtcttcctttgaggaggtggggcttggttaggaactccagctccttattggtctgggcctcggggcgtgaccaaccgggacacgccccgcgatnnnnnnnnnnnnnnnnnnnnnnnnnnnnnnnnnnnnnnnnnnnnnnnnnnttcctcccccacctcccttggaggcggagcccttttccaaacgctcctaagccagattctctctccggtggcggggaatgagggcggagtcacgagcggagcggccaaacttcttcctctcccccgggctagcgttacagccagtggttcatttccggtgggggtgccgcgcccagtgagggcccggaagtgggtcgcgcgaagaccgctgggcggttcttgccggaagtggagagcggctgatcgcagtccggaggtgaggcggaactcttaaggtgagggttggtggttggttaaggattggggtggtctttggggcccaccgggtcctggccgttagtaacggctgtgctagcctacgcgcgtttgaggagtcctgctgaaaggccggggttggggcccttcggccatcccgggctcctgggtgcggtctcttgaggtggggctggggtaccagattgaaccaggaggtcttggggaagccactttctccttgatttcgcagctctgcctatcagcctccgcggaggcctgattcctaaaggcatcctaaccaactgaatggaccctgggagaccttagaatttcctcctgaccgggtcttgttcccattactcggatgggtaacttgatctcggagaagaaaagaatctggttttagagagaggtttccagtcctagatccttcctttccttggaacctctctaactttcgatctgggcagctgcaggttaaaggctatctggtagtagaactaaaaaaaaaaaaaagttaaaaatttggaatgcctgttaaatttaaggtaggctagtaagccctgcgtttacgttcagtgagctccccttactcttagactgccactgttcactcgcaatccaagctaactttatgggaggtgctgtccacttctggatctgaagtcagatgattcaggttgggtctggcacagttgccaagtgcctgtggtcgtaggatcgctgtgtttattctgtgttggcaacatggaaaatgtcatcgaatacagctttgaaaagtctagtcattgcccccatcgagttagcagtgaaagacagttaagaaatagttacaaatgtggtgagggtgctgtggaaggacgcagcaagggagtcagaagcgttttgaaagatcaagagggtgtgtgtgtgtgtgtgtgtgtgtgagagagagagagagagagagagaatatattagatagaggttagttagtatcagaactgtcagctgtagctctttgtactgctttcccttgaagtgaaaatccagggttagaacagcacgttcatcatctgccaagcatttattggacctcagtatgtgtgaaaacattttagcttaggcacttagcccttctggctaggaatacacttgttctctggtgatatgtacagtatgggaggaaccggcaaatcaagggtggttgagtgtgtgcactgtgtgaacacagagctactgagaacaggagaaatatctgaaccacagttctaggcaacaatgagggacttagtgtttcaagatttccttaggcatataatgagcctaggaaacggatttctaggcagaactagatggaaaggcgcagagacctaggcatgagaaagacccaagtgactagtcagccgtgttgtggttccagtattacttggagaagtggagaaaatgagaggttgtggagtcaaatagggaggcccttggaagcatgctaaagaatttggattttagcctggaagctatggggatactttgaagggttttcccacttggcagagtgggaagggaccagacactggagtagaccagtacttaaaaagctgttgctgtgtcatggcttgagctggagaggggaagtggaaatgaccaagaggggttgcatttgagcagtcttggccatatgtgatagtgtgtgtctgccatgtcagcacctggagtttgaggcaggagaatcacgagctgaagcctagggcagatatcaaggctggaatccaaggaactggaggcttgttatttatgggagtgaagaagtagttgtagtctggaaattgctgctgttctggtctaagatactgtcagtaccattcagataaggaatataaaaggttcattggaaagagatataaaattgtgaagtgacaaagaaaaaaatctgtagccttctgggcattagtgcccccaggtctagccagggcaaattgcaaaggtgtggcagaagagggtttggtctgtactgctatgagaaatactcaggcctggagttcggtaggagctgggagcggggtggggtatctggctggttgtttggggctttgaatgtcttagtctgaatgtgtttggattttattttgtaactgtctgttgttgctgtagtgctcagcacgcataactttctggacacttcctactttgcagaaatattctgtaggtcagcggagcataattaatgatgcagagaaggttaataaaattggtagcaatgaaagtactttaaagtctaacttaactctgcagaccaagtggtaggtactggtgacttttctgagtgcagcaggccttgaggaggcagtgtttcccttctgaggagaacttttttcaaccatgttcatggtagcgcatgaatttttgttgttgttgttgtttttaatcataggctgactggtttaaaagaatgacttcttcattttggttttctgagaaactataagtacaaggttcattttgcttaaacaagcaaatacaaagtgttattggaagtaaaaccctttggcttgaaatttaatgctgagatttgaaacctgaggactatacactatatcttaccaatggttgtgattatttctttaaatatcatcatcagtttatctagtattaacttgtcttctgtacctaacactccagcttctctgtaccatagtgaatcatttaaaggtcttgaaaacaaatcatttttcacccttttgcctattattctcacagacttcataatcccaaagaaccatgtctaaatttttttttccagcttaccagtcctctacaattagacttttacatgttgtgttgtgctgtgttgtattgtttctttggaagtgttcgctgttgaacccagggcttgtgcttccttgtctcctagtgagctgtggcacagccccactcagacacttgcctaaattaattttcagactcgactttctaatttagattagcattttatgtgagtcatttgttctccctttatgcttcttatattagaccagttttttttttttttttcagctttggcacagttggcattctgggctgtcctgtaagatgcttggcagcatccctggcctctatccattggatgctggtagcacttcctcagtcgtgatagccaaaaatgtcttgagacattgctaaatgtttcctggaggaaagaatttctcctggtggagaactgcttaagaaaacttcgtaggtgggctggggagatggcttatactataaaggctcctgctgctaagcacagcccttgagttctatccctgggactcacatggtggaaggagagaactgactcctgcaagttgtcctctgacctctacccacgccctgtagcatgtaggcatccacacaataaatgagtgtaatagaaaacatagctatgttctactgggtcttatttcctcagctaacatctctgaggaggctctggagctgcacttagcacagtgtatggtacattctaagcattgtacactaatgaataagtcatttgttttcattgaggtactgggaagttgttgtgcttttgaggaagtccttaccaccctcctaagacccctgtttcagttattctttttttaacatctattttttaatttgatgtatatgcacatcccaagtgcatgcatgtccaccatgttcatgctggttaccatggaggccagaagaaggagctggagttacagatggttttaactgcctggtatggggctgaggacctcagggtctcttctgagagcagcagctgctcatgaccactgagccatctctccagtgcctgacttgcaatcttttactagagaaaggccaatgattggcaggaactggcagcagagtttgtgttagttacctggcaggttagcagatttatctgtccctgatatggaaatgtagactcctttttgatcatgttcatattgctagcagttagcttgcttgggtttagtggctggggattatagagttgatagtcttgtagtttctttcttaaattaatataactttggcattcaccataaaactttcttctcaatataccgttatgtaaacccaattaaaaaaaagtcaaagctctaaaaatatcctccgctacagtgcagctttgtttgccttctattaccagacatgtgccaaacttttccatttggctaggaaatagttgaaatgtttaatggaaggaataagtagccttgctatttttgtttgaggtttttttttgggaggtggggtggaggagaatgtttttagcactttccttcctccagaggccattacaactcctatatttaaattaattatagacttagaatcacagatcttttcatatctatagttgcagctgaatcatgtctaaggatggatatcatctttgaaaatatctttatgtttgtgagttggaaaggctgttctattaaagcacccatccaggcagaaatcagcagtgcagttgttctatacagacacagggaaataacaagggcctgctgaatgttcataatactcttcagtctacagggagagaggattcatagccacacagagttatctgttagccctgaaccattgaaacagctagttcccaagtctgacttcagcctgggagatattactcgtttcacctccctctcctgagtctcagctagaggaccgtagcagaggggaataggagccgagccctgacgttgacttggattccctccctccctagaagataggcctttcttttctcttttagtctaatcctcaggtggcagtgacttgggcacgaaatgtcattggtttcatcagtgaaaccaaaatcttagggaagaacagtggctcctgatttgggttagatgtagatgacatctttacagagttgattctttggtttctgggttaagccagctgtcttagaatttctgttgttgatacaaacactgtgaccaaaaagcaagttggggaggaaagagttttatttggcttacacttccagagcactgatcatctttgaaggaagtcaggacaggaagagggcaggagcttatacagaagctaaggaggagtgctgcttacccgagtgggaagccttcttcagcctgcctttttatagaacccaggaccacctgcccaggaatggctccacccacatggcctgggcgtcccccattgatcactaattaagatgatgtcatacagctggatcctatggtggcatttttctccattgaggggctcctttctttgatagttctaaattgtgtcaagttgacataaaaccaaccagaacaaatctacatgtaggtatttcctattagcgtgtttagaggctaaggatctatattatttgggatagaattaactaatatatatagctttgtggtagcttgaaacaggcaacccaggagtggtgttctctcgctcatcccctagtccctttttgaaatagggcctcgatatgtaggcctctgcttcctgggggctggattaaaggtgtttcccttttctttctttttttttttttttaaagatttatttatttattatatgtaagtacactgtagctgtcttcagacactacagaagagggcgtcagatctcgttacggatggttgtgagccaccatgtggttgctgggatttgaactccggaccttcggaagagcagtcgggtgctcttacccactgagccatctcaccagccctcccttttctttcattctttcattcactgtacttctatgtcaaagtttagaaaaaaaggggaatttgctgacaactttgtaatgtgcaaaattgtaaatcttatctttaccccccgcccccgccccccagtccatttagctgtttcccataattaggagcccaaggtactttcactatagatgtgtgcatggatatgtaacactacagtgaatatcttcatgttatcatcactttcaggacattatgatagtatactttcttaggataaaatctcaacagggttacaaagacaagcctaagaaagcattttttttttctttctttctttctttctttctttctttctttctttctttctttctttctcatattctctctctctctctttttgttaggttttgttttgtcaattttgggacaggatttctttgtgtagctctggctgtcctggatctcactctgtaggccaggttggtcttgaactcagagacctacctgcctctgccttccaagtgctgggattaaagacgtgtcccaccactgcccagataagagaagaatttttttttaaagatttatttatttattatatgtaagtacactgtagctgtctttagacactccagaagagggtgtcagatcttgttacgacggatggttgtgagccaccatgtggttgctgggatttgaactcaggaccttcggaagagcagtcagtgttcttaactcctgagccatctctccagccccaagagaagaattttaaggtcagttggtttattaagaatatagactgatttggacagttgttttcatttctgttttatatgaattgatgacttagaactcccatgggataaagtagaaaccatttctcactactggcttatggcctcttgagttgtgaccagagctgctgtagtaacctagtccctggccttctgcatgagttaatgaatagtaagaagttgttggaatgaggagattgagaggttgttagttgctgacgtagctcagtggcacagtgtctatgtagtgtgtacaaggccaggctgtgggttctatccctagtaccacaaaatatagaaggatgaaaacaaagcagttttgcaagggtctggaaccatttctagtttttcttggttttggactgcaaaagaagttgctggagagtcaggctcatagtttccttccaccctgcatggtgatgtcatgaagcttttcttgccagtgacttgtaaacatcatctccagtcttgatcctttcccaggctctctttctaaatacttactggacatttttatttagaatcttcatcttttcttcagactccgtaaatctaaagcagacaccatctttttgctgtaactagaacctgctactgccttaatgccatcattcttgtaaggcccccattcttgtgactctagaattgcccttctctcccttctgaatgctgtagtgctttcagtccaggaccagttacccttgttctctgtctggttcacactcatgtgtgccctccaggggcagagctgagagcagtgggtggaagtttcagggaggcaaatttgcctccatataaggagtacttcaagctgtctgcatagaaatgggctgtctcagagtctagggttctttctctatgcctgaaggtgcttgatcacaggctgcccagctaattgctaagaatgttgaagggactgttctggcatcaaatggagttttgataaggtgatttctacagttacttttaatccggagaagctgattctatgggaggtagctttgcctctccccttttgggcagggaaactatttcatcctttaaaaaaaaaaatctcagcagttaattcaggtgccagttccttagttgcctaaaagaggactgattgtaggctaattgatggttttcagttaccagttattgtaggttttttgtttttttgtttgaaatattttgatgaattggggcatggtagcatgtctttaatctcagcactccaagcagaagcaagcaggtctctgtaagtttgaggccagcaggtctgtctacacagtgaattctgtgccagccaatgctacttattaagtccctagtcttttgtagtagccttcatcttttcctgagcattttggagcagctaggtaggtgagcaaccttacagaccttgatattttccctttcgttcaaaccttattctgtttaccagatagtatttgtaaatgctttgctttctttcttctgtagtcctttttttcatttccatcgtttataacaagccagacattagctggcttttctaggatatctgacccagcttatttagccagccttatctccatactgcatcattctaaactttttttttaaagcatagtctatttctgtcagtttttaaaaggatttatttttaattttattatttttgagaaaagatcttactctgtagcctttgctggcctggatctcactattatatagaccaaactgcttcaaactcatatagatcccaccctaccttcccccccccccccatatgtatatgtatgtggggggggtcttataagtgggcttggagaaatggctcagtttattcccctacacacacacacaaaacacacacactcacatttttttttaattttatttttgagagagtttctttgtgtagccctggctgtttgggaacttattctgtagaccaggctggcctcaaactcagagatctacctgcctctgcctcccaagtgctgagatcaaagatgtgcaccacctaaatttttttttttttttttaatgatgaggatggcttgctgaaattggttctcttcttgtcttgtgggccctgggtattgaacttcggttgtcaggcttggtggcatgtactttaacctctgtgccatcttgccagtcctaaaatgacattttctaataagcaaaactatttccctgtgttacttagtttcaagatatctataaagatatctatgtgatttgtgcctgagaaagcagcatttattttcaggtgaacattatttgtaatatttttacaaagacaagcaaagaattttaaggagggggaagaaacacatccccgcagagttgacagaagggaaagaggccaggtccgttttagatgtcagtgggtaggtcctacacacatttgttcattcattgtccaaagatccactaaaaccaccatagttttagctcctgttaatttcctaatgctggatttacaaagacaagccatgattcctgccctaaggcggcaaattgcctgttggttctttcctttccttccatccacccacctatctaccaatttatctatctatctatctatctatctatctatctatctatcaatcatctatctatctattgtgtgtgttcatccatgtgttcatctgtgtccctgtacatctgtgcagaagcatggaggtgaaagaacaactttcaggagttttttccccattatgagggtttccgggatctaacttggggccttaggctcggtggcaggtatccttatatgataagcatcttatacccttatatgataagctaactcatacccttatatgatgagctatctcacccactcctgcttgttggttattaagtggttttaaccctctgtggtggtagagataagtggcacagtatcatggaagtacataaggacaataagtacataaaggacaataagaattcctgagatggggcaaagtgccaccatgcagggtgggtagcttaataagtgaaagaagacatggctttttatggaagtccaagtaagttggttgctgaagtgtggttaaggtagatggaatgagaagtcggaccaggtgaggataggtgataacacagggccagatgatggaaaggcttatttggactttaccctgaatgctatggggaatactgaatggtattaaataagatataatgcagtaagggaaagctcatgatgtacaaaacctattgacttgagtttgattatggaactcatgttggaaaaagaacccagatggatgctggagcaagtttctgtactccaagcattcttccagcaagatgggaggcagagacaagagaatcaaccaaagagcacatacacagtgcaaactcaagaaacactgagagaccctgccccaaacaaggtagaaggagagaattaacacccggaaagttgttctcagcacccctcccatctccacacccacttacacaaggtttaacaacatatacatcctaattatatttgcatttgacatggctgaagaaagggtatgttgctgaatttaggggagacaagctaggaagttatagcactaaccaaggcaaaatttaagtgatttttgtttgttaaagtcaggatgaaagcaagggacatctattcttgaggaatgcaaaatatagcctgtagatgtgtttatttaagacagtttttcatgcagcatttgggaggtgtatacaggagaaccaggagttttgagaccatcctgtcctgtgtgagaccctgtcggtacaaaacagaacaacagaagaaccactcttgtttgcacagacagggtctatggctgacagtttccaggttattagcttgggcacttatgtgactgcgagcagtgctggggaagaggaggcatggtatttgtttgaggtgccttggggacagccaggtttagatgtctagatgggagctggatctaagattctgaatcccacaagaatggcttgacttgaatatgctgctctgaggtcttaacggataagtgcttgtaagcaggttggatgtgtttctatagtaatggcagttgagggttaggaagaagtggacatgatcaccctgagagtgtgtagggcaagaagaggtgtgtcttgctgaaagtggtggctcacacttgtaatctgagcactggggaggagagaggcgtgtcatttggcttgtttttgcttttggatattctttcccataacctatcaaatctcactctattcccacaaaacaaaacaaaacaagaacaacaccagagccctggttactgctctatatttggttagtggtaggaagaaatgagctataaatggtagttttatccaggtaaggtgttcatacctgtatttttagcacatgggaggtagaagcaggaggatttggagttcagcatcatctttagcaatttgggagttacaagatttattttttaaaattatgtgtatttgtatgagtatctgcatgtaaatgtaagtgtcccagaggccagaagtcattagatctcctggagttggaattgtaggtggttgtgagttccctgaagtggatgttaggaacagagctcaggttctctgagggttggtaattttttaatttattttttaaaccatagatgcttcttttcagcccctaaaacttattaaaattttaaaattagttgtcagggctggagagatggagacctcagagcagcatattcaagtcaagccattcttgtgggattcagaatcttagatccagctcccatctagacatctaaacctggctgtccccaaggcacctccaacaaataccatgcctcctcttccccagcactgctcgcagtggttaagagccgtggctgtactacctgaagacctgagttcaatttatccacccataaggcggcttcagttccagatctgaccccctcttctggttctgtgggccatccatatataaaaaatacacagacagacttgtatgcaaacacccattcatgtaaaataaaagtaagtcttaagatgaaatgcctttagttttcacagctgtggtagcatgtactgtcctacacagtttgtatcgaagtttctatgttagctctggcctcactgcctgcctttatgtgtggcagagcatgttatatagcaggactgagtgctttgcatggatggtagctttgggatttagtttattcccctagatttatagtgtggattacatgtgagtctgccctggccagtacccagactggatcaaagaagtagaatgtatattgtttgatggtcttgctgtcccaggtctgttcccatgtgactaggaatagacccagaggctcctgctgctgcttcagctcaggaaacagaaaaggtggtttctcacgtttattattattattattattattattattattattattcccccctgctcccccactggcactcgtaaataacacttggtaacaagtgactggattcagagagatagaacctgcacatagagaagatgaacagagattgtattgtctggtgagctgctaatctcctgcacagggaagctaatgtggaagagtgagatacgctggcatgctatctatcgttttggggaagattctaattgttgttggagtcactgagtcccatcagcttcagttacttgaattacctaatgtttgatgaatcagactataagtcaaggctttcactgaaattctgcaatcacagttaccttgtacaggtgctgataggcaatgcttcacacttgggtgtgtagtccaagcacctgtcaggatccttgttcttctgtggtttcataatgtgtataggttcataaataaatcctgcacaccttctacctaaccagcctggtagttagtggtctagaagggcgagtagagtagggtcaacttagataaccattctttgctcttctcttggagcttactcttactcttagacagtgaatgaggctggttcaggtaaggtactctctgaaaagtgtatagcaagctttcaggtctgtggtttccttggctgcatagccagaccccacccattcccgtatgagcttggctcagatggcagcttcacgatacccttatctgatctcccagctgatgcgttcagcctctgaaactccatgcctctctgtctgcagcttctgtcaccttcagctttttcccagcttgttcggtggctattagttaaataccctctccccaccctcagtaagaagttagtgaggatggtatttatcttggtatgtgatgtcctactgtagacagggagttgggggtggggtggaaaccatattgaacatagagcttggaggcttgagtgttggcttctgtggtgactagtgtgtgactagagacaaattattaaatgttactaaaaattaaatttctgttttaagtgtattgtaattggttgagggtgtgactcagtggtagaatgcttacctaacattgatgaagacctgggctaaacctcccctccccgaaaaggagtatagtaattatcccaaatagttgtagggaggtttaacctgagaaaacatgtatggcctactttgtaaattctaaactcctacacaaatatttgttagtatataccaagtccccaagtatttgagtaagatttgcattagtgaacactttttcctgtgtagttttcttacttaatgaagtctgcatggttttgcaaatgctctagatgactttccccctgtattttattactaaattaccctgttctatggatttggcatcttcctcacctcatgtagtataatattaaaataacataagacatttgatctgtttcagcaggtggaacattatggctgacatgcaaaatcttgtagaaagattggagagggcagtgggccgcctggaggcagtgtcacatacttcagacatgcactgtggatatggagacagcccttcaaaaggtaagccagacccagtggggtgctcgctctgtgtgatcctggcctagtatttctgtcctggtgaactttcttctttggagctcacctcccagactaatgtaggtagctcatctcctgcgaacagataaggaaggaagtgacttggtgcagacctccctgtggttaagtaattttaacacaagaacttcctgcttgtgtgatgtttcctgtcctttctttagcagaatgactagtcattctgtcagatgacaagtgaaactagttttttctctctaagtgattgggacaattatccattttgcctatacactagccaaacatagaatgttagagatgaaaggtatcttggaggattttcgtgtttattttcaatttatagatgaagaacattaagcccagagagtaaggatgtcatggattcagttagtgatgggcttagagacagagccctgctgttcgactcctgctctagttttctgtgcactgggtctcattggctcttctgtctggggacctggctcattgggttaagtaagtgcttgccgtacaagcttgatggcctgcccgagttcagatccacagaaccctcttaatgctgaacacagtagcatgtgtctataatcccagtgctcctgtgtgcaaggacaggagagtccgggaacctcgtggactacgtagccaggtgtgtgtagtggtgaacaggaaggcatgctgtcaaagtagaaggcaggaaggactgatacctgaagttgtcctctgatgaccacgtaagtgccagtacacatcactcagtgtctctttgattctcctattgcgtgtgtttgccttccccaggagcagttccatatgtgcaagcatttgactcgctgcttgccaatcccgtggcagagtacttgaagatgagtaaggagatcgggggagatgtgcagaaacacgtaaggacacgggggccctttctttctcctcctatttaaggactggaagcttttcttcacatctcttcaccctcatcataggggcgtccgggagccccctgactccttttcttcttcctttattggtccaggaacagaaatggggttcatttttctaggtctcctgttttattacatattctgtgtgtttcttttatgacaaagcttgtttggtcataaaatacaactgtgttcatctttgtggtggagaaggtcctggcagtcttatcttaatgttatgtaaccaagtggagggtggcttattcaaaagaatcactttcgtgacttagcacctataaaccgaggatggtagttattagttatgctaatatggattactttcacatttagcccctgcgagaatgaggtaggcaatgacagatgcctgtcctcccacttcccttcatgctctgcctcctacactgtcaccaccacctgcatcccacactcactgacactctgcatctcttctggagcccagcacggaatgatcatttataaacagtaaccatatttaggctctttctaactgaccctgagccccttatacactagccgttggcagtgtctgagaggtggggactctgtggagcactgggactttccattggtaggggaatggtggtatattttttacttcagacaattgtataacatttgaaaaagaatttaagcaacctttaaaaaaattctatatgtctgtgtgttttccctgcatgcatgtccatataccagttgtgtgcatggtgcccagagaggccagaagaggacattgaatcccctagaagtagagttacagatggtgtgagtcatgatgggtgctgagaaccaactctgagtcccgtggaagaacagcttgtgttcttaactgctgagccctctccagccccccgaaaaagttttttaaacatatgtcacttttatctctgaaagtacaagtctagctgcagtgtggtagctcctgcctgtcattttagtcttgggagactatggcctgaggatgtcacacatttaagatcctgtctcaaaacatctaaaaataaaataaggagctggagagatgctcttgcagatgtcttgagctctcttcccagcacccacttcaggtgcttcatggctccagttcaggggatctgacaccctctgctggcctaaactggcatatgcacagagatacttgaataaaaataaaagtaaatttaagcaaattttacttgggcctgggctacacttattacctcagtggtagaatattttttgtaccattcaaaagccttggattctatccctagtacctcaacaaacaaacaacccccacccccagcaaaaatccaaacagatagatcccaaaagtacttcatctgaactcactaacttgccttcacctaagatgggctatcttcattttcagttctggctatttgtccttgacagttccaacaggaacgatagtgaatgtgattctggtatcagtccctgaactctggaatgcacaagtcagacaacatggagggcttgtggatgtgtaagtttcaggttatccttaatgtcatgtgtcatggacagcagattgttttttcctgcaggcggagatggtccacacaggcctgaagttggagcgagctctcctggctacagcttctcagtgccagcagccagctggtgtaagtttactagatagttgcgcttgctctgatgctcagaaatttccaagaggctgtcacagcgtgctacaataacacacagcagtgtacagacataaaagcactcaagtgccccatgggactgtgccttgggtagttaccagtccccaatgactttttgttttctgtcattttgttcattactttagttgcccctgggatgtcgctgcttctgtcaggcagctttggtgtttgacaggtggcacagctgtggtggggatcctaagcctttgatactgggactgccttcatcccttaccctccctttagcttgactcttatttcaacattttctgctatctgctatggaaagttaagttagagaaatgagaactttcttagaaggaaagattattaacttgtcttaggttttcttgatcacagaagatgctaaaacaagtcttcctgctaaggctgaaataaataaaatccttgatccttgtcatgcctaagtctgtggaaacaatgcagataatttaaatatctgtcttgagtgacgagagtgttgtatctctgtcttctctccaagttcatacttccctagatgaataaaatggctgagacactgtcatattttagactaaggttagcaaaaccacagactataggctgatttcctccagtgtatggaaatgaagttttttgggggaacaaatattcactgattagtactttagagaagttttcacacttctcgttagactgtgcacacaggacctgagaactgacatggttaggaaacctagttttgaagggaggatcaaaaagtgggaacacaaggcacatccattttgctcagtggctttgaatggcagcatcacggactgcatttgaatcaccagatctctactaagcagctgctgtgtggctcagggtgcattgaggacaaaggagaactgagacaaagctctggcctttgaaaagttaacagaaaaacaagcactaggtttggtagtatacctttaatcctagcatttgggaagtggagagagaaatcaggaggcgttaaagtcatcctcggctacatacacagcagcctggactgcatgagagagaccctgtcttacagagaaacaagggaaaggaaggacatatgtgggtctggggatagtttgcagtgttgtatggtaaggtatcgagatgggttatattgacatatgatacagaagctgtggcagctggggtaaaaaagctgccacatgaagctaaaagctaaaagctcatgaagttatttagataagtggagaaagagcataaggaacaaaaataagctgtatcttctattggtgagtcagaaaagagacaagtggtttgaatggagggaggggcttttcaaatacagaatataggttttaagcacaaagtctctcttgaggacttgaaactttatgcagaggaaggatatgagcagtatcttagtcatgtgagtcatggtgagtcatggtggggtggatacaaagtttacctaggtgttcattataggccataacaaattctcccattgccatgctttgggtacatggttataatttcaacacttgggagccgaggcaggagtattctggattctagactacatagaatattgtccctataaactgaagagggggaatcacttgccttcagagtcaacagttggtctgcatatatagaaatactaaccatagttgtttcccatctctcctagaataaactttctgatttgttggcacctatctcggagcagatccaagaagttataaccttccgggagaagaaccgaggcagcaagttttttaatcatctatctgctgtcagtgaaagcatccaggccttgggctgggtggctctggtaagacggaggggaggatgtaagcagggaaggaggtatggctgcagagactttgtgtcactggctgcttcttcctctacaggctgcgaaacctggcccctttgtgaaagagatgaatgacgcggccatgttttacacaaatcgtgtcctcaaggagtacagagatgtgtgagtctagcctttccccagggggcaggacaaatgtagatgtcacctcctggagtgacctctgtgttggtcttctcacttcaaggctgtttcgtggaaacttggtagatctcatctcatagaaactgcatttgcaagcaggaaatatttctgcttccatttcttttttgactctgaatgttaggtgctctttagtttccccgcccaggttaagggggtcatgttagaggtaaaatggattaatacttttgaagtttctttaaaaaaattactgtattattattattattattatgtgtaaggttttttattttttggcttgggtgtaaatctatgcactgtgtcactcctctggaactggagttatagatcttgtgagatgccatgtgagtgctaggaattgacacagggtccccctgaaagagcagctactgctcttatctatgtagccatctctccagatttttaagttgcttgtttgtatcagattttgttcttctgttgctgtgtctcaacagtgctatgacaaaggggtcagtcggacttaatgagtaaagtgccttgtatattcatgtgttcaggtaaactgacaggctgcctagccaggacctgtatgaagaaagggagtctttgtgttctatccacataatcatgctagtcctaaatgacttctctattgctaattttgaattggagtgactacagttacttagctgtataattctccagacatcattagtcagcagacatttgatgaagctgtgtaagaaataagccttcatttgtgtgtaatgtgtcccacaccaccacacacttttaaaaatccttttagatgcctggaattactcagaccctctttggaatttaccctatcatttatagctgaagaaattaggccttgggctaagtaatcacagaaccttccagctaacgtttacaaagagaaggattagtctatttacaatgcaatgtaccttctataacaaatgctgattgttgaccccccaatctctctctttctttttttgtttgtttatatttgttttttgagacagtgtttctctgtgtgtagccctggctgtcctggaactccatctgtagaccaggctggctttcagtctacctgcttctgtctcctgagtgctgggataaggcatgtgccactattgcacagctgatggttttctcttaaagaaacacttttagttgggagcatattttgacacaaggcactgggctcatggagtccctcaatcccatggcaatgcttcactaatcttggttttactgtggcttcctacacaaatgtttttaacaactttgctgttaggttctgcttatggtgtattttggaaaaacaaaaaattggtcctaacaaaaacattgataaacactgctgtcaaaaataaacatgtaatccaatgtccatgctctgctggagtttggtctaattagagtaagacggtaagatgtttgtttgtttgtttgcttgtttatttgttttgaggcacggtctgtcttcatagccctggctgtcctggaactccctctgtagatcaggctgggctggcctcgaactcagagatccacttcctctacctccaagcactggaatcaaggtgtgcaccaccatggccagcttggtctcttctttaaaaaaacatcactaatgagatagagagatggctaagcagttatgagcctcactgcttctatagaggaccctgctttgattcccaacagccacaagcatctataactccagttcggggatccaacaccctaccctggcctcctcagacatcagacaaacacatggcatatagatatacttgtaggcaaaacacccatacacataaactaattaaaaagatatttttgatgctagggaagctgccactgagcagagcctaggaaatgccacagcaggaggatgtgagccaatgggcaggatgggttctggagttagtaccatactcaaattctttcttaatttttgcagggataagaagcatgtggactgggtcagagcttacttgagtatatggacggagctgcaggcttacatcaaggagtttcatactactggcctggcctggagcaagacggttagtgtgttttccttctctccctcttcctctctccaggataggagacttaaatcaccaaggccagaaaaggaatgctgtggagatagatggtccagcatttaagagctctggctgacctggtttaattcctgtgcccacagggcagctcacaattgtctataactccaacactctcttctgtcctccttaattaccaggtgcacctgtgggacacaggcatgcatgtaggcaaaatacttacttacacacattaaaataagagtaagttataaagtcaattttaaaaatagtcaatttttaaagtcaattttaaagacagatccctattataaattaacaagttaaatgctataataaatacacagcccacagcaaataaagaacaatacagaggttaaggagtgtatgactatattcttgcatttctgctcaggggcctgtggcaaaagaactgagtggattgccatctggaccctctgtgggatcaggcccacctcctcccccaccgggcccgcctcctcccccaatccctaccagttctggttctgacgactctgcatcacgctcagcactgtttgcacagattaatcagggggaaagcatcacacatggtgagtattttggcatgggcagttgttaaagcaaatgattccattagatttcatcaaccagacactagtctaaaccagaaccctggcttgcatgtggcaacattcatttgggggtgtctaaagggacatcaaacttaagtttggtgactgacaggccagtgagatagctcagtaggtaaaaagatgtttgtaggccaagccttgtagtctctgagttcaggccctggaagccacaaaaaatgaagaaaaactgactactgctttgtctgtcctctcacaggataggcacatgcacactagcatgagttcctcctatctacaataataactttcaggaaagggcagctggctcagtgggtaaaggtgcataccaccaagcctgattgatgatttgagtttgacccccgaaaccaagttggtggaaggagagatccagctcctgcaagttgtcccctgactactctctccgccctacaataaattcataactaagtacgtaactttaagaagtagacattgaacatgggtaatgacagtgaagtcattaagtagtatgtacagggcaccttattagccagctcacagtgctgcagttttcctggagcccgtggtacagttccacatggtctctgaagtcattgtgttgggatgctaacttctcaggatgtatacttgtcacatgggaagtttgccaaatagggacccaccattacagaaaaagtcggcacttctatacctcactagtggaattcttacttgacttattgactaagaatgtaccctgttatttatagtagccagtagtggtgtacttagagaaatattcagcattaagggaaatggctgttagctgtatgagtagagcctaggtgacagaagagatccagtaaataacctcttccccatgctcctgtaagtttcatgcctgatgaaactcactgtctcacacagagacatgaagtagcaggggacttgttgggggaggaaggggagcaagagaaggtaatggggtgaagatgaacaaacacattctatccgtgtatgaagaatgacagcggagcacagcggtgtgtgtaattaatacatgctaagagaaaggtaggaaacggcaagtgccaacacgtggttaggagggctagctttctttccactgaattttcactgtgatgtactttcccctttctattatcacatacattctgtgtgtatatattacatacctttctagatgtatttttgtgcatttacatatccttgctccttcctcaccttcaacacatacattttttttttaaataaaactatataacttagaggacaagtgaaaccataaaagcagttctccaaaggtttgcaagatggtctctcaagagcttgagttcttgctttgaagtttctgctaaggactagtaatagcagaccttgtttattgcctcagcccgaagctctggtatgaagagcaggaacgaggtagctgtggtgtgttcttacagccctgaaacatgtatctgatgacatgaagactcacaagaaccctgccctgaaagctcagagcggtccagttcggagtggccccaaaccattctctgcacctaaaccccaaactagcccctcccccaaaccagccacaaagaaggaaccagctctgctggaactggaaggcaagaaatggagagtggtgagttaaagcagcctgactccgggaagggactaggaagaaggctttcagcagagcttagctgaagagtgcgggggtctggctcttggtgggagaacaaaggtttgggatgacgtgacctttgtggtaagaatcctgggtgtgtcttcatcaggaaaaccaggagaatgtttccaacctggtgatcgatgacactgagctgaagcaggtggcttacatctacaagtgtgtcaacacaacattgcaaatcaagggcaaaattaactccattacagtaggtgagtcccccttgctgccctaggcaggttctgacctgcagccggagagggttagagcctcttcccacatctttgtaaattcttacaccacttagccttttcagtcccactgctgacctgcttcctttcttctagataactgtaagaagcttggcctggtgtttgatgacgtggtgggcattgtggagataatcaatagtagggatgtcaaagttcaggtaacttgatgtcttggcttctccttttggtccctgaagaattaattgagagagacacagcagactcgcagatgttccttgggcaggaatctgattctccaaagcctgtaagctgagctactttggatgtggcagaagttggctctttaagggagctctttccaggacctagcccagcccatccccagtttgtaatattggtgtgcactgggggcttttgtgaagtagtgtaatcacttaaaacggtgaatattctgcagcttagtctgctcatacgtgctggaactcagtttttgttttttgttttttttttctgcaggtgatgggaaaagtgccaaccatttccattaacaaaacagatggctgccatgcttacctgagcaagaactccctggactgtgagatagtcagtgccaaatcttctgagatgaatgtcctcattcctaccgaaggcggtgattttgtaagttttcttcctttcctatccttccttccacagtgtctcttgtatcccaggctggcctggagctcattggtgattctcctgcctctgcctaagtgctgagatatagccatgtagcccaggattgcttctttgctgttggagattgaacccaggacttgtgcatgctaggcaagcattcttcccactaagctatatccctgaggaatatggcattataaacagaataatctgggactgttgatacacacctgtattccctatagggtcttaccacataacccgggtaggcctcaaactcagaatcttcctactctgtctcagacaactgaaacaggactgaatacttattgaattagagaaaactatttggtggatattggcattttgtaggtaaatctcaacaatacatatagaagccaggtagtccatgaagggagctccagagggagggagggagggagggagggtcattcctgcctttcatagttcagtaagaataagactaaccccccaaatcaggctgttgtctagagctaagtctgtccaggaccacagatctctcaacagtgaacagtgcacagtgcaagcagcatggctgggaggttaagcttgtctcactcctatgtgtgcccggttacctgggactggaattacaaatggttctgagccactacatgagtagctcaagttaagagcaagtgctcttttttttttcaatttaatttaatttaattaattaatttattttttactttttaatatttttttattacgtattttcctcaattacatttccaatgctatcccaaaagtcccccataccctcccccccacttccctacccacccattcccattttcttggccctggcgttcccctgtaccagggcatataaagtttgtgtgtccaatgggcctctctttccagtgatggccgactaggccatcttttgatacttatgcagctagagtcaagagctccggggtactggttagttcataatgttgttccacctatagggttgcagatccctttagctccttgggtactttctgtagctcctccattgggagccctgtgatccatccaccaactgactgtgagcatccacttctgtgttggctaggcccctgcctagtctcacaagagacagctctatctgggtcctttcagcaaaatcttgctagtgtatgcaatggtgtcagcgtttggaagctgattatggggtggatccctggatatggcagtctctagatggtccatcctttcgtcacagctccaaattttgtctctgtaactccttccatgggtgttttgttcccaattctaagaaggggcacagtgtccacactttggtcttcattcttcttgagtttcatgcgtttagcagattatatcttatatcttgggtatcctaagttttgggctaatattcacttaccagtgagtacatattgtgtgagttcctttgtgaatgtgttacctcactcaggatgatgccctccagttccatccatttggctaggaatttcatatgtgagtacaccgtcactctcttcagacacaccagaagagggcatcagatcccattacagatggttgtgagctaccatgtggttgctgagaattgaactcaggaagagcagtcagtgatcttaaccactgagtcatctctccagccccatcatcctgttacttcctttttgcagaacgagttcccagtccccgagcagttcaagaccctgtggaacggacagaagttggtcaccacagtgacagaaatcgctggataagcaaatacatgggtcctgtgccctctcccttcacaccatgggatacatctgtatggagacggttcttttctagatttcctctacctttctgctcttaaactgcttctctgctctgagaagcccagctacctgccttcactgaaatatacctcaggctgagacgggcgggacagcaggtcagtggatcttcaccggaaggtgcagcttctcggcatcagcgcagctgcaccacaggctgagcttacagagcttcaggcccagactggggcaccgaagctttcagctttgggggtcattctaccaacaatcagtccctgagggttcacaacaccctggaaccaaacatcagaatgcacactattctcctaacagtgagcatggggggcaggagccagggagtctgttaggttctaaccaacctagttttcattgttgacaagtgaggccaggcttccactcgaccaaaagctaaggattgccacccagcattccaagcagacttgtttcctaaaagcatccttcatctgcattccatcctgggtcagcatcaaccacaacatagcaggcgttcccttgcagctgcagtacagtagcagtgtccttttctgaggaaggaagtcttaaaccctttccccccaccccctgggatgactgccttgattcccatggggaacaactttaaagaaaaccaccacagcattccaaggagtctggcgttcctcctccctgccagatgactgtcattgcctccactcacccttctgcttgtcactcggcagcttagggcctctgcgcaggaacctgactaggactatgacctccacggcggctgtttaggtctcgacttacatcagaatcttgcacagcattgcaaaatcccagtgctccctctaggacacactgaccaaaatatgcaacctttcctttcctttttttttttttttggtgggaaaagaggaagaaagattgtcctgtgacttctgcccattacctgaggcctgtggaaataaacctttatgtacttaaaattatacagaaaatagaataaagttaataccaaacttgtttagttattcacctgatgttttcagtacagagatgtgaaaatactgaaaatgacaccaaggataagaaactactctttattattttttaagacaatctcaaaactatttttagatcctcccacttcctgcccttaaccctcatccttttatttgagtaggtttgagaaaggaaaaggaaaaacaggcagtgggtgaattctgtggtgctaatggtgctttcatgaaaacagtcatttctccaaacccgtgctctagaggacccatctagaacatgctgagatctcagcatgggcactagggagtccatgctcaactgtaggaaatgggggatcagggtggtttcttctttaacaatcaaagttatcatctgtttaataggagggaaaagaagtctacaatattccccaatcattttcttgaggaatcaaatcagcagcagtttgatgtatgctggtaaataggatgtagggtaggaatgccaaagccccacctttttagactatttctcccgttctttgcaatggtgtgacatttatgccacttataatattaagggcaagaacagacacctggttttcacttctatactccctcactatctcatagtatataagacacacattgctgtaggctgtggtgatgcatgcctttaatccctgtacttgaaaggcagagggggcaggtgatctctgtgactgtgagttcaagaccagtctgctctacatagtgaattccaggccagctagggttacaaagtgagtgaaaccctgtctcaaagaagagaagagaagagaaggtccatttcctttcctaagcaaccctgctggcagttcccccctgtgtgactaattctgttactgaggattaaggatacaaggtgagctctgaaggggacgtgatggtaggcttgtggggtgactgctaggtacctctagagggcaacacttacacaggaaaacagtcttaagaaatgatggggaaacatcatgcacggcccacacagcagtgcagagaaattgcttgtgtgaacatctcagacctgggcttttatttgctccaaatttgtatgggttttgccctcagagcttgtctctttttcacttctgtctcttttaggcacaattactgatctgcaacaacagactcccatttcttaaacgggagcttgaccatatcacaaagttgtaaaacaatctccatggttattagctaattaaacttgaatccaacaccatatggtgatagcaggcggcaaaggataagattgagatcttagatctttccaagtagggtatgttagatgataagaggagagaagggctggttgcaggctagattagagttcagggctgagcatgaactatgtacatggcttggaagagctgtggtttcatgaactctgctataaagtgccagggcttcacttaagaaaaggtatgatgtgggcagtaaaccattctttagatatttgaagatggtccccttccttagccagaaacactagctttcctgctttgtccattttctttagccccaggcggtcctgtagagagaaaggacataatgaatccaagaggcttactgaaggttttagactaacccagtagaatattaacaattactctcaagatacacactttcccttcagtattaaactagaggtacacggttaaaaaagatgacaccccctttcagatcttcgttttgtttgtttttgagacagggtcttgctttgcagctctagctggcctcgaaattgtagcaatcctgccttagactcgagtgccaggattataagcatgttttaaactggttccttcagtttgcttctaagcaatagatttacatgtgcaaggccaacattgtgtcaggcccctttaattccaccatttgggaggcagaggctggtggatctctgtggtttcaaggctagccaggacattcaggggctacatgctatcttttttaaaaaaagaaaaatactgttgaattgttctacttatgttctgcctcatcccaccccctcaactccagcaagatgctagaagtcaacccagggcctgctcctgagctgtaccccagtgcctataagtcagcttcctgaaaagcagcggggcaagcaaaactggcacacaacatcatagtgaacaagagctgagccaaagtcaggagaaaataatgtttaatatccaacatagctgattcttaggataatgaacttgggatgtgttagaatcttacagtgtcatcccccagtagccaaggtgtcaggcttttgctgagaagagaagatctagcatgcaaggacagtgccacttcttgactaccctgggtttgaatttcatgataaggaagatcttggctgtaatttccaaagctgccagaacctagcttccctttatttctatttcatccaaaccaggacaccacacacatgaaaaaaaacaaaaaccaaaccaaaccaaaaatgtggaggaaagcgcacctctgaaattggggcaggggggctgtaataaaaggtggtttcgatatggtacttgggcatttgtgtgtccatctccagtttatggcaagcaataactgcatgtggtgagacactgcaacttctgcttgagatacaggacctactgctagacaggatgcctgacagcccccgttgagagactggcgaaggagtttccccttgtcaatgcagattgacaggtttactcttggtgctggggcacaaaccccagtcatcctgtatgctaagctcatttctaccactgaggcatacccttagactgccagaatccacacctcatggctgccatgacataaaacctcgcccatgtctgcatttacttaggggcttctgggagttgtagtaaacaactcgcaagggaagccagttccaaaccttttcttccaaagtaaaacctcagagttgatgtttctcttgtgtgtttaaaaaccatgagcaagaggtcttaggatctagtacctatgtagaaatcagcacccaggaagttggtgtgaaaacagcctactatgaccttagttagacagcttgtaagctcttagtgctctaggacagacaaggcaggagtctagctccatgaaacacagcagctccaggaaccagggtggagagaaatagtttcaacctcccacagcagatctgtccctccgttacctctgtgtatagagtgctctcctggaggggaatggtttccttagcttggccacttctgtaaaatccaaaccacttcaggagagaaggaagaaagccaggtcagatcatgcacccagcacacttgcaaaaatcatttgaggctagctagtacctaaaactaccagcaaaatgaacattgtaatagatctgacagcaagcaagaaggaagaatgggaagggggtttttggtttaggtgacctggaactcacttgtgtagcctaggttggttttgacctcgcaggctatctgtctgagcctcttgaatgctagagctataggcatgtgtcatcatgcataacataaagatgtgtcttgagttagctcattttaaaggtcaatcccaagggatgagctaatcctaaaattttccatatctctggaacttgtgtttccttccttgagtgtatcagccctgaaagtccctgtgctgccccaatcattcaagggtgaatacacaagcccccttcccatgaagcctcctagtctagaaggcacagaaccaattcattgtatagcactgggtcagtagacttctgttgaggccagattatatcaacatggttgtggctactcacttgccaccatgacacaaaaggagcaacagagtgtgtgagaagagagtagggcttttctaatgaaaggcttgtatagacatggaaatttggctttcaaatagtgttcacagataaaatattgtaaatgttttctctatatatgtagaaattctgagctcacaggccattcaaaaatatagtgaaatttggcccctaggctgccttcccctcttcccctgtgatctgacagtgtggacagagcttcagtttgtggcttcaaatgcagaagcagctggcggtttctcacacctgtcatcctggcactcaagagggtgagaaggatcactttgggttcaaggctagaccaaactacgaggacccttccaaaaggagggaaccaaaatctgggagtagggatggtgtcctagaggaacgatgtatgtggcctgaacaaagaacaggagtagtcggatggagaagccagggagaagctctcaaaagacaaggcatgtgagagaggcttaagacattccaagtactaaaatagaggtgacaaagctggaaagattggtcattctgaatcaaggcaggcccataagcccttcctccacagaatgtaaccacataactttttcataaatttctcggtacaactaggggattgcagccgatttggtatctcatttatgggacaccttgttcacaggtgaaggctggctgtgagaccaggttttgcccacaaagcagctatggtcagaatcattgacctcctacaatctcttggtactctgtggacatgtctcacctcagagtcgacagggtccacaatggaatcattaaagaatttcaccatcacaaacttcttgagggccatcaggttcttcttgtaggactcattgacacactggaattagaggggacagtcatgcagggtcactattgtcaagttcagcctttccttaaaacctgtctgactggcatgtcatcagccatgggctgggttctgtccactctctctctatataccttactcatttaggtcataggcttcaaacatgacaaaataagaagaattctgggtggcgctggcatttgattctgtcctttgttctgtttgttatctgcttcaactttttttttttttgcttaaaacaacaaacaccctcaagctggccatcatataaaatgaaccgttaagtttaccagaatgtcccaaaccatgctcatgcctgggcacagtctatgcccttccctgagtctctcaagtaagtcttttctgagaaaacccgctctaaagggccccacctggaagaatgtcgtttgtgaagacagcagctgtaaatttccacattgcccagcttgccacctattgtaatatgtcaacataaaggaaggggggggggacttcagggaggaggagagtcagatgagttccagcccagccaccctgaaaggaactgaaactcagtgagcactgccacacacaaacaaaacccatggttcctggcttctgctcagggtatttttttgtaactagccactgctgatttctgatggccagaaaggaaggtctagccatgggagcctatttgggctcttaccctctcttgatttatgtctgccaagaagatgctgtagtttcggtacacactctccttgatagggtcatgccagtactgtgcttgcaccaggctgagaaagagaaggaatgaaggtgactgggtgctttcagtcagtatgcctggaacatactccagtgtctaggcaaccaagagacttcaaaaggatgaaaaaccaaagcctgaagtcccaggtctaaccttctaatagggaatacttcttagacctgtcaacaaaatatcttgctgggagaacgacaggccatttggcagatacagaaaggccgaagaattggggaagagattcatcaatatttgaccttctaatatggtggtctaggctgtcccttctcacagttccacttctcccactctcctttgcttcctctttatcctataagactcagccgccttttgtctcttcctctccattgttatccttttcctcgtcttcctcaggctggaatggaggctgagccagctcagagtgactaccagttatcagaatgaccctttccaatctgttgataaatgtgtttggagccagatgtggtggtggctgcctgtagtagcagcacatgggaggtagaggcatagggttcagaagttcaaggttatcttcagctacagagcaagtctgaggtcagtctgggctaatatgagaccctgtcgtgaaaaaaaaaaagtatttggaagtcctaaaatgtttaacttcactgatacttaaaaattaagggctaggagctgaagaaatggctcagtggttaagagtactggctgctcctccagaggatctgggtttgatctctccctactcgcatggtggctcacaaccatctataactgcagttcctggggatccagtgccactttctggcttcctgggcaccaggcctgcacatggtgtgcatacatacatgctaataaaacacccaaacagagaagaaaaatatctagtatataaataaataaaattcagggttaaaggtatagttcccagataatagtatttgtctgacctgcacacgactctgggtttgatcctcagctctgcaaacacagatagactgtgaacacatataaaatactacctaccatcagtactgctgctcactactttccccccataggatcctaaggcccttgataagacagtaagatactctatactaagggtctgctagcccatacagggtgtgagacaagctgtgctagaggctggagtggtgagaagactgcagggggtggggggtaaaaacatcacacaactttcccgggtgattgatcatggctcgctcaataatgcaaagtgacggtgaggaaagtctttggccccagtcaagctgggtccaaatttgtgacccagaatttcagtggcctagaatttcaggaggccgatgactaaggatgagcatgaagctgatcatcacctaagcttttgccatcaaaatgagacagctaagaggagaggacaggaagatacagggacatcccactgcaaggagcttgatgtaagtggtacagcccagaggaggcctgaggataggcagaagcagaggggcctgggaggaagaggaggaggaggagggagagaggaagggggagggggacgaggtttgtgaaacagaaggagaaccagtgtatactctcactacttacttgtaccactgagaagtagattgggaaaggctaactgatctaagttatactttggtgttttgagacagtttcactatgtagcccaggatatactcaaatagatgctcttcctgcctctgtgtccccagtgttaggattaacactgtacaggcatataccaccacacttgacttttttggtttgttttatcaggaaagctcttgctatgtaactttgactggcctggtcctccatctgtagccagtggggtcctcaaacttgcaataattctcctgagctcttctggcattacaggtgtgaaccaccatgctctttgaggctttgggaaccaaactgttagggaattccatttatttacttcagtgtatatgtgtgggtatatatatgcatgtgttcatataggtttatgtgtgggtgatcctgttattcttgtggagactcacaccaggtgtcctctatcactgcaccatagtccttaggacagtgtgataggctggctggacagcaacttcccagaatcaccttctttctgcctcctagggctggggtcgtagatactgcagtcagctatgcatgtaggtgctggcaacctgaacctgctctggatgcttgcacagcaagcatttaaacattcagccacttcccgggccccagcaatgcctgtttaagtttggttagatttggttgccttgtggtcatcttctcctatacaaaaggtaacctgcatgaaggcagaaagaaactttcccatgctttcccaccattttgtgtcctattggccacctgtgcagatgaggctctttcttaaaaaagaaaaagcaaacgacccgaccgaaattaaatggtggcctaaaagtcagtctgtgctacctaccggctgttgagaatccagaacacacaacgaagggagactgagttagtgctatgctgttggctcacaggcctaactcatccttagcatctcagccaccaccgtctctcacctagaccactgctcagaccctaaagatttcctggtttttcttcgagtcctatcagagtccactttctacaaagcagtgtaggccttttgaaagcacgaacacgttgcgctagtcttctgcttcacacgctgttacagagagaacagcatttctcagtactccgttcctggccaattccttccaaggtaggaccccaccttgtcttttcaattctcccatctgtccctaaagtcaccccagcccagaacaagccaaacttgtccctgccttagtgctggccattcttttcttgacttctcccacgttccttccacctcccccttcacaccccagaataaaggcaccaataatgcgtgcacacctgcatcttggcagactccacctaaggtgcccatttcccctcccctcctagcatgagaccagcgtgcccaactggcttctatgccatggtatctagggagcgtgccaccaggtgtggcaaatagtaattcatatttgatgagactatgaaaataaaagacttcaaagctgcaactggaagagagaacaaatgacaacacctggagaggaaatagaaatagaaagctcagccgggcgtggtggcgcacgcctttaatcccagcactcgggaggcagaggcaggccgatttctgagttcgaggccagcctggtctacagagtgagttccaggacagccaggactacacagagaaaccctgtctcgaaaaacaaacaaacaaacaacaacaacaacaaaagaaatagaaagctcagtgttttaaatacagccctactggatttaaatccagtccaaaccttttaattactaggaattcaggctacactagatagcctttactcaacttgcttaacctgaaaaatgattctccagtaaggcatgcttctaaccacacatcagaggctcagagtgcctagggccacacagctagccgatgacagaatgcaggctctccaac

SEQ ID NO: 236 - DNA, 1563 bp, Mus musculus
ggaagtggagagcggctgatcgcagtccggaggtgaggcggaactcttaagcaggtggaacattatggctgacatgcaaaatcttgtagaaagattggagagggcagtgggccgcctggaggcagtgtcacatacttcagacatgcactgtggatatggagacagcccttcaaaaggagcagttccatatgtgcaagcatttgactcgctgcttgccaatcccgtggcagagtacttgaagatgagtaaggagatcgggggagatgtgcagaaacacgcggagatggtccacacaggcctgaagttggagcgagctctcctggctacagcttctcagtgccagcagccagctggtaataaactttctgatttgttggcacctatctcggagcagatccaagaagttataaccttccgggagaagaaccgaggcagcaagttttttaatcatctatctgctgtcagtgaaagcatccaggccttgggctgggtggctctggctgcgaaacctggcccctttgtgaaagagatgaatgacgcggccatgttttacacaaatcgtgtcctcaaggagtacagagatgtggataagaagcatgtggactgggtcagagcttacttgagtatatggacggagctgcaggcttacatcaaggagtttcatactactggcctggcctggagcaagacggggcctgtggcaaaagaactgagtggattgccatctggaccctctgtgggatcaggcccacctcctcccccaccgggcccgcctcctcccccaatccctaccagttctggttctgacgactctgcatcacgctcagcactgtttgcacagattaatcagggggaaagcatcacacatgccctgaaacatgtatctgatgacatgaagactcacaagaaccctgccctgaaagctcagagcggtccagttcggagtggccccaaaccattctctgcacctaaaccccaaactagcccctcccccaaaccagccacaaagaaggaaccagctctgctggaactggaaggcaagaaatggagagtggaaaaccaggagaatgtttccaacctggtgatcgatgacactgagctgaagcaggtggcttacatctacaagtgtgtcaacacaacattgcaaatcaagggcaaaattaactccattacagtagataactgtaagaagcttggcctggtgtttgatgacgtggtgggcattgtggagataatcaatagtagggatgtcaaagttcaggtgatgggaaaagtgccaaccatttccattaacaaaacagatggctgccatgcttacctgagcaagaactccctggactgtgagatagtcagtgccaaatcttctgagatgaatgtcctcattcctaccgaaggcggtgattttaacgagttcccagtccccgagcagttcaagaccctgtggaacggacagaagttggtcaccacagtgacagaaatcgctggataagcaaatacatgggtcctgtgccctctcccttcacaccatgggatacatctgtatggagacggttcttttctaga

SEQ ID NO: 237 - protein, 487 aa, Mus musculus
SQSGGEAELLSRWNIMADMQNLVERLERAVGRLEAVSHTSDMHCGYGDSPSKGAVPYVQAFDSLLANPVAEYLKMSKEIGGDVQKHAEMVHTGLKLERALLATASQCQQPAGNKLSDLLAPISEQIQEVITFREKNRGSKFFNHLSAVSESIQALGWVAAKPGPFVKEMNDAAMFYTNRVLKEYRDVDKKHVDWVRAYLSIWTELQAYIKEFHTTGLAWSKTGPVAKELSGLPSGPSVGSGPPPPPPGPPPPPIPTSSGSDDSASRSALFAQINQGESITHALKHVSDDMKTHKNPALKAQSGPVRSGPKPFSAPKPQTSPSPKPATKKEPALLELEGKKWRVENQENVSNLVIDDTELKQVAYIYKCVNTTLQIKGKINSITVDNCKKLGLVFDDVVGIVEIINSRDVKVQVMGKVPTISINKTDGCHAYLSKNSLDCEIVSAKSSEMNVLIPTEGGDFNEFPVPEQFKTLWNGQKLVTTVTEIAG

SEQ ID NO: 238 - DNA, 33393 bp, Homo sapiens
  misc_feature (1)...(33393): n = A,T,C or G
cagttctggcagaaggtggtgtttttacaagatgatttctaggattacaggcatgcaccaccatgcctggttaatttttgtatttttagtagagacgaggtttcgccattttagccaggctggtctcgaactcttgacctcaggttatctacccgcctcagcctccctaagtgctgagattacaggcctgagccactgcgccaggcctggttttttggtttcaaaccacaatagacattgctggagaatcaagctcatagtttctttttactctgcatgatatccctccaaaagcttgtctattctcatgacttcatgacagttctttgccaatgatttgcaaacattatctccagtcttgattctttcccaggctttatttctaaatactcactagtcatttccacttagaagctttgtattcttttcaaactcagcatatccaaaactgacctcatcttgttgccctaactagaacatgccacaacccatttctgcctataatgtcattattctcttaaggcccccatatttgcaaatcaggagtcatctttgcctcccttctctgaatgctgctgtgctcacagtcagtaccatacagttagtacttgttctcagtttaatgcacacttgtttcatatgacctcctagggcagaaccaagattcgtgggtggaagttgcagggaggcagatttgcctccatataaggaagaactttttaatactttgagctgtctgaatggaatggactgcctccagaagtctcgggttctccatcactgaaggtgtttgagcagaggctgcctgactaattgctaattgaaaggactgttctggcataagatggtgtttttacaagatgatttctagaatccctctaatcctgagagccagtgagtcgatagaaggtagctttgtctctcctgctagactcccttaggacagggagactattttacctttcttttatattctgtacagcacttaattcaggtgctggtctcttaattgcctaaagatgattatttacaggttaattgattcttttcattttgttccaatatttggttaaacaccaaatattgtggatttttttcnnnnnnnnnnnnnnnnnnnnnnnnnnnnnnnnnnnnnnnnnnnnnnnnnnnnnnnnnnnnnnnnnnnnnnnnnnnnnnnnnnnnnnnnnnnnnnnnnnnnnnnnnnnnnnnnnnnnnnnnnnnnnnnnnnnnnnnnnnnnnnnnnnnnnnnnnnnnnnnnnnnnnnnnnnnnnnnnnnnnnnnnnnnnnnnnnnnnnnnnnnnnnnnnnnnnnnnnnnnnnnnnnnnnnnnnnnnnnnnnnnnnnnnnnnnnnnnnnnnnnnnnnnnnnnnnnnnnnnnnnnnnnnnnnnnnnnnnnnnnnnnnnnnnnnnnnnnnnnnnnnnnnnnnnnnnnnnnnnnnnnnnnnnnnnnnnnnnnnnnnnnnnnnnnnnnnnnnnnnnnnnnnnnnnnnnnnnnnnnnnnnnnnnnnnnnnnnnnnnnnnnnnnnnnnnnnnnnnnnnnnnnnnnnnnnnnnnnnnnnnnnnnnnnnnnnnnnnnnnnnnnnnnnnnnnnnnnnnnnnnnnnnnnnnnnnnnnnnnnnnnnnnnnnnnnnnnnnnnnnnnnnnnnnnnnnnnnnnnnnnnnnnnnnnnnnnnnnnnnnnnnnnnnnnnnnnnnnnnnnnnnnnnnnnnnnnnnnnnnnnnnnnnnnnnnnnnnnnnnnnnnnnnnnnnnnnnnnnnnnnnnnnnnnnnnnnnnnnnnnnnnnnnnnnnnnnnnnnnnnnnnnnnnnnnnnnnnnnnnnnnnnnnnnnnnnnnnnnnnnnnnnnnnnnnnnnnnnnnnnnnnnnnnnnnnnnnnnnnnnnnnnnnnnnnnnnnnnnnnnnnnnnnnnnnnnnnnnnnnnnnnnnnnnnnnnnnnnnnnnnnnnnnnnnnnnnnnnnnnnnnnnnnnnnnnnnnnnnnnnnnnnnnnnnnnnnnnnnnnnnnnnnnnnnnnnnnnnnnnnnnnnnnnnnnnnnnnnnnnnnnnnnnnnnnnnnnnnnnnnnnnnnnnnnnnnnnnnnnnnnnnnnnnnnnnnnnnnnnnnnnnnnnnnnnnnnnnnnnnnnnnnnnnnnnnnnnnnnnnnnnnnnnnnnnnnnnnnnnnnnnnnnnnnnnnnnnnnnnnnnnnnnnnnnnnnnnnnnnnnnnnnnnnnnnnnnnnnnnnnnnnnnnnnnnnnnnnnnnnnnnnnnnnnnnnnnnnnnnnnnnnnnnnnnnnnnnnnnnnnnnnnnnnnnnnnnnnnnnnnnnnnnnnnnnnnnnnnnnnnnnnnnnnnnnnnnnnnnnnnnnnnnnnnnnnnnnnnnnnnnnnnnnnnnnnnnnnnnnnnnnnnnnnnnnnnnnnnnnnnnnnnnnnnnnnnnnnnnnnnnnnnnnnnnnnnnnnnnnnnnnnnnnnnnnnnnnnnnnnnnnnnnnnnnnnnnnnnnnnnnnnnnnnnnnnnnnnnnnnnnnnnnnnnnnnnnnnnnnnnnnnnnnnnnnnnnnnnnnnnnnnnnnnnnnnnnnnnnnnnnnnnnnnnnnnnnnnnnnnnnnnnnnnnnnnnnnnnnnnnnnnnnnnnnnnnnnnnnnnnnnnnnnnnnnnnnnnnnnnnnnnnnnnnnnnnnnnnnnnnnnnnnnnnnnnnnnnnnnnnnnnnnnnnnnnnnnnnnnnnnnnnnnnnnnnnnnnnnnnnnnnnnnnnnnnnnnnnnnnnnnnnnnnnnnnnnnnnnnnnnnnnnnnnnnnnnnnnnnnnnnnnnnnnnnnnnnnnnnnnnnnnnnnnnnnnnnnnnnnnnnnnnnnnnnnnnnnnnnnnnnnnnnnnnnnnnnnnnnnnnnnnnnnnnnnnnnnnnnnnnnnnnnnnnnnnnnnnnnnnnnnnnnnnnnnnnnnnnnnnnnnnnnnnnnnnnnnnnnnnnnnnnnnnnnnnnnnnnnnnnnnnnnnnnnnnnnnnnnnnnnnnnnnnnnnnnnnnnnnnnnnnnnnnnnnnnnnnnnnnnnnnnnnnnnnnnnnnnnnnnnnnnnnnnnnnnnnnnnnnnnnnnnnnnnnnnnnnnnnnnnnnnnnnnnnnnnnnnnnnnnnnnnnnnnnnnnnnnnnnnnnnnnnnnnnnnnnnnnnnnnnnnnnnnnnnnnnnnnnnnnnnnnnnnnnnnnnnnnnnnnnnnnnnnnnnnnnnnnnnnnnnnnnnnnnnnnnnnnnnnnnnnnnnnnnnnnnnnnnnnnnnnnnnnnnnnnnnnnnnnnnnnnnnnnnnnnnnnnnnnnnnnnnnnnnnnnnnnnnnnnnnnnnnnnnnnnnnnnnnnnnnnnnnnnnnnnnnnnnnnnnnnnnnnnnnnnnnnnnnnnnnnnnnnnnnnnnnnnnnnnnnnnnnnnnnnnnnnnnnnnnnnnnnnnnnnnnnnnnnnnnnnnnnnnnnnnnnnnnnnnnnnnnnnnnnnnnnnnnnnnnnnnnnnnnnnnnnnnnnnnnnnnnnnnnnnnnnnnnnnnnnnnnnnnnnnnnnnnnnnnnnnnnnnnnnnnnnnnnnnngatcaccaggtcaggagattgagaccatcctggctaacacggtgaaaccccgtctctaataaaaatacaaaaaattggccaggcatggtggctcacgcctgtaatcccagcactttggaaggccaaggcgggcggatcaccaggtcaggagatcgagaccatcctggccaacatggtgaaaccccgtctctactaaaaatacaaaaaattagccgggcgtggtggcaggtgcctgtagtcccagctactcgggaagctgaggcaggagaattgcttgaacccgggaggtggaggttgcagtgatctgagatcgtgccactgtacagccagcctgggtgacagagggagactccatctcaaaaaaaagaaaaatggaagatgataataatgtaactaaagacaccataaagagaccttgagcccatagtgctgtgcaaacaagttggggctggatactgtgattaaccatatagtcacttaatttgttaaaagccattgtggagtagcaagaagagctgcagagtaggattcagaatatttgtactctaggcctaggttctttactcactagttgtttgacctctggcaagtttttttttttgagacggagttttgctcttgttgcccaggctggagtgtaatggcgtgaactcggctcactgcaatctccgcctcccaggttccagcaattctgccttagcttcccaagtagctgggattacaggcatgcaccgctactccaggctaattttgtatttttagtaaagacggggtttctccatgttggtcaggctggtctcgaactcccgacctcaggtgacccactcacctcagcctcccaaagtgctgtgattacaggcatgagccaccgtgcctggccatctggcaagcttttaactgctgtgaatgtcagttcagtttcttcattctaaaaatagggatcaatgtctgcgtaacataccttgcagaattattttaagtctccaaagaatcaacagattaataatgttaagcatttacaactatacagaattactatatttaattgatattatatattctaagaagagtactttccttatggtacttagtttgaagatctctatatcagtgtgattcgtggctgagaaggcaacatttatttgaaagacaggagggtttgtaaggtcctgcaaaagcagataagcaaaaaattaaaacaaaacaaaacaaaacacttctccatggattcgatagagaagatagccacactgtgttgaggggagagtaagagcctttatttatttattttcttactcaaacacctttattagcccactgttcttttttttttttttggaaacataatctcactctgttgtccaagctggagtgcagtggcgcaatctcagcttactgcaacctccacctctcaggttcaagcaattctcatgcctcagcctcccaagtagctgggactacaggcgcataccaccacgcctggctaagtagagacgaggtttcactgtgcttcccagctggtctcgaactcctgagctcaggcaatccacccgtctcggcctcccaaagtgctaggattacaggcgtgagccaatgtacagtgtttttaatgcctcctatgtttatagtagtggaattacagtggcaagacatggtccttgccttagggtggctagttgcctgttgactgttagaggagatcagatgcattcaggggattatggccataaactcttagactctgaaggctattaaataaattattttatttttttattactaatgtcttgagacagaatcttgctctgtcacccaggctggagtgcagtggtactatctcggctcactgcaacctccacttcccaggttcaagccattcttgtgcttcagccactgtagtagctgagatcatagcatgcgccaccatgcccaggtaatttttgtatgtttagtagagatgggatttagtagagacggggttttgccatgttggccaggctgatctcaaactcctggcctcaagtgattgcctgtgttgccctcccaaagtgctgggattacaggcgtgagccaccatgcccggccaaataaatgattttaaaccagtgtgtgcagtgttgtgacacagataagtgcacagtgttgtggtagcacatactagaaatacttccccaggaggtgataacttagctgagacttaaatgacaataggagttctagaggggcagatgggaaagggaaaacatctaagcagagtggatagcattataaaggctcagaagtgagagaaagcatggctttttctggaaaacgcaagtagtcccgggttgctgtagtgtgctaaggaaaggtgtagcaagagataaaacaggagtggtagaaggttaaacaggactagatgagagaaacccttgtttggactttaccctgaacgctctggggtatgtgtcaaatgcaactctaatatatcttaaatgcaaatataattataaatatttctttaataccattcagtactctggggaagtgttgagatagatcactctgactataatatggagaatggatgaacaaagtttattactgtaactaggggagactagccaagaagtcattgcagtaatcttggtgaagtcttgatatcctttttttttgagacaggatcttgctttgttgcccaggctggagtgcagtggtactcatggcttactgaagcctctaccttctgggcctaagccatcctcccacctcagtctcccaggtagctgggaccacagctgtacaccaccatgcttggaaaaattttaaattatttttgtagagacaaggtctccctgtgttgccccggctagtcttgaactcctgacctcaagcaaccctcctgtcttggcctcccaaagtgctgggattagaggagtgagccactgtgcccagccagtatcctaactcttatcagtcaggatggaggcaaggggcatctattcatgagatacactaaatagagcctatggattttgatgactgataagatgttgtgggggagtttatggaatccttactattttccaggactgtgccaagcacttctacatggattccttcatttattctcactgaagccctttggatttttgtgctattattgtcttcattataaagataaggaaattgagtctcagaaagtttgataactgcttatagtcacaaagccagtgcatattgttattcaaacctccaatctctctgatttctctaaagaacactcttatccactatataatactgcccaacagtttccagttactgacttgatcaatcaggtgattgatagcagtgctggagcaatgttagggaatatgatttctgcttttggacatttcaggttgcctttgggacatccaggtagtgatgtctaggtgaaagctggatttttttttttttttggagacagggtctcactctgtcacccaggctggagtgcatggtacaatcactactcattgcatcctcgacctcctgggctcaggtaatcctcacacctcagcctcctgggtagctgggactacaggtgtgtaccatcatgcccggctaatttttttattttctgtagagatggaattttgccatgttgtccaggctggtcgtggactcctgagctcaaacacttcctcccatcttggcattccagagtgctgggattgtagttgtgagccacagtacttggcctgaatctaaaatttaatcccagatgaatggcctgagctagatggatatgctgctctggtagtctttagtctataggtggttatggtggtaccacctcgcaaataggctgggtgttactacaacaagggtagtcagaggctttaggagtgtacatgaccaccggaagaatgtacgtgtgtgtagagaataagaaaaggtgtgtctttcacacaactgaatctcattctctacacacacatacaatgtcatacttaaattctggacattattttccataacatctcaaatctcatcttactcccaccaagagcaaaaaaaagcagtttctgttcttttgtatttggttaatggtagaatgagattagctataaatggtagctgtattgtcctttttcattctgcttaagtcagacagcggaactttagcttgtttagcagtgaaagcctataaatacaaatgaaatatggaaaaagggagccaaagtcccatgaagctctattattaagcatttaagattggtaaatgttcacaaactctggcagcctctagcaatacatgtactgtgtctccatgttaacagtggtctcaacctgaaacatccatgtatgaaggaacatgttttaataacagaactgagtggtatctgttcatggaaggtagcttaggagtttattgcgttccttgccttttcccctggacttacagtgtggtggattgtatatatatgtgagtctgtctcttgatcagtatgcataatggaacagggcaggaattcagatatcagttgatagtgtcataacattagggaaagtatgttgactgcttatggtctgctctatttgagagtaggacatagacctggaggcttctgctgctgctgcaggccaatgaatggaaaggtttgtttggttctcattctcattttttttctttgcttctcttttaaacaacactctctgacaagtgattgggcccacagagaccagagcctgtacacagagaatggacaaagactatattgtcttccttactttatcttgtgagctgcttatctcttccgcagggaggacaatgtgttaaattgagataattctggcatgctgtcatctttgggggaatcataattgctgttgtcattttaggcagcttcaagggagttgagttcattcagcttcagttacctgaactgaattcagttgcctgaattgacgcttttgtgaaatggaatctttccaagtcaaagcttggattgaaatttcactgactggtttttatgagatcacttagggtctcaaatactttatgtagaggtgcattgatcatattttacacttatgtgtgacttatgggcaacttttagcacccttatccctctggagttttggaatgctatttgtgaggtttataacttcataaatatttattgaacatctactacctgccaggtagtagtctagatggtagagtatacagtaaggaacaagctatataaggtcctttctctgttggagcttactttctttgggatattagacattgaattaggctatttcagataagatagtacttgtgaaagatctataacaaattcttttggatgtgtctagtgtccttccctactgcatgtccagatctttctcatcttcatttgaaggctggctcaaatggcagcttctccatcatatccttatctgatccttccagctgatatattactcccctctttgaaatctcatgcctctctatcagcaactttcttatgtcaccttaacatttttttctatttgtttcatagttgttagtgcatatgttaagtctccccattagactataaattactgagggcaggccgggcacagtggctcacgcctgtaatcctagcactttgggaggccaaggcgggtggattacttgaggtcaagagttcaagaccatcctagccaacacagtgaaaccctgtcgctactaaaactacaaaaaattagctgggcatggtggcgcacacctataaccctagctacttgggaggcaggagaatcccttgaacccaacagggtggagcttgcagtgagctgagatcctgccactgcactccagcctgggtgacattgtaagactttgtctgaaaaaaaaaaaattattgagggaagagtaaacatcctattcatcttggtttgggatatttcacatgcaggcagcaggatgttgtaggaaaaaaacacactgaacttagaaccagaaggatcagataaggatatgatggagtactggcttctctattcactggccgtgtgactagacaagtcatttagcttcactgaaactaagttttctatctctaagcgtgtagtaatcatccttctattcctgaatagttgtcgggaggctcaaactgagataatgtatgtgactatcctttgctaattctaactttctacacacagtatcatagtaaatattgagtatttgaatgagtaagcatttactttagtgaacaccttttcctgagcagttctcttgcttaatgaggtcttttgattttgtaaatatgctacttttttatctgatatttttgtattgttccattttgcagatgacatctaattttattaaattattctgttcctgagaattggcatcctcttcatccacctggggatgaccaggaattttctgtttttttctctgtaggtgctatttaatatttaaataacaaatgacatttgatctgtttcagcaggtggtccattatggctgacatgcaaaatctggtagaaagattggagagggcagtgggccgcctggaggcagtatctcatacctctgacatgcaccgtgggtatgcagacagtccttcaaaaggtaagcagtccacagcccagcagaatgctttctttgagcgtcttggcctgaaaattttctattattctctcctttggcgctaacttcccaaaacttaatctagaaagtttaccttttgtaatttgtattgctgtgaacagataagagaggaaatgacttgtacagggaggcctgtggttaagttattttaacacaagaacttcctgcttgtgcaatatttcctgctctttctttagcagaatgactccaatgtaagtcaaatgacaagtgataataaaattcctctctccaaacaattggcaaattggacattttgcacatgcaccagttggaacatagaatgttagcactaaaaaaaaccttggaggatcattttgtttattttcattttatagataaagaaaattaagctcagagaggaaaaggaatttagtcagggtcacacaaccagttagtggtgatactggacctggaacccaggtttccttactcctgttctgtatcctgttgactgtattaccttgcctccccactttcatgtagaagcacgttttaaagaagcctccttctgatgcatggctgattctttgtggtgtgtttgtctttagcaggagcagctccatatgtgcaggcatttgactcgctgcttgctggtcctgtggcagagtacttgaagatcagtaaagagattgggggagacgtgcagaaacatgtaaggatgttttgcctttttccccttcttttaaggactaacagctttcttcagtcagccaaggtcctcatccttggtttaagagctccttgagaagttcctcttggtttggggcattacacatgttctttctcttttgcctgtactgaggagttcagtccagccacagaaacgattcctcatttttttctaggccccttgcttttatcacgtatttatacagaaagcttgcttggtacataaaatatggttctgttcatctttgtagtgaagaatatgcaccagtttgatcccaacatattacataatcaaacctacagtggcttatttaaaggagtcattatcatgacttagcatttataaaactatgcttgatagttattagttatgctaatgtgggttattttcacacttaacccacagcaagaatatgaagtaggcaatgannnnnnnnnnnnnnnnnnnnnnnnnnnnnnnnnnnnnnnnnnnnnnnnnnnnnnnnnnnnnnnnnnnnnnnnnnnnnnnnnnnnnnnnnnnnnnntacgtcatcaccaccaccccccacccccaccccacactcacatatacattctacctctatttttgggacccaaaaaccttcctgctagctcaccgaattataaacagtaaccatgcttgggaacttcttcacctaaacctttctcgaagactggttgcttggcttttggaaaatctattttgagcctctcaaataccatctgttgccaatggttttagctctagagagtgggactgggactttaataagggtgtggaggcttgcatttttacttaatacagttctgtaacatttgaaaaaactttaaaacatttatcatttgtattttaaaaatgcaaatccagaaaaaatagattgctttctttgaatttttgtattttaatagtgcttacagtctcatgtttcttaaattcttttgactgcgaatgacccttagaaagaaagaacatattcgtaactgagataaaagtttcacaagatgatatttatactacttctgctgtacttttttttttttttaactttttatttggaaataacttgaagttggtgcactgcactcatacttttgttccattaagctcactaaattgatttaattatttattaatgggtcatggtatctggcatttgagagatagctttaatctaaaggagtaaataccttgagaattttcagcagaaatttaggcctttgcctttactcctgtctccaatttttgagaaaagaaaggtgtttttttggttgctgtttgttttattttgctgatgtgaaataggaaggatttttcagtgcacggtatcacaatgcatgtgtaagatgctaacatgacttcatgtaagctaggtgattatccaattaacttcacttccaactctggatatatatccctgatgagttccaataggaacagtagtgtatgtaattctgctctcagtccctggaatctggaatacatgaggaggataacatgaagtgcctgggttgctatcagagtacatggaagtagaggtttcaggttattcttatcaagacttctctagttataatgtgtcatcaatagctgattcttctttctggcaggcggagatggtccacacaggtttgaagttggagcgagctctgttggttacagcttctcagtgtcaacagccagcagaagtaagttcactactagctggtttcattttggtttgatgctcaggacgagttgagagatttatgtcaagctattataacattttaaaatagacctactaggcttttgataatatatgttcataccaagtcccagaggtagagccatacttcaagtgccttaatgggaaggtactattgggtacttaatggtctctactggctttttctctgtcattttgcataggactgtggttatccctgggactttgcttgcctgcctctttgctgagtccacattcatcatagtgtctccaaagccctttaaagatgattctcttgcttcactgtggatgggctttagtagtgctcctgtggagatcttaaaactcctacagtattgcttctctcctcatccttcactggttgggagactctctctttaattttactcccacctcaaaattttatggtgcaagatgtgaaaagttgaattagagaaaatttagatttctcttggagtcaaagaatataggtttccttcttttgcatttggttttcctagttacagaggaataataaagcaagttgtcctaaatgctgtattaaaacccttgaccctcagcatgcctagataatataaaaatagtgcaagataatgtcaaatatattagattctggttaagtgtgctggctcattcctgtaatcccagcactttgggaggctgaggcaggaggatcacttgaggccaggagtttgagaccagcctgggcaacatagcaagacctcgtctctattaaaaattaaaaaaataaaataaataaaaatagccaggcaaggtggtgcatgcgtatagtcccagctacttgagaggctgaaatgggaggaagatttgggcctgaaagtttgaggatgcagtgagccatgaacacaccactgcactccagcctgggcgacagagcaagaccttctctcaaaaaacattgtgtgtgtgtgtgtgtgtgtgtgtgtgtgtatagatgccatctaattctaatatgtagaattagattttaattcttaatctgtcctgaatggttaagatctgagaattgagatgttcaggaaatggagctttggaggaagggtgcaaacacaaacaaagttcatccattttgccaaggtgcctatttgaatgctaagcccctaattgttttttattttatttacgtttaaaaaaaaatttttttttttagacagggtgttgttttgtcacccagactggagggtagtggtgcaatcacagctcactgaagccttgacctcccaggtgtaatgatcctcccacctcagcctcctgagtagccttgactacagtgtgcaccaccatgcctggcttgcttatttacttacttatttatttatttatttttgagatggagtttctctctgtcgcccaggctggagtgcagtggcaggatctcggctcactgaaacctccacctcccaggctcaagtgattctcccacctcagcctcctgaatagctgggactacaggcatgcgccaccatgcccagctgatttttgtattttcatagagatggggtttccccatgttgcccaggctgatcttaaactcctggactcaagcgatctgcccaccttggcctcccaaagtgctgggattacaggcgtgagccaccatgcctggccctaattctttttattatttgtagagacaaagttgtgctgtgttgttcagtctgtcttgaactcctgggctcaagcagttctcctgccttggcctcccaaagtgctgggattacaggcgtgggtcaccatgcccagactaagccccctaattgcatttgattcatcagttctttacagcagctactatatggctggcaatgcattgggggctttcatgatgataaaagagctcgtctttgaagaattaatgagaaagtaaaacatattcacatgggtccattaatagtttgtattggtgagtgataaaatgccaagattggttatgctgacaacaaatgctgtaggaggctggtgtggctgggttggagggccctcatgaagcatgaggaaaatttggattcatgggaaaaaaagagaacatcatgagtaaggcacaggaatgatgtcctgagtgtatgtcctctgagtggaacaaaaaagagacaggtggctgaaatggaggttctgtggtatagctgaagtatgggtcctgatcatgaagaaccatcaggtgcagcctgaggagttggaactctacgaggagagtgagatgatgagcagtattttagccttaggaatcaggacaggactcatgcagtttatttgggtgctcactagagtccatagagaattcttgccttcaggatcagaaggcatagacacctttgtggaaagatgttaacctgaatcttttcttgtatcttttcctagaataagctttccgatttgttggcacccatctcagagcagatcaaagaagtgataacctttcgggagaagaaccgaggcagcaagttgtttaatcacctgtcagctgtcagcgaaagtatccaggccctgggctgggtggctatggtgagcagcgcagattccagggctgggggtgggtatagattttaagagggaaggcaatatagttggagaggtcctgagtcactgacagcttgtctctctctaggctcccaagcctggcccttatgtgaaagaaatgaatgatgccgccatgttttatacaaaccgagtcctcaaagagtacaaagatgtgtaagttcagccttttctctctttttttcttttctgagacagtgtcttgcgttgtcacccaggctgaagtacagtggcacaatcacagctcattgcagcctcaacctcccagctcaaacaatcctcccacctcagtcctccaagtagctgggacttcaggcacgctccaccatgcctggctaattttctaattttttcgtagagatgaggtctcactgtttcccaggctggtctctaatgattctcctgccttggtctccccaaagtgctgggattacaggtgtgagccactgtgcccagccaagttcagctttttctcaaggggtaaaggataaacccatttggttacttgctggagtagcactttggagttactgagggctgcccttagccactgtgctggttttatctcagggctgctttctggagagctttacagatattgtctcacagctgcatttgcaagcaggaaatacttctgcttccacttctgctttctctccttttttggtagaggcccttttagtcttctgatccttacccttctgggtttaggaagttttgctggcagtaacatggactaatgccctttatataagattttgttcctttgttgagaatttgttactggcccaatggcaaagggttcaataggacttaatagaaatttttcatgaagtcagttaaagtgagagtaaggctgcctagccaatgcaggtattacgtagggcagtcattgcatgtctaaccacatacgtctaccagttctgacttctccattgctggttttgagctggaatgattgcaggcaaaatttattaagttgcatatctacacaagcctttcctttcttccatccttcatcaatcaacaaacatttattaactactctttttaaggaaaactacaccttcctgtgagtgaaatgtgtcccagaacaacaggcacttccttatccttctagcaacatggaattaagcatgacagtgttttgatatatcccaccattatcccatcactttacagttgaggaaactaggtcttaggctaaataaccttcccagttaatacataagaagagaggggacttgaaccgtaggcacaatgctatttctataatttaaggctgattgtttccccctaagggaaagtttttaagtttgcttttggtcagggtgggcatattttgacataaggcattgtctcataaggcagttaagtttcttagtctttagagttccacagtgatacttaagagctctcctctctaccatggttttatgcacagaatgtctgcttttatcagttttacatattagattgtgtttaaggtctactttgaaaaaagtttcaataagcagcaagtggtcaaaagaaaaaaaaaagttttggtacttaaaacagtttgagaaacattgctatgagagatagagatagaatccagagtctctatcttagtggagtttggtctgattagggtaatagactaggttgtatatacatagaagctggtgatgatagaaaagctgccattgagcggagcctaagaaacaccacgggtaggagaatgtgagcccataggaaagaagggttctggagtcaccactgttatgtacccggatcacctgtgacaagttcttctttaatcctcccagggataagaagcatgtagactgggtcaaagcttatttaagtatatggacagagctgcaggcttacattaaggagttccataccaccggactggcctggagcaaaacggttagtgaatccttcctccctccctccctccctcccactttctctctccagcatggggtccacaggtttcttagacttcagcactaccaaagtctgtgagggaatgctagttttttcagtggaagggaggaagaaaaggaggagaaagaaagggtaaaaagagtagaggaagcaaggatcagaggagaaggaatattcagtggtattcaatttcaataaatatgttagggacagtgattggtgctggagcaggagacacacacaaatgagttacactatcccagcctttaaggagcttaaaaataagaatgcaaaaccccaatacaaatcaccaagccaaatgctataataaagatacagactagagtatgaggaagagaagagtgcttctcactagaagagattgtactttgaaggtatatactcttctgtgagacttgaaagtagtatagggcagtgagaagtgggatactacaaaaggcacagcttaaacaaaatacatgcagagtaaatgtagagattggtcatctctggcttcaataaggggaaatgatcagaattttaggagaaaaggctggaaaggaaggtaggctgagactttgggatgaggtatttgagcaagggagtgataatgattcaatttgtctttaaaagagtctcagtgtataggttagggataaggactcatgctcagattatgaaagtggtcatggtgtttgggggatagtagaaaaacatttgcaggagatagcaccaagataatagagatttgataaggtcgaagaagttggaatcctcaaagaagattgaatagtcagtcttggatagtaacatctttcactgaaatagggacaaggggatgattgtacagggagaggagcggcaggaaatgatgaaatcagttttgaatctgttgaatcagaggtactggtaacacactaaggaagatgtcaagtagatttgtggaaatagtttttagagctggaatcaggtgagttcaaaggcaaaatgtgatggtcaagaaatagaactgagagctggatccttgggaaagggtgagaaggcataaagccaagttgggtatgggtaggacacattaatcattgcctcaaaggctgtggtggggaccccatgtgcactggcccatgtagggcactactgggaatggtacagaggggagcagagaggatgatgatgttacctgcacttattgttccaggggcctgtggcaaaagaactgagcggactgccatctggaccctctgccggatcaggtcctcctccccctccaccaggcccccctcctcccccagtctctaccagttcaggctcagatgagtctgcttcccgctcagcactgttcgcgcagattaatcagggggagagcattacacatggtgagtgagcacttggacacgaacagtaggtacaacaagttgtgtgggccagaccccaccaaccagaaccgtctgtaaactacaaccctggcttgtgtggtggagactcgtttggtgtgtcctgttcctttaagggacggcaaagctggcttaaatggaaattgaaaatgatgatcacagttggaggaagccatctgccccatgggaaagtgacttaatattaggtagcatatatagaggaccctcttgtgccaaggcacagagctggcggttttccccagagctttttccgtggcaccacatggcctctgggaaggcattgtgttagggagttaacttcctcagaagatgcatactggttacatggaaaatttgcatgagagtgacctaatgttggtataaagtagatacccttaacacagctggtggaagtctgagttgtccagccacttctaggaatctatgatcatagtagctaaaaatggtgtaacaacctaaatccaacagtaagagaaatggctaactaccacatgtcctcttgatgaaatgttttttatttttttattttttttgagacggagttttgctcgtttcccagcctggagtgcaatggcgcgatctcggctcaccacaacctccacctcccaggttcaagcaattctcctgcctcagcctcccgagtagctgggattacagccatgcgtcaccatgcctggctaattttttttttttgtatttttagtagagatggggtttctccatgttggtcagcctggtctcaaactcctgacctcaggtgatctgcccacctcggcctcccaaagtgctgggattacaggtgtgagccaccacgcccggcctcttgatgaaatgttgtgccaccattacatgtttttctacagtgaaccatgtaatgtttaagaaaaaaaaaatctagtatgtaaattacaaccacaaggaatggtggagataaaaaggccattcagtatttgttatacagttaacatagatctggccatgttcaaagcgaggcgtgtgtcagcctgctgtgggagatgatgaattatttttcccttaaaacataaaagaaatatatttttacttttattttttattttattttattttttttgagatgggagtctcactttgttgctcaggctggagtgcagtggcgtgatcttggctcactgcaatctctgcctcccaggttcaagcagttctcctgcctcagcctcctaaatagctgggactacagcacctgccaccacacccggctaatttttttgtacttttagtagagactaaaaatacaccatggtagccaggctggttttgaactcctaacttcaggtgatccgcctgccttggcctcccagagtgtgggattacaggcatgagccacagcgcctggcctagaaagatattaaactacaggttaacatgagaaagtttttaagtgtcaatagttgaactaaatttgttaacaatctgtatgattataaccaacaaaaccaaatatatgtagaaaacaatattgtagagttgcaaatgccaacactgactgaggaggtgggggaagtagggttagctgtggggagtgagggtattttttttttttccttttaccaaattttctttactaccactcatttttctttattgctttaaaaattacatatttgtgcacatacatttgatatgtctttctagacatagaggataaggatttacatatccttatcctcacccacaatatacacacattccatgttgttgttaatggaaccatataatttaatcttggggagaagagaaatgataaaagtacttttccaaaactgcttgcaagagaacatctcaaaggctctggttttggctttgaattttctgttaaggatgtttaacatgacgatagcagctcaaaggtctggtatgaaggacaggaacaaggtagctgttgttcttacagccctgaaacatgtatctgatgacatgaagactcacaagaaccctgccctgaaggctcagagtggtccagtacgcagtggccccaaaccattctctgcacctaaaccccaaaccagcccatcccccaaacgagccacaaagaaggagccagctgtacttgaactggagggcaagaagtggagagtggtgagttaaaaatacctagacaggggcaggtatttttattattttatttttttgagatggagtttcactttgtcgcccaggctggagtgcagtggcgcgatttcggcttaccgcaacctccgcctcccggggaaaaggagtaggaacaggaggttaaatggagcttagctagatgagggcagagttctggcttcaattgcaagaacaaaaagtttgggatagcctggttattttttgttcggtgtgtgctttgtgatgagaatcctgggatctctctctaacaggaaaatcaggaaaatgtttccaacctggtgattgaggacacagagctgaaacaggtggcttacatatacaagtgtgtcaacacgacattgcaaatcaagggcaaaattaactccattacagtaggtgagtctttgtcgctgtcccacgcaagccccgtcccagagcccgagaaggctaataccattttacctaccctatccttaaagattcctaaatgtatattactttcctttaaagttacactgttgacacactccctttcttctcctagataactgtaagaaacttggcctggtattcgatgacgtggtgggcattgtggagataatcaacagtaaggatgtcaaagttcaggtaactcgatattttggctccttctttttgtccctgaggaattaattcaaagagacatggtagacccacagatgttgctttggtgggaatctgattctacaaagtctgtaagctgagctgctttggacgtggcagaagaagggttggctcttcaagcaagttcttttcaggacccatcccaacccacccgagtatccagtgtcttgcgcatctgtgagcttttcatgtagttgctgagtcacgtgaaacaggaaaccttttcctgcgacttactgttgtccttcccaaccactgggactcagttctctttgtttactctgcaggtaatgggtaaagtgccaaccatatccatcaacaaaacagatggctgccatgcttacctgagcaagaattccctggattgtgaaatagtcagtgccaaatcttccgagatgaatgtcctcattcctacagaaggcggtgactttgtaagtttcttgatctctttagtatgatgttaaaaacagaagggactgaagatttctggcattgaagaaagctattttatgaacattctgcactgagcaggtaaaaacccaataatgcacaccaaaagtacacagaaatgaggtagtcccatgtagtggagccccaaaggtaggtgctttctgcctaagtggagctcaaggtagcaaaaaataatggggatgagccatggcaccttgtcaggctggtgctataaagccatatgtactgttatttacaccccatagacttaatagtctgtccaagatcgctgaacactagaacatagcatggctctgtgggtttgtctcttgctacattgtaccgtgctcctggggttaagtggaagcaagcattgggagaaatgtgtgagatttagccccagctgttctttagctcagatttaaacctgctgtctcttctttatttgcagaatgaattcccagttcctgagcagttcaagaccctatggaacgggcagaagttggtcaccacagtgacagaaattgctggataagcgaagtgccactgggttctttgccctcccttcacaccatgggataaatctgtatcaagacggttcttttctagatttcctctacctttttgctcttaaaactgcttctctgctctgagaagcacagctacctgccttcactgaaatatacctcaggctgaaatttggggtgggatagcaggtcagttgatcttctgcaggaaggtgcagcttttccatatcagctcaaccatgccgccagtccattcttatggaactgccgactaggactatgatgcattttagctttgagcttttgggggttattctaccaacaaacaaacagtccattggaaagaaaacagtcccaggaattaacagatcagaatgttcacactggttaatctttttttaacaatgagcatgaaggtagcagaagctggtgtgtttccagatggttctgctataaccaaactcatttttcactgttgacaagcgaggcaggggttgcactggaccaaaggctgaggcttggccatctagcattccatacaaaattgtttcctataagcattccttttattctctattctatcctgggtctgcctcaaccgtgagataggagagtctctggtactagctgctgtagcagtgcccttcatccagggcagttaatggagtcttggaccctttctttctctgggatccctgcccagcaccttcctatagagatgactttaaaaggaaaaaaaaaaaaaaaacaaacccacatgatttcaaggagtctggcattcctgaatccttcttccctgccaggtgcctgtcacctgtcttcactgcctccttttccctgtcatgctcatcagcttatggcttctgtctaagcacctgaacagaggactgaaacctccactgcaggctggttttaggtcttgaattatgtaagaatcttgcacagcactgctaatgtaaatttcagttgtttttccctctaggacaaacacttaccaaaatatgcaacttttttttggtgggaagagagattgtcctgtgatttctacccatttcctgaggcctgtggaaataaacctttatgtacttaaagttatacagaaaatagaataaagttaataccaaacttgcttagttgtttacctgtgatattggctgtacagaaatgcaaaaaatactgaaaacaccaaggataagaaactactctttattttagacaacctcataaaattattttcacatcccccccaacttcttgctcttaatcctcatcttttagttgaagaataaggcttaagagagagaaaggaaaaaccataatggctaaacttagcagcaccaacacggttctttcatcaaggcgtagctcatcatttctccaaactgacatgctacagaaatgtcttccaaaaagcgttaagttttcacagagtggggactatgatttccatgctcaaatagtgtaggaaatggtagattacgttagttttgtttactgtaacaggaattctcaggagtccttagacactctaatgtgggttgatctccagaaggagaaagggagtgtgtagtattttccaagctttttgagcaaacaatccttttctcatggaacacatcagaaacagtttggagtatgctggtaaatgtgttttggggatggaagtcagaaagcctgatctttttcatatggttcctcctattctctgctaaagccagcaacagagtaagttgactctagcatcaagaccactagtcatattaagaaagggcaggttggtcgagaatggaataggaagaactagctgcctcacttttcactttcgcgcctacattttcttcgctccctaagttatacaagatgtacatttcctctcttaagcaatttaatttgggtgctacttccctccttttgtgacagcaactaattcatcactacctgaggagacaaagtgggtgctgcagaagcaagactgtaggccagtgggatttgtctaataattgatgataagatgattgatagcacagagggcaacgtactcagagaggaaggcagccttaagaaatgatgcagaaatagccaagcaagatttttccaagcactggttaaatcaccagcaaaacaaagcatttatgtgagtacctcaggcctgggcacctctttgcttgaaatatggcaagacttggaaaaatgtttgcccttagaatctatctcactacnnnnnnnnnnnnnnnnnnnnnnnnnnnnnnnnnnnnnnnnnnnnnnnnnnnnnnnnnnnnnnnnnnnnnnnnnnnnnnnnnnnnnnnnnnnnnnnnnnnnnnnnnnnnnnnnnnnnnnnnnnnnnnnnnnnnnnnnnnnnnnnnnnnnnnnnnnnnnnnnnnnnnnnnnnnnnnnnnnnnnnnnnnnnnnnnnnnnnnnnnnnnnnnnnnnnnnnnnnnnnnnnnnnnnnnnnnnnnnnnnnnnnnnnnnnnnnnnnnnnnnnnnnnnnnnnnnnnnnnnnnnnnnnnnnnnnnnnnnnnnnnnnnnnnnnnnnnnnnnnnnnnnnnnnnnnnnnnnnnnnnnnnnnnnnnnnnnnnnnnnnnnnnnnnnnnnnnnnnnnnnnnnnnnnnnnnnnnnnnnnnnnnnnnnnnnnnnnnnnnnnnnnnnnnnnnnnnnnnnnnnnnnnnnnnnnnnnnnnnnnnnnnnnnnnnnnnnnnnnnnnnnnnnnnnnnnnnnnnnnnnnnnnnnnnnnnnnnnnnnnnnnnnnnnnnnnnnnnnnnnnnnnnnnnnnnnnnnnnnnnnnnnnnnnnnnnnnnnnnnnnnnnnnnnnnnnnnnnnnnnnnnnnnnnnnnnnnnnnnnnnnnnnnnnnnnnnnnnnnnnnnnnnnnnnnnnnnnnnnnnnnnnnnnnnnnnnnnnnnnnnnnnnnnnnnnnnnnnnnnnnnnnnnnnnnnnnnnnnnnnnnnnnnnnnnnnnnnnnnnnnnnnnnnnnnnnnnnnnnnnnnnnnnnnnnnnnnnnnnnnnnnnnnnnnnnnnnnnnnnnnnnnnnnnnnnnnnnnnnnnctctatacagtgttctagattctgatttttgaaaagctcagagtcagaggactacctataggtgggcaagccatagacgacactgcctcagaatgccataggtaagtgggactgagccaaagacagaacattagctaggtaacttaaaaaacatccaacccaggacaggcgcggtggctcacgcctataatcccagcactttggatggccaaggcaggcggatcacctgtggtcaggagttcaagaccagcctgaccaatatgatgacactttgtctctactaaaaatacaaaaattagctgggcatggtggcgggcacctgtaatcctagctacttgggaggctgagacaggagaattcgcttgaacccgggaggcggaggttgcagtgagctgagatcatgccattgcactccagcctgggcaatgagcaaaactgtctcaaaagaacaaaacagaaaaaccatatccaaccgttaggtaacaaaccctggacactttcatattctggagttgaaaatgtcattacccatagcctagatgctggagaacaacctctggttgggaagataagcagttacgacagtgccagaatggtgcttctgccgtggccaacatcattttgagttttcacagtaaggaagttcttagctgtaatttctgaagccttttttttttttttttctcaaatcagattctagcttccctttttacctcaccacccaagttgaggcacccagtgcaaaagaaaagccaagccaagaggagacaaatgacctctgaaataacatggaggaattctagtagacggtgattggttcagatgtagtacttagcattttggagagtctgtctccaatataaaatccttagggctgggcgtggtggctcacacctgtaatcccagcactcttgaaggctgaggcaggtggatcacctgaggtcaggagttgaagaccagcctggccaacatggtgaaaccccgtctctactaacaaaacaaagtattaggcatggtggcgtgtgcctgtaatcccagctactagtgaggctgaggcaggataatcgcttgaacccaggaggtggaggctgcagtgagctgagatcacaccattgcactccagcctgggtgacaaagcaagactgtctcaaaaaaaaaaaaaaaaaaaaaaaaaaaaatccttaaagtgtagaaggccccagaactggaggtggcaaattactgcaacttctgcttaagatacaggacctactgctaaacaaaattcaaaactctagtcccactcaacctcctgcaggagcctcccttgtcagtgcgtaatttagaaacaggatttcacatctattaatgtttaaaagtaatgtcccttggccaggcgcactggctcacgcctgtaatcccagcactttgggaggctgaggtgggtggatcacctgaggtcaggagttcaagaccagcctggccaacatggtgaaactccatctctcctaaaaatacaaaaattagccaggtgtgatggcacacacctgtaatcccagctactaagggggctgaggcaggagaattgcttgaatctgggaggcaggggttgcagtgagccaagattgctccactgcactccagcctgggtgacagagcgagaccccgtctcaaagaaaaaaaaaggaatgcccctcatcatgcatggaggcttcctggatttgtagcagactgtacctcagccaaggcagctagttttaaaacctttttatcaaaagaagggaatcagacatgaggtttctcttgttgtttggaaaccataaggtttcaggatgtagtggatttttgtaacccagtgcctaataagctagagcacataatcaagagcctaacaagcttcacccatattggacatgagtcaggtgtttcaggagtacctagtgctctgaggtgtaaaggaaagggctccagcaccaaagaacatagcagcttcaggaactgggagctgaaaaaacaccaacctcccaagatagactccctgccagttacctgtgtgtacagggaggtctcctgtaagggaatggtttccttggcttggccacttctgtaaaatccaaaccactgcagaagaagcaaaggaaagaagctcagatatgacacacagcacatactgccaaaataatttgagactggttagaagctaaaactgccaacaaagtgaacatcataaagctgtaggaagaaggaaaaatggatagggtgcgtctgagtcatctcttcttaagggtggagcccgagggatgagttaatctttctgagaggccgctttccacttccccagaatttctgcttcctaaaattattaagcaataaatgtgaaaaattcctgtgctgagctctagacattcaaggatgaatacataatctgtttccaaagagctcccagtcttgcaaggcacggaaacaattcactcttgagtacagaggtcagcaaacgtttttgtaaaggccagatacaaaatattttaggctttaagggccatatggttgtaactactcattgctgccactgtaacaaatgcagccacagacagtatgtaaaaagtaactaaaactgttccaataaggacactgaaatttaaattttacataatctttatatgtccaaatacttgatatgtctaaataaattttacataatctttatatgtccaattctttcccccaaccattaaaaaatgttaaaaacattcttttatgttagtgtttggtgttactcgtgggtagcaccaaaacgggtagcaggatggactgggcctgtgggccacaatcggccaatccctggtggtgtgacataacgtgatgagtgttttaacagaggctgatgattctaaaaaagcgatcacattctgcttggaatggggatggcatccttgccttgacagacgaatagaaattgttaggtggagaagccaaggaagggcattctagagacagaaatatatgaaccaaggcatacgagagaaaaagcacaagtagtacaatatggcttgatcaagagtgtatgaagcgtgcagacaaggcagattaggctggaaaatggggtgaagccagatcaaggcagaccttggaggccaagcttaggaatttatatattttgggctagtgattctgaacattttttgggtctctgatctctggaaaatggattaaaattatagatccttccccagagaatgtaattacataattttgcatagaattttggggttgggggattgattacaatcttcagtgtcccatttatggacctcaggtgaagaactgttttatacaaaagttggtggaagggactgaaggttttttccccagcaggcagctgtattttttcatttcatttcaatttcattttatgttctttttgagacagagtctcgctctgtcacccaggctggggtgcagtggcacgatcttggctcactgcaagctctgcctcctgggttcaagtaattctcctgcctcagcttcccaagcagctgggattacagatggctgtcaccatacccggctaatttctttttgtattttgagtagcgatggggtttcaccaagttggccaggctggtcttgaactcctgacctcaggtgatccacccgccttggcctcccagagtgctgggattacaggcatgagccaccgtgcccggccagcagccctattttaatgccatttactctcctggcatgtggcctaagtagtgtctcacctccgaatctacagggtccacaatggaatcattgaggaatttcaccatcacaaacttcttcagggccatcaggtttttcttgtaggactcattgataccctgaaagaaaggccagcaacacctaaggtcattaccatcagacaccagcagagggagtaaagccttcctgttttctggtctccctgaccctgtgccactgtgtttcttccccatgggtatgggctgttttccagcttcctgaccaggatatacctgtacagcttttttttttctttttttctaaaaaacaaaatattttattttagattcaggggggtacatgtgtagttttgttataagggtatattgtgtgatgctgaggtttggggttctgttgatcctttcacccagatagtgaacacagtgcccaacaggaagtttttcagccctagcctctccctcccagcttttggagtctccagtgtctattgttcccatctttatattcacgtgtacccaatgtttagctcccacttataagtgagaacatgtgatatttggtcttctgtttctgtgttcatttgcttaggataacggcctccagctgcatccatgttgctgcaaagaacaggatttcattcttttttatgactgtgtaatattccatggtgtatatgtaccacattttctctatccagtctaccgctgatgggcacctaggttgatttcatgtctttgctatggtgaacagtgctgcaataaacacgagtgcaagtgtctttttggcaggacaatttgttttcctttgggtatatacccagtcacgggattgcttacacagccttttcttttcctttttttttttttttttttttttgagatggagtctcgctctgtcaccgaggccagagtgcagtggcaccatctcagctcactgtaacctctgcctcccaggttcaagcgattctcctgcctcagcctccagagtagctgggattacaggtgatcgccaccacatccagctaattttgtatttttagtagagacagggtttcactatgctggccaggctggtctcgaactcctgacctcaagtgatctgcccacctcggcctcccaaagtgctgggattacaggcgtgagccaccacgcccggccttctataggcttttcttaccatcctatctgactgacatgccactgagcaggcatacaggtacaannnnnnnnnnnnnnnnnnnntattctgtgttgttttttgtttggtttgtttttcccttcaaactgtttcaaaacaaaaaaccaaaagactctccagatgagtcaaatataaactgagccatctagtttaccagaacctaccaaaccatgtttgtgtctgggacatactcagtgcctactgtatctctcttttaggtaaatctctagagaaaaatccacccccagactgatccatcaggaaagcttccctcattaagacagcagctgtgaatttccacctcgcccagtcagcaacctgccgagcttatcctgtgtgtttcaacactaggagagggaaagaacttaagggaagaaaggcaaatgaatttcaacctccctaaagggaactgaatctcaaaggccctgcctcccaaaaaaaacagaacttctctttcctagtgtctgcccaggacagtttgggtaaacagtcactgctgatttgtttatgaagacctaaacaggaaaaagaacgcacatctatgggagcccggtttgggtgcttacccgctcctgatttatatctgccaagaagatgctgtggttgcgatacacatcctcctttatggggtcatgccagtattcggcttgcacgaggctgtaggaaaaaaaaagaatgaggtgatcaagctacaggtcagtcagtacgcccagggcatgctcagtgcaaaggccaccaagagactttaaaaggacaaaaggccagccaggcacagtggctcacacctgtaatcccagcactttgggaggctgaggcaggtggatcacgaggtcaggagttcaagaccagcctagccaagatggtgaaaccccgtctctactaaaactacaaaaattagccaggcgcggcggcaggcgcctgtaatcctagctacttgggaggctgaggcaggagaactgctagaaccccggcggcagaggttgcagtgagctgagatcgcagcactgcacttcagcctgtgcgacagagtgagactctgtctcaaaaaacaaggacaaaaggccaaagccctcaagtcccaggccttaccctttaatacagaagacaagacttgcacctaggaaacagtctgtcaacaagacaccttgttgagacagactgttcagcatagtacagaaattataaaagattcaggcaaaggactcatcaatatttgcttctcctgtgacactggggtttatcatacttatcatgctgatatggtttggctgtgtcctcacccaaatctcatcttgaattgtaactcccacaattcccatatgtcatgggaggtgactgaattacaggggtgggtctttcctgtgctgttctcgtgacagtgaataagtctcatgagatctgatggtttcaaagaggggagttgggccagattctgtggctcatgcttataatcccagcactttgggaggccaaggcgggcagatcgcctgaggtcaggagttcgaaaccaacctggccaacatgaggaaaccccgtctctactaaaaatacaaaaattagccaggcacggtggcatgtgcctgtaatcccagctacttgggaggcagagggagggagaatcgcttgaacctgggaagctgaggttgcagtgagccaagatcacgccattgcactccagcctgggagacagagcgagaatccatctcaaaaaataaataaataaataaataaataaaaaataaaattaagaggggagtttccctgcccaagctctcttcttctgtctaccgtcatgtgagatgtgcctttcgccttccgccatgattgtgaggcttccccagccacatggaactgtaagtccattataaacctctatttgcccagtctcgggtatgtctttatcggtagcatgaaaacagactaatacagtaaataagtaccagtagagtggggtgctgctgaaaagttacccaaaatgtggaagtgactttggaactgggtaacaggcagaggctggcacagtttggaggcctcagaagaagacaggaaaatgtgggaaagcttggaactttctagagacttgttgaatggctttgaccaaaagcctgatagtgatatagacaataaggtccaggctgaggtagtctcagatggagatgaggaacttgctgggaactggagcaaaggggactctttatactttctttccaatctctctccacttcctcttcccttccagcccccacctcctcaaaatgggcacggttaccccaaggcctcacatggggaaattcgaacaaactctatcccaggttggcagggagagaaatcaaaatttctacaacatacgctccgtagccagagtggaagagctgcccagaggcagtggtcctgaaaacgccactcagtggagcaggctggcgctaaagcccaacagagccagttacgtcagagatggagctctccctcccaggagcagatgagactgaagttaaaggaagcaacagtcagagtgacattctagaatgtgtttatacatgtatttgaaaccttttaaaggtttagaactctgaacatttatagaatgcaaaaaaaaaaaaagttcctgaggaaaattagaagtgctatttcagtgaacacacaaataataaggaagcaaaacagtcttattgctgctatggagaaaatctgagtggtctagatagaagaccaaaccagccacaacattcccttaagccaaagcctaattcagagcaacgtcctaactctcttcaattcaatgaaggctgagagaggtgaggaagctgcagaaaaaaagcgtgaagctagcagaggttggtttgtaaggttcaaggaaagaaaccatctccataacacaggagtgcaagatggggcagcaagtgctgatgtagaagctgcagtaagttatccaggagatctagctaagatacttaatgaaggtggcgaccataaacaacaaattttcagtgtaggtgaaacagtcttaaattggaagaagatgccatctaggactttcacagctatagaggagaagtcaatgcctggcttcaaaacttcaaaggacaggctgactctcttgtgagtgcctcatggagctgatgacttgaagctgaagccaatgctgggttaccattttttaaatcct

SEQ ID NO: 239 - DNA, 712 bp, Homo sapiens
tcagcaggtggtccattatggctgacatgcaaaatctggtagaaagattggagagggcagtgggccgcctggaggcagtatctcatacctctgacatgcaccgtgggtatgcagacagtccttcaaaagcaggagcagctccatatgtgcaggcatttgactcgctgcttgctggtcctgtggcagagtacttgaagatcagtaaagagattgggggagacgtgcagaaacatgcggagatggtccacacaggtttgaagttggagcgagctctgttggttacagcttctcagtgtcaacagccagcagaaaataagctttccgatttgttggcacccatctcagagcagatcaaagaagtgataacctttcgggagaagaaccgaggcagcaagttgtttaatcacctgtcagctgtcagcgaaagtatccaggccctgggctgggtggctatggctcccaagcctggcccttatgtgaaagaaatgaatgatgccgccatgttttatacaaaccgacccatcccccaaacgagccacaaagaaggagccagctgtacttgaactggagggcaagaagtggagagtggaaaatcaggaaaatgtttccaacctggtgattgaggacacagagctgaaacaggtggcttacatatacaagtgtgtcaacacgacattgcaaatcaagggcaaaattaactccattacagtag

SEQ ID NO: 240 - protein, 181 aa, Homo sapiens
MADMQNLVERLERAVGRLEAVSHTSDMHRGYADSPSKAGAAPYVQAFDSLLAGPVAEYLKISKEIGGDVQKHAEMVHTGLKLERALLVTASQCQQPAENKLSDLLAPISEQIKEVITFREKNRGSKLFNHLSAVSESIQALGWVAMAPKPGPYVKEMNDAAMFYTNRPIPQTSHKEGASCT

SEQ ID NO: 241 - DNA, 2564 bp, Homo sapiens
agcaggtggtccattatggctgacatgcaaaatctggtagaaagattggagagggcagtgggccgcctggaggcagtatctcatacctctgacatgcaccgtgggtatgcagacagtccttcaaaagcaggagcagctccatatgtgcaggcatttgactcgctgcttgctggtcctgtggcagagtacttgaagatcagtaaagagattgggggagacgtgcagaaacatgcggagatggtccacacaggtttgaagttggagcgagctctgttggttacagcttctcagtgtcaacagccagcagaaaataagctttccgatttgttggcacccatctcagagcagatcaaagaagtgataacctttcgggagaagaaccgaggcagcaagttgtttaatcacctgtcagctgtcagcgaaagtatccaggccctgggctgggtggctatggctcccaagcctggcccttatgtgaaagaaatgaatgatgccgccatgttttatacaaaccgagtcctcaaagagtacaaagatgtggataagaagcatgtagactgggtcaaagcttatttaagtatatggacagagctgcaggcttacattaaggagttccataccaccggactggcctggagcaaaacggggcctgtggcaaaagaactgagcggactgccatctggaccctctgccggatcaggtcctcctccccctccaccaggcccccctcctcccccagtctctaccagttcaggctcagatgagtctgcttcccgctcagcactgttcgcgcagattaatcagggggagagcattacacatgccctgaaacatgtatctgatgacatgaagactcacaagaaccctgccctgaaggctcagagtggtccagtacgcagtggccccaaaccattctctgcacctaaaccccaaaccagcccatcccccaaacgagccacaaagaaggagccagctgtacttgaactggagggcaagaagtggagagtggaaaatcaggaaaatgtttccaacctggtgattgaggacacagagctgaaacaggtggcttacatatacaagtgtgtcaacacgacattgcaaatcaagggcaaaattaactccattacagtagataactgtaagaaacttggcctggtattcgatgacgtggtgggcattgtggagataatcaacagtaaggatgtcaaagttcaggtaatgggtaaagtgccaaccatatccatcaacaaaacagatggctgccatgcttacctgagcaagaattccctggattgtgaaatagtcagtgccaaatcttccgagatgaatgtcctcattcctacagaaggcggtgactttaatgaattcccagttcctgagcagttcaagaccctatggaacgggcagaagttggtcaccacagtgacagaaattgctggataagcgaagtgccactgggttctttgccctcccttcacaccatgggataaatctgtatcaagacggttcttttctagatttcctctacctttttgctcttaaaactgcttctctgctctgagaagcacagctacctgccttcactgaaatatacctcaggctgaaatttggggtgggatagcaggtcagttgatcttctgcaggaaggtgcagcttttccatatcagctcaaccatgccgccagtccattcttatggaactgccgactaggactatgatgcattttagctttgagcttttgggggttattctaccaacaaacaaacagtccattggaaagaaaacagtcccaggaattaacagatcagaatgttcacactggttaatctttttttaacaatgagcatgaaggtagcagaagctggtgtgtttccagatggttctgctataaccaaactcatttttcactgttgacaagcgaggcaggggttgcactggaccaaaggctgaggcttggccatctagcattccatacaaaattgtttcctataagcattccttttattctctattctatcctgggtctgcctcaaccgtgagataggagagtctctggtactagctgctgtagcagtgcccttcatccagggcagttaatggagtcttggaccctttctttctctgggatccctgcccagcaccttcctatagagatgactttaaaaggaaaaaaaaaaaaaaaacaaacccacatgatttcaaggagtctggcattcctgaatccttcttccctgccaggtgcctgtcacctgtcttcactgcctccttttccctgtcatgctcatcagcttatggcttctgtctaagcacctgaacagaggactgaaacctccactgcaggctggttttaggtcttgaattatgtaagaatcttgcacagcactgctaatgtaaatttcagttgtttttccctctaggacaaacacttaccaaaatatgcaacttttttttggtgggaagagagattgtcctgtgatttctacccatttcctgaggcctgtggaaataaacctttatgtacttaaagttatacagaaaatagaataaagttaataccaaacttg

SEQ ID NO: 242 - protein, 475 aa, Homo sapiens
MADMQNLVERLERAVGRLEAVSHTSDMHRGYADSPSKAGAAPYVQAFDSLLAGPVAEYLKISKEIGGDVQKHAEMVHTGLKLERALLVTASQCQQPAENKLSDLLAPISEQIKEVITFREKNRGSKLFNHLSAVSESIQALGWVAMAPKPGPYVKEMNDAAMFYTNRVLKEYKDVDKKHVDWVKAYLSIWTELQAYIKEFHTTGLAWSKTGPVAKELSGLPSGPSAGSGPPPPPPGPPPPPVSTSSGSDESASRSALFAQINQGESITHALKHVSDDMKTHKNPALKAQSGPVRSGPKPFSAPKPQTSPSPKRATKKEPAVLELEGKKWRVENQENVSNLVIEDTELKQVAYIYKCVNTTLQIKGKINSITVDNCKKLGLVFDDVVGIVEIINSKDVKVQVMGKVPTISINKTDGCHAYLSKNSLDCEIVSAKSSEMNVLIPTEGGDFNEFPVPEQFKTLWNGQKLVTTVTEIAG

SEQ ID NO: 243 - DNA, 47299 bp, Mus musculus
  misc_feature (1)...(47299): n = A,T,C or G
aagcctggtgtggtggtgatgcctttaatcccagcactcgggaggcagaggcaggcagatttctgagttcgaggccagcctggtctacagagtgagttccaggacagccagggccagggctatacagagaaaccctgtctcacaaaacaaaagaaaagcgagattattttgttatttttctttatcatatgagaggctagaccaaggccattagcacactatgctcaccaggctttagttggggcctaagatgattcaggccctataagctctggtctatttttatctataataatggaccaaatatgagttgatgagagtcatcatagagaatgagaagaatgctgatgttagagtcacagggctgataattacacagatctgtcacctctggtaagtcacttagcctgtctgatgctgcttccttatttataactagtcacctcataggtcctcagtaaatatttggatgaaatattaatcaattctagttaacctatggaatcatcatattagtgataaaagtgcataataaaatttaaaatgcagtgtatactagagattggtgaaggaaaagtatgaaagacagagatgaatatattgagccttaatgactagaaatatgtattcaccccagacaggctagctaagatagggactgatttttgaaaaccaagactagggttaaagaaaaaacagattttaattgaagaaattccagcaggcaattgataacacattgatttaataattttaatgagattttttaatcttcagaaatttttacgttattaaaaagatgttacctctaagaggatctatagtctcattgaaagacaaaaattcagagactactaagatccatctgatttgtaaaattgattggcaaagtgattatatagggcatttaactaataaacatttgctaggaaaagatgaaggtgaggaggagatgtgttgaatggtctgagaggtagtgtatatatcaacatacattgaatacatgtatgagttgtcaaaaatactttctaggttcttcccattcaatactaggctgcaattcatgataccatgttagttgtcaccagtaataacttagggtacttatatctcagaagctgggtctggaattttgatctgactcacatagatgacttctgttccttgtgccattgttttgaggctctccagcagtactcagtgataaccttggcttgaggcccttcattcacctgtctgatacgtctcttgagcatggtcagactatcctggcctccctggctaaggagcaggaagtaagggcttgtaattatttaaggtctggttgtagacatagagaagcatcatttttactgtattctgctggtcatagtcattacagaaacaatctcaactcacggggaaaagacagaccccatgagaaatagaaaaaaaaaacaaacttgcttcagagaatcacttttcaacttgtataatcagtttcctcttggcttgcatgcatggaggagctcctgaaaggtagccactgctcacctgcatgttacctgccttatttcttgcagttctcttatgcctacgcgtttgaatatgtcctccaaagttcttgtgttgaaagcaatcctcaattcagctgtcactgaaggatagtgtgtaatgggtggtggttaggtggtgaggcctttgccttcaggaatggattaaaggcatccagtgagtgggttggttctcaaaagatgaagtttatagcctgtaccttttctctgggtcttacgtgtgtttgctggtctttcagccatgttaagataaagaaggaagaccttcacaagatgggaccctgagatcttggattccctatctttgagaaacatgaactatttggagaaacttgttaataacttaaaaaaatcaaatgtatgatgtttcttttaaatgtgtatatatagagacacagaatgtaaggtagttctgttcttctttaaaatggaagtttctcctggtgtggacaagctgccttagctctacctcagcctttgtggttatgtgtaagctgccatagcagtccactaactggctgctgggaactttgggtagcagcacttaatacattaaaaacaaaatctcaaaaaaaatgtctcctaatgtattttttcgctcttcttatgttaatttgaaacagaatctcttggagtccagactagcctcaaactgtaccaaaaccagctttgaattctgatcctccttctgcctgccaagtgctgggattaaaggcgtgcgccaccaccgcccggcccgttttattttaatttcctttaaatgaatacaacttttgttgtatagaattttggttttctgtaaatattttatttttctattttgttttcacacccagcacaagtttatgaataacatcttttcgagttctaccctaaatacatatatttttacactgttgcctgagttcccagaaatgagttagcatttcctcttatttagtagtaagacttgagtttctcaaccttagggaaccttgaaaaacaaaagtcaacattgtaaactttattctgtagcaaaagttttatgaagttgagttctccagtaactgcagctttagttgtttctgtaaatcagtgaagtttggagagctctgtcatcatagataaatctgataattttattatgtgaaagaaaacagaaaagagggccttctgtgtaactcaaataagtgctagaaaatgcaaagaagggctgacaagatgcctcgtcagggaaaagtgactgccaccaagtctgacaatctaaactcaatctccaggacctaccatgggaaagatgggaaagagagaactgacatttgacaattgccttctgaccatggcacacatggccacacagaagaaaaaaaacaaaaaacaaaaaacacaaaacaaatattttaagacctggaaaaaaaaaaaaaaaacttaaaaaaggccgggcagtggtggcacacgcctttagccccagaacttgggaggcagaggcaggcaggtttctgagttcaaggccagcctggtctacaaagtgagttccaggacagccagagctacacagagaaatcctgtctcggaaaagaagaaaaaacttaaaaaagaaaatgcaaactaatctataaaaaatgaaaacaggtaaatggtttcctttgaaaaggaagatgggggaaaaaaccacacaaagtcgacctggagagatggctcacaggttaagagcactgactgctcttccagaggtcctgagttcaattcccagcaaccacacagtggtaacaaccatctgtaatgggatcccatgcccttttctgctgtgtctgaagacagccgatggtgactcacatacataaaatacataaataaagcttaaaaaacaagtagaaaaaaattttttaaaaaaggtacacagtaacatcctgtattttgaatggtactttgactgctctatacaaatgcaagttgctaagttgtaagttttaagcacacaataatttgttacgtgccatttatggttccataaagctgtaaaaaaaaaaatagctgtggctagaactatctaagaactatcaaatctaccccaatctagaactatcaaagttccaacactttgacaaaatacaacttaaagaagaaagggctcatttggcttacaagtccaggttatagttaacactgtaaacatacaggttgaaagaaatgtacttataagaaatgtacctgaaagcatgagtgtgggcttctcaaagactctcccatcacacttccatatatcctttacaaggctatcatagacatattttatgaacgaaatccaatcaagcctttttttcatttaaaaaaaaaggtcatcacatccacttcagaactcaagattgaatcccacattgcagtcttgtctcgagggtgcatgtacacgactgcatatataggcacacacagcaaaatacttactgcttcccaaacttcctaagtcatcttgatactctcactgtttatttatctcctatgaactttccctttttttgtttccagctttgtcctactttttcacttaatgacaactttttttttctcacagacatattctctgattaactcccttggtttaagcccaggatagttcaatctctgtgctagggagataaaggcaagcagatctttgtgatttgagaccagcctggcctacatagttccattgatggccagggctttgtaaaaaccctgtcttttaaaaaataaaaatttaaaaattaaaaaaagttaagatacatgaatactattctggctagaaaccgtttgtctgagtcaggcatggtgatacatccctataaaatcagcactccagaagcagatgcagaaaattcttaacttttaggccagttcataacataatgactttgaggtcagcttgagctacatagttaggcctaatcttaaaggaaacaaaaccaaagaaccataacataacatttctttcaagaaccccatgcaacctattcaaatgtataaaggtcactgggtgacagttatggataggcacttaacctattggatcccacatcaaaagctgtcttggattataagtggatttgatgttttgtcttttttatttttaagggtatgggtattttacttatatacatctgtgcactgcatgtattctggtgcctgtggttgccaaaagagggcatttaatcccataggcctgcagttacagatggctgtgaaccacaaagtgggtgctgggaatagaacccaggtcctttggaagagaggccagtgctttaaactactgaaccatctcacaatggttatttttaaaacaacctctgagcttgtttttaaaaactgtacttgtaaataaatgttggctgaacagcagaataactttcagatataggaacaatgttatagagacagtattgcaagctaacaaatacaaaataagttttatgaaacagtgagtataataatgtaacaatgaattctgtgttctaaggcaatagtcctgctatgcttgagaaaagaggaacacagtaattagagtttcctaaagaaacagtggaaatggctctgacactatcttggagatcacaaagtccgaaaatatgctgcttaaatgatgagcaagtggcagaattcagctgtagtctgaaggcctggggggtgggggtgggggggggtgaagagactgcaataaaagcttcctagtgaatccaaaggtcagaaatccagaagtattggtgtccatctgagggccagagaaggtgaatataagaaacaaatttccattcctctgccagtttattttattcagaatctacatggattgaaattttcttatttgtgttgaggccagtctttggtctcagttcattgattcaaaggataagcttttccaagaacataccatggatacaccagaaataatgttttaccaaccatgtgggcatccctctacccagtcaagctgagtgttccatcaaggttgggcatcatagtattttacatattgctttgggggcactgtcccttccccagacaaggcccttgagtaatatttacttttcttctaactggactactcgatgaaattaacaatatttaaaatactgatgaagtgctaataagtcttgtataagatggcagtaagaaaggtgattgcttaattgtgtgcacacacatatgcataagaaagtatattcatgccaaaaaaaggaaaaaaagctttcttgcttccattttcgtttgctgggattccttcacgaatagtttaaatgggcttgtaatgttttccttcccacttctttctgcatacctcatctagcctggcctagacctcaggagtagcccaggccgaccttaaaactcacgatcctcccttattcctaggattacaagtgtgtgctactatatgccagcattctcttctgttcagtgcaattctgtttcattgatgaataacctaaatcaactggaaaggatctgggttgcttgtttttgaatgttatgatttaactactatgaacatttatatatatgttttgtatggagaaaaacactattttttaatcacaaagatttgtgcatggctcattacagcctgaaccctaccaatttaatgtcaaaatactgttctcaacatgaagcacagcttccgtttaaaagcaatgccattccatagcccaggttggctctagctggtgcgctccttcctccgttccccagtgccagaattagagggatgacaccacgcccagccaaatacaactccctgaaggaagttcactcaaccttacaaaatgatattttaaattagagtataaaattagttgtatttttatgaaaaccacatatttgtttcacttaggcttcaaatcacctttttgcaggatatgcaaatgaacttcaaatagaaattcatataaatactttattctgtatatggtatatattgagtaagggtacactttttttttgttttagacagtgtagtcatatatgctggcctcaaatttttatggtatgaatgttttacctacgtgtgcgtgtgtgtgtgtgtgtgtgtgtgtttaatatgtatttctatcttacatgcatacctgttgcccacggaggccagaaggcatcagatccactggaactggagttactgatgattgtgaaccaccatgaagatgctgggtactgaacctggttctctggaagagcaacaagagttcttaactcttcatccatctctccaactcctgtcatcaaactcttaggttctgcgtctacctccaaaggttgggattacaggccttcaattctatgcccagttaaaattctgtatcttatcttttcctaatcactttgcatgtcttcaactaatgatgtaggagataaacacagagtattagccaaacctacttttcatgtgtgtaagtttgtatcaccacattacaattctaataaatactagacacaccatttaccttatcatcaattcaaagtttgggtctttattaaccaactagaccctactgtgttttatttcttcagttagggtcttacacatctcaagcagaccttgaactagatacaaggtaaggagacactccaacccccagccccactcaacttcaagtgctgggattatggctgtgcggctccattcctgttcataggtgctaggaactgaaccttgggcctcatgcatgctaaacagacactgtaccaattgacctatagtcctagacctagtatagtgtctattaaaattactcataccatgtttgcttttctttaaaactgactacttccaatgtctcactctagagtatgaatttcagtgtatgtgagggtgttttcacatatgaaacattattttgagcagggtcaacagctctactgaactgcccacatacttttagatataagaactctgaccacaatttttcccagtttgctgtgctttattgcatagcagtaaagtttcagtgtacttctttgttgaaacttgttagattagggcaacaggaactggtttctttgaaggttacttcattgtcctccctgtatgttgagtttctagttggtaggttccagttaggttcctcactaatctgtgcaccctggcttctgaaagtacaaaacaaagggaaaaagaagccaaacaaacgaattcagctgtcaatttaaaacacaaatagaaaacttcgtgttctataagactcagtccagtaagtactctgaaattgaatacttacattcaaattccacttctcccacttaatagctctgtccccttggtgtaatagcaatctgtgcccagtttcttcatttgtaaaagaaaacaagtgtcatgcccagcacataattttcatagatataatctattttattatatatacatatatttcaaaatgtttcatatttctctctggccagttaaatagctgagttgtgactgatagcaaggaggagcagcagtgtgtgtagggggtaacaagaacaaagtgtgacatatacatgacactgtcacagggaaacccattatttgtacgctatcttaaaacagcattgatataaccagtaacagcctacagtgtcctttcacattatgacatttaaaacacagcaactcagtgacaaagggcgggcattattacatctaacttggtggtgaagaaacaaaactataatatgtggaaccagaccactatcataaatagaaagccgtaagcaagaactcagatctggggttctcctcccacccccatgcttagctctttgctttgtgtctactggttagccaggagagaacaatgggctgttcagggaggagaaagtcagaggtgtcccgtagggcacgaggtaagtactgagggtttactaactcagaaaatggttctgatgaagtaatctctatcacttggctgcttgttgtaagtataatctcgggcctactaaataaaatcagcattttaaacaagactccaggtggttcctatggcgagtagctgaggcagctgcattccgttaactgctccagtgatattacctatggtatacaccgtcactcttcggctatacattgacttttatcattttacttgcggaatattgcctgcaacaggttctcaaaattcaaattatttccacgtagtcctgaaggacctccactttaagtagggtcgtttaaggatgctagaaaacctaaacatattgatctttttgaatgtctttcaaaagttaaagtcttactttttacccaaagagtactctcgatgacaaacggccctctacattttatgcagggcagactaaaacagggcagtggcacacttaacagatctcacccccaggatttaatccagaccgattccctagtattttgtcactttggggctcaaaaactgaaacagcagaaggaaaagacgattctaggatattcctcttgcggttccatacctaaggctctacccaatccgatcacaataaagctgtattgttaaggctatgcaaacgcagaaccctgcaggccgctgctctcagattggcccctcggggttaacaacgcgcatgtgtccgcacttggcggtgcgatcagcactcagcctggatcttttaatttgctgttcctaatttgaggggagcttcttcgcgctgctcagccctctctgaggagcacgggaagaaatctccatcacctgggccggcagaagccgtgaaccggctccaccttgactaaggcatctagtcaccccgcggccccgcccacagcacctccccgattggacgcccgggggagggccgtgtcggcgcgcgacggccggccggtcgggggaattccatttcctcccccgcccactagcataagcactcaggggcggtgcttccctcgcaagacccgcccagtaagagcccaggggggggttgccggcgcatctcgcgataacttgcggatttgggggcgggtcccgagccaggaagagagcacaaaactgcccttaagtcattgcagacccggagctgctgcgagcctgccacgaggttctcgcgagatccgccacctccatcccaagtgaggaaacggggggccactcagggaggggcgtggggcctcgaccgcgcagctgccgcttccattaccttcctcctaaggtctccttccggttctcgatgcttctctgaatttaagggtttccgccactcgcctaccctccccctcagcccatgacccgcctccgtcccccgccctcccggcccgacctccgatcgctttagcgagaaggtgctgttccgacagggagacggcaagcgggcggcacgtccactcggcccgagcgagggaagcaaaccgctcccccctgaacccctcggctcgccccgcgctcgcgacggcggcgttggcggacggatacgcggcggtgaataggcggggggaggggcggagcgtggcagctggcagtagttccgtcagagcggacatcttgtggctgtgccgtgcgcgtgagccccgtagggccggggaggcaccagctgccgcgcggggaggaggccgaggccgcannnnnnnnnnnnnnnnnnnnnnnnnnnnnnnnnnnnnnnnnnnnnnnnnnnnnnnnnnnnnnnnnnnnnnnnnnnnnnnnnnnnnnnnnnnnnnnnnnnnnnnnnnnnnnnnnnnnnnnnnnnnnnnnnnnnnnnnnnnnnnnnnnnnnnnnnnnnnnnnnnnnnnnnnnnnnnnnnnnnnnnnnnnnnnnnnnnnnnnnnnnnnnnnnnnnnnnnnnnnnnnnnnnnnnnnnnnnnnnnnnnnnnnnnnnnnnnnnnnnnnnnnnnnnnnnnnnnnnnnnnnnnnnnnnnnnnnnnnnnnnnnnnnnnnnnnnnnnnnnnnnnnnnnnnnnnnnnnnnnnnnnnnnnnnnnnnnnnnnnnnnnnnnnnnnnnnnnnnnnnnnnnnnnnnnnnnnnnnnnnnnnnnnnnnnnnnnnnnnnnnnnnnnnnnnnnnnnnnnnnnnnnnnnnnnnnnnnnnnnnnnnnnnnnnnnnnnnnnnnnnnnnnnnnnnnnnnnnnnnnnnnnnnnnnnnnnnnnnnnnnnnnnnnnnnnnnnnnnnnnnnnnnnnnnnnnnnnnnnnnnnnnnnnnnnnnnnncccggggctcgtcttcctttcaagaggccgggaagttaaacttgtaaccacctctcggcgcttcccgtcaccctctcgccctctctggggcgaagcgcggatctcggtagctggtggctccgccaccccgccccgccctgccgggatcgcggcggttttcagggttctggagtcagcagggtttctccgaggccctggcgagtcgctgacctgctccgtttttgcaaaaaggcgcctgtgtctggcagagccggtgtgagaagaagagacaacccttccccgccgccgggataatcaagaattttggccggacctttgagtacacctcgggatagtgaggagcccggcgaaaagcacagactatggcgctgaaacggattaataaggtgagcagtttggactaaatggtgcggacagggttgtgggaagaaaggaggcttggggcccagaggaaaaaaagcgtgggtctggtggtggatacaattctgaaaataccttttcttgggttaaggaaaggcaggtgcactttgaaatgagctgtaagatagggaactgaatggtttgggtaagcgaaatgttagcttttttcactagaatctgtaagtatgggtgagggagcgtggctattaggctcctcggttttttgcctaagagtcaggtttgggaagtagaattgtgtacaggccctcggctaatgtcatggtgctgcttcctagtcttggttcttcaaaacttattacagctgctaaggcttattggcattcaaaagaaaggaatgtaacagatgaaaaacgttttgttccaaacttgactgagagtctgggtatgacaaacatacctcagttcgctaaaatgtggtgacgaagtctgttcagaagcttaaccaaatctgggcagttacacaagagtaagtagggttgggaggaggtggaccgacactgttgccacttcctgtgttgtgtggtcgctgctctcacccgaagctatttatctgaggcactgggaaccctgtaaaagccttctgaaagatcctggggggagtgggggttgacagtgcagggaaactggatggggagactgtttttgcttaaaacccatctttaaggaggcttgtttgagcaaatcgatatagtttgataagttgtcaatttaagttggcaagaactagaatttttttcagaaatattttgcgagtggatccacctctccggtggtttagtctcattttcttgctctaacttctatcccgcattttaagatggcggctgctttaactggctcgggttctttccggcatctccttttctaactatttaagataatgttctctgttagcgttaaacgtttttttattctgttgtagggagctctcacagcctctgcccccaagacttaacctaaattcaaactctcagactaagtttctgtgcgtgtgtgtgtgtgtgtgtgtgtgtgtgtgtgtgtgttttgtatttggttctttcacaatcgagagggtggagtatttacagctaacttgaaaaaaatgttgtgcagaataaactcagtcttaatagaaaagacaaaatgggaaggttcggtattagaaactttggcttagtaacacagtttttaaagagttctgtggaaaggaaggcaaggacttaaaatgactggtaggatctaatactactttatttgtagttatttagtatgtataacttgatcagtttgattggaaaagctgttcatgaagttaagtctaacctgtatatattgatgttgaaatcttaaattctgtctctgggtaatctttgtagttttatgcaaaacacttaactgtttgtattcttgatgataatgcaaagagaaagaaaaccttagtattcaagacttcaaatagataatagaagttaacattaaaattatcacttagtgtgacagttttgagggtcaacctcactttttagagatgcattgttgtgctttgcagcataactaatatggagactataacattcagtgctaatcaaaattcagatctatagcttcttataagtgtaaaacagaacattttaaagggaggtcttactgatttttttcttttacaggtgatacccagctgctctggcaccattttaatgacttaaaagctctagcaaggcagtaatggttaagtgtaaacatttgtagtaaaataacatgagatagaatcaggctctaagcaagtttatccatttgcctaatctataccaggaatttttctatatactgggatggcaagggaaaacagattttacaagtttaaagaattatgtattgatacttcacaggtaaattttcttatattcgaaaacttgatgtaccaaatggctgattcaacctgatttcaagcatatcgggtttttttccttcagatattgtcagaatcatgaggctgcttaaaaaacaaaaaaaagcacccaaatgctggcataatttttgaaaggctacttctctaaaaataaggggccagttagacactgtcatgaggttttttttgtattatctgtttagaatttattctttgggttccccctaaacaagtattaaattaacaagccatttagtatttcttaaagtgcttacatataaaactgtgagctttagtgataaactggtgtaagttgaaacttattatcttctatatagatagatacgggtttttttcttttgtgtatttgcttgactattttttagctgcccaaataaccatacatgtattcttttgctgcatttgttatttggaccaaattgtagtatggtgctgttattaaatgggtattttagaaactgaattccaaacctgtgtttttgaagcattaagaaattttctgctacaaagcaaaatgactgttacatattttgagaactttggagatcaagcatgaaacaatcaaacaaaaatttatgttaagtatttgtaatgtttcataactctttaagtagtttttcttatgtaaaaacataggtacagttgacatcttcactataaaggaaattgactgcaaaaaataaataaataaaaaacaccccgcccaggtattgatgtaaccgagttgggattaagacccaggccttctatctaattccaagttgttctgatgacaactgcacttttatactattcttaggatttttgtgatagttaagacctagcataggttctcatgtgtaataggcctcaagacagccatatgagatattccctgaagtaacagacacaagttgactcttgacttgttcaatcacactattagtgatagatttctaataagatgatctccagaaagaaaaacctgaattttggaccattaaaattcctactagatgaatgtggatgttttgtgaaatatactgtcttctacctcatataaatatgaggctgattttttttttttttatgtttcaactaatttataaatgaagatgaatgaaatgtagtcttgtgtagtttccttaaggactagaaactgctgtgttggttaaatgctgggattcttttaaagtaaacaaaatagtattttaagttttataggctaacaggcttttcctgtggtcctgattttgtttttgttttatttggttcccaaggtttatttatactgtaaagaatacttaggtgagtgagggctgctgacgatcagtgatcccaatgttgagtttgataaaagcagttgtgacacactatccttatctttcatcatgcttacccagtgtttgttatgcagataaaggttaagttgaataccctgcatagcactggtgaaaactacttgtataaatttaactatattgtcaaattttacttgttacttcctaggtttgggtgtctgttaaagtccaaatcaattctcaaagaattttttctttattggattcgtgaggggtgtgctattagtttcagggagcactttgcatggatgtggggttcagaggacatctgtgtagtcagatccctacctttaccatggcttctggagattgagctcagatgtcatttcatctgggcaagtatcttaacaagccatgagccatctcgtcagccatagctttctaaaagagaaaagaaaaattaccagattgcattttgaggcagtgtgtcacataaaggcttgcctggaactcctgtcccggcctatatttatctattggtttaatttatttttgcactttgttttctgagatgaattttgactacattgtcaaagcattggccttggatttagagcagcccttcctctgtctcccatctgggattacaggatgccaccaaatccagctgctttgtggtttttaataaaaatttcctctattgctgaatataagagctattgcttagataagtttttggcattactacattttttatttcagaagattctagatttttaaggattacaacaatgtttggtcttcatctctagaaacatataatcatggaattgttcattagagaattctgaacttgcacttagaaacttctgatggagctgggcagtggtgcacacctttaatcccagggtgacagaggcatgtgtatctctgtaaattcaaggctagcctggtccacagagtgagttccaaaacaacagaagaagcactgtctcaaaaaccaaaagaaaaagaaacctctttggggttaacttaatcggtatttcactggggttataattgcatttaagaaatcaagaatctctgctttggttggaaaaatacatcaaacacagtatgtttattgctttgtacaacttattttcaaaggtttatcaaaattctgttaccctgtatctgaatagttttgtgagcttcttatgatcttagttaaaatttcactagtgttaatgagtgcatttaatctcttaagtgtccagccaagtctgccttaaattctaattttaaaactcctcaggcaactagtggagacacatacacttaggtatggcagtataaattggaggtcactttgggaatgtattgtctgcaacacaaaacaaaatgtcctcaagcttattaatgtagggtaaagaagggggaaagtttatattttataccttgtttagacatgtgagtttattatctagggacctttcagataacttcatagctacatttgtcctaaagtgttttgatttctctcagttgtgacttagtatttcttgtttagatgtttcaggatggaaatgcttattcacattaatcttaacaaatggatattaactaccagtagacagctaagtttttgtttttcatatctactaaatgcctgacttgattccatggattaaagctttcttcttggtctattcaaaactgcttacaaaaagatttttctggggtaaaactttagtagagctaaatttgcatgtcactaggcctagttttgaataatcttaagtgacttaccttcaagggtgatctaaagaaagaaaactgtagtattattcactcaggccattcttagaaccttgtctaataaacatacttgtctcacctataattagaactaaacaggaagctaatgccttgtctgtgatgtaaggcagcatagtgcacagaacctaccttttaatccatacaataaaagaaactcaggtttcctctggaaagattacaaacaaactgggtttaaagggggtgtgagttgtggtttgtgttttggcttcttgcagtggagtcactttctgggcttgctcaaacttcatccccctgtctagactgtgccaactaaatgataatcccttttgaatctttgtctacaattctgtagagtttgttcagatcagaatcttttgccaagtatcttctgaaatttattgcaagcaaccacacatttctgagacttttctcagaaatcaatttctgggatataagtaaataccagtagacatagatataatagataccaacaaataggtacatgatatcaataaatatgtaagtaactaaactatcaattctttataagaattgataaaagaaattcagtttgtaatgcagttgtaatgaccagctgagggtggtttttttaaatctcaacatttttagaggttttttttattcctgcctcctgtctttaagtagtgttactcagactgggtattacagcaagggctgtcttgattctgttgtaagtcaagtcaggtttacttctggaaaactgaactaagtaaaaaacaggaaattaactttgaaaaatattacagtttctgatagaaaatttgttatcttttatcctgatatgctgaaatacaaggtggtgtcagattggaacaactgatactaggaagggctgggtcagtagtgatacactctatataggatttaatccatgaatttggctttgttgccgtaattgaattaaaatttaaaatttgataggccttttgggttgtagtagaactgtacaaagttgaataggtttatggagttaggtcttaatgacagggtttctaatagattcttccctttaataagtgctttccttttggctatgttgatatgacacataagtaatgtttgtcattgaaaatcgtaggtctgagataaactatgatagagacatggaatctttattgaggcttacctgatataattgtacagcttcattcacaaatcttatatttctatttataaagtgctctgaatgtaccgatcatattgtttttccagtatttttcctttgggttttttagtgtttttaagaatttggtcagctgttattatagttttaggttggttatcttattgacagcacagcccatcaatcacatctaagatactgagataataaaggtgcaaaaatcagataaaaagggggaaaaaatcagactattgtatgtaagtataagtcttgctgtcagccatttcctattttcaacaatgaactgtcaagagatcctgtcccataatggttagggtaaggatccttttaaattctatgagctttctctcagaaatacctcagaaaaaattcttttgaacaaaaatttgagggtttgagagatagctgagcagtcgggagcacttgctgctctttatagaagacaggattattcagttccagcacccacgtggcagttcacaactatagctccgttccagggcatctaacttactcttctggtctccttgggcaaacactcatgcacaaaaaacaaaataaaaataacctttaagaatataattattatatctgttgctcttttcagagttttgtttagtatatacaaagttttgctgtgctgcttacaagttaagcgtacaaaaaatatagttcagatatgtggtgttagttgcagtactaaatacttttgtgaggttttaacctaatgaggtgaattagaccatggagagcttttaggatcttttctggattggaaaagggtagagtggccttcttggcttcttagtgggtctctcagaaaaataaatagcttgccaggaggaaatgcgcttagctctccctgttaaaccatgcgattgccaagtttcaaaagaagcagttgaggaaaagataattctttccaaataggtaatagagtttcttcttactgataggttattttgtgctcctaagaggtggtagggcctttagcaattactaatatctgccagacaaatgtttctggtttcgttagtctatataataattggccaggaacacacttcaatgttctgtgtgtgaaatacattattgtctcaattagctttcatttaagatcatatgagttggtactggagaggtggcaatctgttcttgactttggttctgtttccagtgtctatagtggctcacaaccatctttaatttcacttcccggggatccaatgccctcctctgacctccataggtaccaggcgcacaggtggtgcacagacatacatgcatgcaaaaatagtcttttgcaagtccatataacttcagaaagatgtatgactgcactcagtacagtgtgatgaagatttaacagtaaacaacttaggggaattcacaatcgatggtgtgaacactgttatgtattttgtttgatctatagtaaaatatatttgtagatcaaactaatagatgtgatttaagattatcacctttaatagcatacttctagtatatttccaacaaattcagttaatgcttaaaactccaggaactgcttaattttgggatatgcttggatgctcttaaagtcctaatcaaaactttttcttaactgatctctgattattaaactatattagtgattgatcttctaggaaaatttctaagctgtgtatactttgtaaatccctgccattacctgggtttttctctttaatacccatctttctcttactagtttgataaatgcctgcttaattacccatcaatacctactaagaattcaaatgccactattatctcaaaagcatgatctgattatgattgttgagtactacataaaacacaagtaggattagaatagcatttccacccacttaattggagacacatatcccaaaatgagcataatccttccgtctttacctcccaaatgataaaattgagacatactgctgctttttgttatttaaatcctcaacctaaagtttgtattgaatataaagcagattttagtatatgaacttactgattattgctgcagagatgtcttttggtcatggaaacttgggaaatagacgtttaggaattttaaagggggaaaatgatttgaataacaagagcctaaagttaagaaaaggctgaaccttctgaagttgtaaaggcttactgattcacaaatgacatgtagaaaactagtttccttattcataaaatttgtcaaatggcaccttgatgtattatagttaactttacaattttctgaccatctttataagtaagataatttaaaagttgtttattggatattttgtttaggccaaccattactggaattttttgtgtttacataaaaatatatgtaaaatatatgtgtatatgcctacctgttaaagagaccagaggtcaacatcaatttactctcttctctctccatcttgatgcggttttcagccctattgcttaggttagatggactgaccagcaagttttagaaatatttttcttagcactagtgttaaccgctatgcctggatgtgaggagtggtaattcgtgtcctcctcatgcttgtgaagcaggcatttgatcaagctatttcctgattattccaaatgtcatttacattcaaaacattttaacacttgattcaaattttagattaaagatctaaaacgacattttagactgcttaacaaaatttatcatatagtctgaagatttatttacatgagctagggctattttatttggtatatatatgaagcagaagcagttttgttgtttaataaagaagtgaatcaaaaagccttagcaaggcttggcttcaaaatgggtggtttgcaaatggtcttttagaatatgttgtgtgcctgctgtccctttcaagtctttttcgcctctcaaaattcacattaaaaaagataatcctagccaggtgtggtggtgcactcctttaatcccagcactcgggaggcagaggcaggcgaatttttgagttcgagacaagcctagtctacaaagtgagttccaggacagccagcactatacagagaaaccctgtctcgaaaaaccaaaaaaaataatcctgttttagaattgaggaaacaatataggaaataataagtttagctaggttaggtagtttaaaaggttctaaactgataacatttgaagaaagcacatactcccaaccttacttttaaatggtttttgccatttgtattgcacaggtaatatttaagtatttgaaaattcagatccttattttatgggacaggaccagccatagggtttggtggtagtatacaaattttgttttttaccaccttgagtcttaagtacagtgagtatttagtagaggtaatggagtttgctattgttggcaataattaataaacatttgggttttcctgggattggcaagctttttctgtaagacttgataactttttcttgtttgagatagggtttttctattctgtatccctgactgtctgagactcactatatgaaccactctgtcctcaaactcagattcatttatagagatccacttgccattcctgggaattaaaggcattatcactatacccagcttgaaacctgatgcattttaaaaagttatttgcttaatactagatagttgattaatttaaaaacagcaaagtccagttttttttaaatacttgaaaagacctgtccaaaattcatgacttcttagggaaatacctttttgttgaaggttgtacacccaacgttctgcaaccagattcactaaaatacctttggcatagctggtatgtgtgaagtaacacctgaattctgtttttagacgtaggcttcaaaatatcttctttatatgcaattgttagaaaatgctgtatgttcatatgaaggctgagacatttcttgtgtcaaatattcctataaaataactcacttgtctaaggtaattaacatttttaactattatgattttcttttaaggttttttttcttttaaggctttagggtgagtgcatgtggaaagagatgcaccttgcctcccaaggccagaaaagggcattaggttccctgtatctggagttagaggtgtagttatgagctgcctagtgttgagtgctgggaactactaggccacttctctagccccttgtgtgtttcccctatacaatatcagtaaaactaatcaaaggctaaagtgtgtaaggtgaattttatcttattgaatacgttgaaagtagtatggaaagatgggcctagtcagtcatcactggaaagagaggcccattggtcatgcaaactttatatgccccagtacaggggaatgccagggccaaaaagtgggagtgggggggtggttatgggggacttttgggatagcattggaaatgtaaatgaggaaaatacctaataaaaaatataaaaatataagaaaggaaaaagaaagtatggcatatgctcatggcaaagtgcatgaaggatttaagattgtaggttgagggatcttttgctgtttagttactatataagcagctggctctatatttgagaagcagaatggcaaaggtgtatatcaggacaattcttgtctgttgaattgacttgttagcatagttaaatcttagttggccattcttgagcaattcttcttacagtatttaatggtccagtttacttcattggtaatagcattataaatctgttgcttgctgctttttagtcactttgagggtagtacccagtcttttcttaaatgtttagttatttcagagtacattcttggactttatcatcagagttatatgccaaccaatcctaatcttggggtgtcctccccaactaagattttcatatcctgataactcaactgggtgggatctacctacctgcctgtttcacccagatgctaaccagatttatttaattctgacttcatgctttatttttttacatcaaaaatctttttagcgttatccttactttccacatgagttcattgttgaattgatccattcatttatgaaccaggtcttgatgcagtcttgcttgctttcaacttccagtgatattcctactttaaccttactactgagatcacatgttttccaccacaaccaactattgcttaatattaaataagccaggcctggtggcacacatctttaatcccagaacttgggaggcagatgcaggaggatttctgagtttgaggccaacctggtctacagagtgagttccaggacagccagggctacaaaggaaaaaaaaaaaaaaaacaactagagtcattttagtggcatttaaaagctatatttaaaacctaatttttaattggggtcgcaactgtagtcacttttcaggatgctgaggtggaggattagttaaacacaggagaccaatctgggtaacacaggaaagaaaggcttttgttgttgcttttccaaagcacaatataagaacagttaccaccgtggggctggatggtacactcaatggttaagaacactgcttttgcaggagaattttttgtttcacagcatttacatggtagctcacaaacgcatgcctgtgtacaaacatatgtgcacataaatgatttcagtttactaaaagtttccaaaactgaatatttttctgtaccagttgagtggcagttttaaagatttcgaatagactgaaaaacagtttaaagaacacaaatccttgtctgaatggaactttgtcactttgcatgtaagcttttgaaactgaggtaataaacaacattgcttatggactttggtgggatactctgtattgtactcagcattaggatgggaaaagcatgtttcatgctgcattgcttagtatatgcttttttttaaattttttttgaatttatttattattatatatctaagtacactgtagctgtcttcagatgcaccagaagagggcgtcagatctcattacggatggttgtgagccaccatgtggtcgctgggatttgaactcaggaccttcggaagagcagtcggtgctcttaaccaccgagccatctctccagcctttttatacttttgataccacaacagtttaaaagtgcttctgaaattccttcatttcaaaggatattgttggtgactagagatgactctggtgttaagagcacttacacaaggcctagaatccattcccaggcctatatcagatgcctcacaacagcctataactgccattccagagaatctgttgccctctggcttctgtagaagccaaggtcaattcatgcagatacacatacatgcacagaaataaaatgagatttttttttcatactcttgaatggtcagttttgtgtttgggatgagaatatagctcatggtaagctgctaaagagcttgccttgggtatgtgaagcagttgtgggttctgtctccagggttacaagagaaaaagcagcagccttgttttcattccatctagtacagtctggcattatactatttgtatttgctgatatgtttgacatatcagccattctttcacataagcataaaaatctcaacagttaaagagaaataatagaactactagtattatgaaaaagagattaaaattattgtaccatcatgccttccataagtgttgactcataagccttatcacatttctaattacatcacatttcttatttcttagtccataggctattgctgtagcaagcctggttggtgcataccatacagccagcagaaacagcaagtgttattttcattcacagaggttggagaataagtttcacactaataaggctcacgtctgaacctctgtatcattgaactttgtgtcctttaaggggtggaatgcttgtgtgaaaaggattaggaaatgaggcttgctagtcttagagttaatcatatgttaaagaattctgagcgggtgtggtgacctcaaactcagaaatccacctgcctctgcctcccaagtgggggcaaggggatgaaaaactatatatggtcttgggtttaaagtgtttaacagtagggcatgtatagagtatccatacttgaaatctaggagtttttttattcatgtacatcatatcatatacaataagtcgtatctaaaatatacaaaatgaatattagtactgaattgagtacttaagctaaacagaaagtctctggatttctagaacactgagtagaatggcatacatgtatgcattctgtatagtgtgttgttctgtaatcataatagcttggttatgtgagaaataaaactgttaaggatacattttcagtatgaggtatgtttcaagttcatcatttacatggaggcttttaacacattccttccctagttggcagcttcagtcttctctctctctctctctctctctctctgtgtgtgtgtgtgtgtgtgtgtgtgtgtgtgtgtgtgtgtgtgtgtaattgtcttcagaaacaggatggtctcaagcccaaaacttacttcttaaataatgctttgcctcctaaaccaatagaatggagatttgctgtattgtgaatttccaggcaatggggaaaggtgtcagggatttaaaacattagatcagatcagcaagcactataggcattttttgccctttctggaaaatacattattaaaaactgctttggtgttactagcgttttcttgaatttgttactttattgaggaaagattaatatgttcagttcaatgaattgatgtgatacgttgatgataccagccaaggtgaatccttttttgtattttttacaatcaggaattaagtaaaacatgttatacatattattgggctacttggaaggaaagagggcaactagctaatattggaagattgagcccgaaccaggtagaattgatttggactggaaatgtaggtagttggtagattgcttggcgtggcttgtgtgaggcaaactacacactgctttctaattatgactgcattcagcctttttttggtttaatgactatttctatacttaggtatggtaaatatattgggggcagggcattaaaaggagatgacgcttactgatttggcccatagaggtaaatgtaaatgtaagtctaagataaactactttttatacaaagtattatatacttgttacatgcattgtatgtcatcaaatgattgggtacataaatgcatatgttggaaatgcatttgtatgaaattgtgaaaattgtatcttctacctagaaaagttgtcttccaaatttgagttttaagaataggtaaaaaatgaggaacgagggggctggagacatggcttagtggttaagagcactgactgctctctgctcttccagagggcctgagttcaattcccagcaaccacatggtggttcacaaccatctgtaatggggtctgattcactcttctggtgtgtctgaagacagctacagagtactcatattaataaaaaattaaacaaatcttttttttaaatgtggaacgagttagcagcgtaccttatttaggaaaattgaatataaaatgttaagagcatttagctcttaagtgacatggaaatgaaattagacttttgagaagaaaacagacaagggaacatttaagatggtctgaaaagtttatctaaagacttgttgatctagccttgcctaataagtttataaacttgaaagcatcctgttgatactgttttgttcagagatcacatttttgtatggtaaaaatttgtttgtttttaaagtttaagcttggcagttgtagtgcatgtctttaatcacagcacttgggaagctgaggcaggcggatttctgagttcgaggccagcctggtcttcagagtgagttccaggacagctagggctaaacagagaaaccttgtcttgaaaaaccaaaaagaaaagtttaaccatacaaacacaaatgcatgcccaggtgattgtctcagcatgtgtctgaacaaataaggcttagcatctttctatattccaagagctggatttaagattgcttgtttctttctcccccctggcatatattgtcctcattagtggttttcatgtccctttaaatgagattttaaaagtttgatatttaactgcatatcttttcataaattttaaattacataacctaccgttttctgtcttggtttaggaacttagtgatttggcccgtgaccctccagcacaatgttctgcaggtccagttggagatgacagtaagtagcttagtttctttttaaaaacttaacttcagaaggttgtatgtttttggaataatgaagtttttcttttgttctccctccgctttctagtgtttcattggcaagccacaattatgggacctgtaagtattcttttttttgttttgcttttcattgaaaatccagcattctctatcacaatttttttccctttggctttaatatatagttactgtgtttctgatgacatactaacactgctctgtaaagaaaatgaaatgttccttaaatggtgtatctctgattgtatcctggggtaggtaccatctctgcatccacaaaatcccttgttttgcctcggtctttcttctttatggcagtgaagagcagttattgagcttatctagaggaaaggattctactgtgggctgttcctcaaagcatcataactgccaaatatgaatctacaataatcgtgttcgtttggttaattttttttatagatgtagagatttatacaaaattttaatttatttagggagaactttatatcttgattataccaaaattcctttctatcttcggttgataaactgtgtgctagataaatattcaggattatgaataaccatctaagaatttcagagaattagactgatctaaaacatcttgagtaagttttttttttttttttaaaactttaaagggcattttaggatctcttaagtcacatgtatcttactaagttttggggtggggcaatagtgtaaatgtagagagtaggaaaaaatagtcattaggtatgtagtaataattctgaaagaaaatatttttggaagagtttgacctagtaagtagttagatgggttcaatcaacaaatacttcccagtcttaaattgactttttataaaactttttaggtgtagttatttattgtacatgagcacagagatcaggggatcacttggaaaagtcagctctctgcttaggtgtaggtcacagggattgaacttggtgtcagacttagtggcactttcccgaaaccccaccttattcatggagccatttcagacgccctggattgaccttttttgagacaacagatttgggtttgtcttaaattccttcctcagccttctggttacccatatttcaggattgaacattcacatcttagttagatttcttgattattaaaaaaatgactgggttatttggggtttgttttgttttagacagagttataatgctgtaatacagggtgttctcaaattttcagctcccctcccacctgaggaccctgaaaggtagaattaacaagcatgagtcaccttacgtgttttaataaccttactcattttctagctcaatgaaagtgagcaagcacctgctgtgtgatgaggataaaggtatgaataaaccaatctctgttagccttcaggaactttaatatgggaaggcaggtaattgacatatcagagtgtgagatactcatgtaataaaatacatagtaggagtaactcatgattctgacagcatttcacgagtaattgtgaaatgttgaaattaaaagtagactaaaaatcataggagcgggctggtattggtttatctttaaccacaaaggccacaggtctttgttttcagtcttttgatttaaaagtgcctttttgtttagtcagtgttgaatatattctttagagttaaagcattgacttgtttactgagactatttgacatttttaatttaatgctggggaaacttgcccctctgactagatgctcagacttaggaatgagacaacagctctgtctcctttttagtggcttatgtatctgtcacatactgtactgtgcccatttcattcatactttttcactgtagtgactaaactaataataaaaagaacttgtgctttgcgtaagcatgtctttgtgaaattgcagttgtaaactaaaacagtgggggaagtgataacatcacacaagttgcagattgtccgctacatctggataataaatgttttcctttggagtactaccttaggtcagattgtgtttggagattcctgggtttgttctttaaattttacttaaattttcagaaaaggggaacttgaattttattaaattatactcaaatacctctgaatcaattcaaaattcacacataaatgcttgaagttactatggggtatgctgtttttttaatttctaaagatagttggaaccacaaagaattggtaaagaagtgctggttatctgatttaaatgtgggaaagagggtcattgcattatattaacagtagtcccgttaatgcttcacgtcatcagaaataagttccctgtctctcatgtggttaattttctttaatttgaaaggtagttggcaagaaaagatttggaaataataacttccactttagtctgtggcatttcagtatttgtcagtatggacagaggataatcaactataaatgaaatctgaaataaaactatgtttaaaagagttattgatccaacttcacatttttatgtcatttcatactatcacagttaaaatagcaatggccaaaaagcagctagttcaagaaattttaaggtgtaggggtgtgtgtgtttggagatggaacttcactttaccatcttgccaaggctggcctagaaattacaaccttgtacctcaagctgccttcaaactcatagtaactctcttgcctcggccttcaaagtccttagatggaaggcataagaagccactaaatctgacattctttgagtcctttaggactgtgaatcaaatgaaaataaaagaatcatgtatgagacctctatttttgttttaggaagaatggggttgacatagaagtttgagatttgaatgcatctcatcaagtagacaagtatattttagtaggcttgaaaatgtgctcagaagtaaatagacacagtacagaagaaagtggaaactgtaaaatgtgaggggtcagattaaaagcagagaatagatctatagacactgtaatgggctgtatcttttggtcctttatttcatagaatggaaatagtgtatatttctcattttagtttttattaaaactcatagaaagtagtttcaaatctttatattagttagcatggttgaatatttatgtgcacattgtaatgaacaaaggagaaaaggacactagtaatttgaaattttgttttctagctgttgactttcaagagtatgatacattgtgttaagtttagaagaaaagttttcttggttttatgaaagaatttcaaggtgccaattgaaaagtaaactcagatatgttttgcctcttgaaggtgctttagttatttgaaataggtattcattctgtgggtgtgggtgtgggtgtgtgcatgtgatgacatgtgaataggacaacactgaagtcagttctcctgccaccttttacataggttttaaggactgagctcaggttaccaggcttgtatggaaatggcattttagccatctctttttttaaggaattatcttgacatattaagcctatttttctctttacagaatgacagcccatatcaaggtggtgtattctttttgacaattcattttcctacagactaccccttcaaaccacctaaggcaagtattattgtccttccaaaatctgttagtttatggattgttttagaagaataaaatgttcatgtaaatttaggtttctgaataattgaagcttaagccctgtattcatggtgaataaaaataagtaatacatagagaaatgagctgcatttatgtagataactcctgttaaagactattctggaacttttttcatctaagagctttcatcttccaagagctaagtttagcagtataccacatactttactcatgcctaacttctaagattagacaaaagattttaacactgtaatgtagaaaagatttgcctttttgaagttgcaaagctcaagtatttccatgcttaagctaagtattggagtctagtaagtaagctgtagagtcaacttgccttatgttctagttgcttttaatgcacttaggtgactatagtgttaaaggttaagttgctggatctataacaacacctttaatcctggtattctgtaggctaaagcagagtaatgagttcagagcgtatagtccttgattttttttttctctcagaactattagttcaaattcatggtatgtgaatgactagaaaataatgtgtattaaattatggtgtttttctaaccctctttagtcatgttaaaagtacagtgtagtaagaaagtcaagttcctttgggtataaagcttatactcagtttgttgtgtcagcagtgggaatagaatttgaatatatgcctgtatcctacattgagggtcctaagttccctttcacagattgcctgccttctgatagttaagctatactactagagttaaccttcaaagcgaagttaattactttttccgtgctgaggctgatgttaactttttaaaactagcttttattacctaaaattgattttgttgaaatttcccatatataaatatttccttatatggttatgcgtgctttgatcacattttcctgtctccttatattctctcattactatgatcactggtgagacttagtattttaagccttgctttttaaagtatacttattttcatttgcaaaagccatctaaaggttgtgtcatgtgatttgttttttttaggttgcatttacaacaagaatttatcatccaaatattaacagtaatggcagcatttgtcttgatattctaagatcacagtggtctcctgctttaactatttctaaaggtaaaatgataatttcaatataatagttttcagctactgtgactttattatgccaacattttaattaaaagttgcttgcgggctggtgagatggctcagggggtaagcacccgactgctcttccaaaggtccgaagttcaaatcccagcaaccacatggtggctcacaaccacctgtaacagagatctgatgccctcttctggtgcgtctgactacagctacagtgtacttacatataataaataaataaatcttttaaaaaaaaaaagttgcttgcaagattggggatgtatctcagtataacatgcttgcctagcatgcacaaagctcactgttcaatcttctcccactcaccccccaccccacccccagtgttctataaatcaggtgtggcacatgcctaaacaatggcacttttgggaataggggcgggaggatctgaagtcaagatcgtccttggttaatctgagtgagtctgaggctagactgagatcttttaaaaaggaaaaaaaagttagtgggtttgggtgttttgggttgatacttcatcagggaaaataaattttaaagggatttttgtctaaagttaaaaatatgttggtagggcattttcctagtgagtttttttttcacataatggcagtttatttttagtgtaatatatcagaagccagaggtatcttcctcttgtatacttttatttcacttggctaggttctgtcattaaactcctcttgtatacttttatttcacttggctaggttctgtcattaaaccagaagttcttagtaactctcagtgtctgcctgactttaccaccaatgctagggttcaagcacgcacagcttttcatgggcggcggggatttgaactcaggtctttttgtttagcctgagctcttacctactgaactattgcttcagcctccaaattaattttaataaacttattttggtgctaaactgtttgtgggtggtaatgtgcgcgtgaatgcagatgttttggagtccagaagagaatgctagatcaccaggagctgtagttaaaggacagttgtgagggggcaccaagagtgggagttgggaaactaaaactgtcctctatacaaatagtatgtgcctataactgttgggccatctttttggtgagaataggaaaatatagccaggcatggtttacagcatttacagctttctactctaataagcatctgtgtagattttctgtatctgattttgaacctgtctttagttgggtattacttaactatgataatcattctgtgtctaataaaatgtggaatacttagggaatttggggaaagattgttacgtaaagactgatcttgtactgttaagtctaacacattctagatctccaggtataccccagatggaaagttcctcctgtcctcttttggattctgaatgacaagtctttttttgacattctactctgcaaattcaattgtacgcaaaacattttaaggatgagattgccttttagtaatttataggcttgggtaattaatgtttttatattagtcatgtttttaatgctagtaattataatcttaggggtatttgtgttaactattattttcaggctcaatcctgaagtgtaacatttttaaaacttggaataattgttagctttttaccaaaatgttttatgagtttggtaaatacagagtgaaacaagtatgttctgtttacaggcacggcaccacaccacactacaccacacaggcatttctccgtatgcttgttaaaatgtttttgaatctttacatggatttggctgcattttccaattactcttttaagagcttacagtcttgggactaattttttaacctctttggatttttttttttttttaattctcttttcatatgcttcataatctaaatgccaggtttctgggtttttttgtttttttctcattccctgctggaatgtactttttgtttgtttgtttttcgagacagtgtttctctgtgtagccctggctgtcctggaactcactctgtagagcaggctggcctcaaactcagaagtcctctgcctcccaagtgctgggattaaaggcgtgtaccaccaatgcctggcatgatatactcttaattctgaattgtattttttacaaatgcagactgaattgatggggattttgttttgttcttaaaattaacttgatttttttgacagatttaaaagcttgcaagtcagatttagaaacactgacctgagttgttattatattctccaattttacttagtcccctcatttgaatttgacactgtgtttgcagctttgatagttactttgactttatgctgtttaacgatgtcatttgcacagtctctagggacagtggttttcacttctgattccaggaaataaagcagctcttgtagtttttgtgagaaacctttcctaaggtagaacaaagaatgagcctctgggttttcttgttttttctatttttccccccttacttggttttggtggggtttttttgccaagccttgactctattatactactaagagttttgtatctcctgaaagtaccaagaaaatccttaaattctgatgcctctcttacatagccccccccccctttttttaaagaaccaaactagtaggatgtcgtgtgacgaccaccttgcatgtggcctaatcattactgactttggtgccatcagagctttcatttctaatactgttaattatagaaacttattttctgtagaactctgtggagatattatagaataataaaattatgatgaggtctagagtacatttttaaattttatcatttgcttgtccagacacctgaaattggatttttttccttttagttcttttatccatttgttcactgctatgtgatccaaacccagacgaccccctagtgccagagattgcacggatctataaaacagacagagataagtaagtatgcaattgtttaatgaatgactataaacagttttatttagtgagttgagcttatttctgctgaaatttgtgacagtacctttttatgtttgtttctcataagctagttactaaaacataattaaaagcagtaaggaccagcataatggcttaggctgcagcattagaagtttgaaggtagtctaggctgcctagtgagaccctgccaaataaatatatgctcatagcatacatgacagtgagtagctcccttgagatgtttgttttctaatgtgttaaagccttgcttaattattcagtttggggaaataaacctgagtttgttttccaaacataaagaaaaaagactagtgtaaaatttttggtctagagctggagagatgattcagcggttaagggcactggctgctcttccagaggtccttcgttcaattcccagtaaccccatgctagcttacaaccatctgtaatgggatctgatgccttcttctagtgaatctgaagacagctacagtgcactacatatatatatatatatactttatatatatataaaataaacctttaaattttggtctaaatttatcaactatttgatttatctttatgttcagcttaaccatttaactttcatatgttataattaatgctaagtgtgcttattcaattaggtacaataggttagcaagagagtggacagagaaatacgctatgttgtagggtaagaggatctgtactctatggtgcgcttatttatggtactgccagcagttgagtgctgcatgctttaaagcactgtattaactaaccaaagataacagatatggcagttttctgaaaactacttaactgcttgatctctgttttttgaaagttatactctgtcttcactactgcttgggattcttgcatggcaaagcagttatatagctttagtaagaagaagtgtaagagtatctttatccttcattaagttaccatgatgttgaaatgtaaacattttgtgtcagtactatatggaatgtggtggttttactcgggggtttttaccaggaagatagtaatagaaatataaagggaagcacttaaacctcacaaacttaaatgttcattactgactgacaagcatgcattaatgctagctatattttgtggctctttttatgctaaaccaaaacacgtttgttttaaaatgctggctgtttgaagagggttttctaaatgccgtaattctgaattggtagagagttttttatatgttgagctgtttcaaatagttgaagtccattacttggtttgagatgaaacttagtggtattatttcttctaaaggttttcccctgttctttattatgtactcatttcttaaggtattgtcactttttttggttggggtaagttagcctgtatgatagcgcactataatgaagtgggggggatggaatggtgtttgtcagtactgggtcttcctcagtagtcacctgggtcgcggatgagttatctattgatcttttttaacaaaaatggggtgtgctcctagagacttcctattttcagcaggtctcagtgaggattagcagcaatcactgctactaaactttcatttaaaaattaatgcttttttatcattctttctaatgtattctgcctaggtttcaaaggcattttttctcaatacccaacaaacttctcaatctctaggtttcagattgaatttttcagttgcatagttctagccttcattggccagaatttctaattttctatgcatatacatactattctgacaatcattaaactgtacagtagggttttttaaatgtaaaaatgtgtcagcatggtataaccaacttgaaagcttgttagaatactaccttagtgatgatggagagaggtctttgttaagcctcccaatctgggcaccacttgtgtttattaagataacacgtccatggctctcattgcccccattgctttgaatgccaatgttgctatttctgtctcttgttgacttttattctaaccatagacattacaggtgatgtaagatgaatccacaggtaaaatagaaatattttccttgcctttataatattagtaattctttaattttattttttaaatagcttatttgtttgtttacaggtacaacagaatatctcgggaatggactcagaagtatgccatgtgatgctaccttacagtcagaataacctgcattatagctggaataaactttaaattactgttccttttttgattttcttatccggctgctcccctatcagacctcatcttttttaattttattttttgtttacctccctccattcattcacatgctcatctgagaagacttaagttcttccagctttggacaataactgcttttagaaactgtaaagtagttacacgagaacagttgcccaagattcagaaatttttttaaaaactggagcatgtgtattatgtggccaatgtcttcactctaacttggttatgagactaaaccaatcctcactgctctaacatgctgaagaagccatctgagggggagggagatggatgctcagctgtcacatcaaaggaagcagcattattctagcagcatccgttcttgtttaaaccttccactgttagaggtttgaggttacatgatatactttatgctcataactgatgtggctggagaattggtattgaattatagcatcagcagaacagaaaatgtgatgtattttatgcatgtcaataaaggaatgacctgttcttgttctacagagaatggaaattggaagtcaaacaccctttgtattccaaaatagggtctcaaaacattttgtaattttcatttaaattgttaggaggcttggagctattagttaatctatcttccaatactgtttaatatagcactgaataaatgatgcgagttgtcaatggatgagtgatcaactaatagctctcctagtaattgatttatttttcttcaataaagttgcataaaccaatgagttagctgcctggattaatcagtatgggaaacaatcctttgtaaatgcaaagctgtttttgtatatactgttgggatttgcttcattgtttgacatcaaatgatgatgtaaagttcaaaagagtgaatatattgccatgttcagttaaaatgcacagtctgttacaggttgacacattgcttgacctgatttatgcagaattaataagctattcaaatagtgtagctttaatacgctgcacatgattctggcagccctagagttcataaatggacttgggactcagcagttttgaaacgtgtatatggagtttaagaaatttattttccaggtgcatccccttctaactaaaattttcttcatcttgtacacttaacagctgaaaaagatatatatatatataaaacttgggagtaataatgggtcaaaatttacaaaataaagtactgttttggtgtgggagttgtcatgaggctgtgttgaagtgacttaactgtgggatattgactatccattgagatggatttgttcagccatttacattaatgagcatttaaatgcaacagatcatttcgggtgacttaacatgaatgaataaaaaagtcaatgctattggattgtttgacaagtgctatctgtgccactaaatcttatgtagtaataagggcattaccatttttcacccaagttctgaacctgtagtttgacacctttttctagctttgatttctccattgctttcttagtcttgtatttgatttctagcacatgtgatgttcacttccatattttgcactgcttatatttacgtgcaatcttattccttgtccgcacacagatgtggaaagctagaaataaatgtaaaagcttaattttttataaacatttaaatatgtaatttggacatgatttgttacttaaggttctttaaactggaagtgaagtgcatgccttctgaagatgttctggctttattctgtaataagtatttacattggaaaataccaatttcgctatacagttttttttccacacacccattttaccttttgcttaaattgtgggttcttcagggttaatgtcacgctaattaataaaacttttgggttcaaatcaagtgttcccacaagggtaagaacagtattctttgactcttaaaaagtcctttctgagacctgtactcaaaacagctttattaggcctgtgtcgtgaaagccagatatgacaaacatttttacaaagcagtggatctctagttggctttcaaattcctcccatctaccacctttggtatttacagagatgacgtccttaaaccattgtcagaattaatgggtatgtccagttctctttatctttgacttgatgctttatacaacatttcatatgtcgcttctaagggaataagccatagaggcttctccaggtttaagagaacagagtacctggaaaaccaacattctgaatgtatagacactggactggacttgaggtcacctatgatgaggtttttaaaagaatctaagaatttgctctctacccttcccagtagtgtgtggcatcactagtgctgggtataggactaaagtgagtattaggttgaatattgttgtagagtatttgtgtgtcctatacctcttaatgcataaattcctaaatttaaacatgtctttagagtccagttggcctgtcaatggtgaatttccttttgattttttcttgggcaggtttgcaatgtgataatcagatttttttttaactgattatagattgtttccttgtgtgggtgtactcacatttaaaagtatgaaccacggttaactagtggtctcaggggtagtgaaacactcactttttatttactgggttagttgaagtattcttaagacactgatcatgctgtgttcgtgatttggggggtgggtaatactaaaattagtcatgttttgtgttcacataacaaaactgttcaatgactgttggttacacttttaagtgaatttgtcttctattttatgaggaacccaatgcaagtcactaaatgtcttaatagtgacatctgcataagacttgtaatagctaaagttaattgagcttaaaggaattgttaccattaaagtctgtgtttaaacacactttggtcttactcagtaattccagctaccatgaagtctgcacttgaatttaataccgtatgtgaatatagcattgaagcaggtgtcataaactggtgtaaggagaattaagtatggtggttttcaaagttactcagagccatggtcatttttgatcatttagaacacaagccagtgggtcctgctccaactgtctgattgaaaaactgaaatgtggagcctagtagcttgtaaagaccaacaaatgattgaaaagtttgtgactggctatatatacttggaactgtagaggttctcacagtataagttgaggtttgaagaatgctagtgttctgagttaattgtaaagcacatagtaaaatagtttgcccagtatagtgagaaaaatcagtggtaaaatttggaaatggcttttggcagcagcaaatgttctaaagtgcagtgtttcttagacaaggaaaatgggagtctggccaccatatgtcctgtttcttgctacttggactttagctttgtttttaagggcattctttgattctcagacaccgtttctgccagttttttattcaatttttttgttctaatttataatttaccacaatcagattggactgtgtcacataaaaacaagtacattctatgcccttgctgctttggctgttcacttgggttcctgttgtcatatacctggctgtctaaattctctggagtcaaaactgcctcttaggcctcaaatgtaagtactcgttgcactgatccaaaaacagccatcttgacttcctttctaatcaattattattctaagttctgccataaaccattctaacaatgtgatataaagtgctatttcaaaattttgaattgtagtctcacatgcatagttttgactaatggtgtgccatgccatggtttttgttgatttgagacagcctggagttcacttaatgtagaccaggctgacctcaaactctgtgacatacctgccccttcctatgcttaaaggtatacaccaccatgctcattctagtcgtggttcttcagtagcatctgtagtatcacataaattttaacgtgtatctctctgtcccacctccatcactattctggttgagttcaccttggtcctgcagacacatagttggcttcctctatgtgtagacagatggtagttttacaccacatgctatgtggcttttttcccttatggtatatctctaatgtcagagtggcatttcttgagcattttatcaactacggaatgcattggggttactgccctgtgtgtaatgcatacttaatgttggttagggtccattctggaatgtaaactccgtgagggcaggttttgtctacctttgtattgagtgctttggatatttttaggtagttttatacacagatgacagtttatggttacaatcttttaatttctacaatagggcttattctcatcccccgttttttattctgagtatgtatgtgtacaaagcaaacataacttcattttaactgttcttttgcatgagtcttgcttgggtattgttacaagatgtaaagcatcttcggtgttttcttagcgttaaggtttttaatttcaggtcattggcagtgagatgatatccataaatacaagataaacaatagcataagtctatttaggttcatttcacaacttttgggaaagtttgccctaatctcaagccgaatttcctcagcagtttttaaagcagttggcaagtgaagccaatttttaagagaaacagcacaggctgaattgatgattacctgctgagtcgtggtaggaaagttcccgcccgggttcctgtggtgctgtctgagaaagaagtggtctagagtaacctgtaagagtagaaaactgaacagtagaccaaagtttataaagcaactacttgctggttgtgtggactgctgtatgcagtgcatgttgcacagaaccagtgtgaggtacaaagtgactcactcaggagggcactctgccaaaaacacccaggtttcttgcaggcttggctctggactgcttgcttttggttgctgtgtttttgtaaaagtttacgattgatcttgtttgtagcccccatacttacttgggggattctgactcagtttgagtctcagctctagagtactgtaaatgaaatcacagcatagactactttttattagtagtacaaataattacaaacttgacaattttgtaaaacattttgagactgtcatctgaaagaaatgactccgttgtgtacacttgtaaatcttagcagttgggaggcagaggtgggaccgtcacaaatttgaagccagctttgtttacatagcaagatccctcggggctctaggagcattctggagcccacacaaaatttaaaacaaagatcaagcaaccatgatgatcgctctcaagcaccaactttgaggacttctggcttcagtgactacttgtccaagtacggcatttacacatccacataagaaattctaatttgaaatgggaagatgttaaactttctaactgacatgagaactttgaagagaattcacataccacctagttaatgttataggatacaaaaagtgtaacaagtgaaacgttaggaattacaatgacttcaaaaaatatttgagaataagttatcaaaggtgtgcaaaagttgcacactgaaaatgaaaatttatgctttaaaggtggaactcttgtgtttgtgtattaaatttatagtgttgaggtaatatgcttaaagcaatttagactcagtattatttctgtcaaaggcagaagattcaaacttgagttttcacgactcagcagaagctactacactaaccaaaatggtttattggagggaaaaagcataggtcttgaaatagaaatgaggaaccatgcatttctggtcaatccacattatatagcaaaactgtgcacatttggatctaagatccaaaaacataaaggatttgtaaaaaaaagaaaagaaaagaaaagtacagatagccagcagtcatgaaaagactgaacattatcagtgaagtggcaataaaatcacaatgaggtattactttgtactgattagggtagttgtggggttggaaagcctcaccagttaagaactcttgactgctcttggaggggaagcaggtttgattccctgcaccacacaacaggctatataactagtcccaagagatctcatgccttctggaatcaaaccctaattctatgtggcacacaaacaggcaggaaaacattcacacacaattttttgtttttcaagacaaggtatctctctgtagtagacctggctgtcctggaactcactctgtagaccaggctggacttgaactcagaaatctgcttgcctctgcctcccaagtgctgggattaaggcatgcaccaccactgcccaacaacatttatttatttatttatttatttatttatttatttatttatttatttttatagtagagaatagtgctgcagatttggagaccaaaaacttgggcttttctcataggaacttaacaggttcgatgcctgtgaaaggggtttggtgatttctcaataacaggcccaggatacagcttaagttgcacagctcttgcctcatattaggaatctctagatacgtatacaagggtaatgaaacaagcatttaagtccataggaattaatgttcatatgtgcatttgtcataacttgaaagacagaaacatgaacaaatttgagttttatatttttaataatttcttagttatacatactagaatgtgtgtaaaatttaaaatcattaagaaaactaaacataaagacaccatattatatgaacaatcagaatagttaaatctacaaaaattgcatgctgatgtgtgctcagcaccaagaaagagcgggaagtgattgcctactgagaacaggagtctcctttgtgcataatgaaaatgtcctaagtaatggctatggaacattttgaatacactaaaatataacctgtataatcttaagtggttacgtgtatatcaatctcacttttaaaatgtatcagcgcaaaggatagataaacaatattattttagtttccaggttctgttatgaattctttacatatgacatctgaaaacttcattttaaaaatattttaatttttgtgtatgaatatttgcatatcaggtatatgttccacacatgtgcctgatgtcagaaaagagcatcagctctcccttggaactggaaataggatgactgtgagcccaccacatgggtgcttagagctgagcccaggtcttctgtgagagcaacaaatgctcttaaccactgagccatctctccagccctgtaagtcaacttaaaatctagtcacttgtccgatgattatgatatgattgtatcactgaccctatattttgaaagtaaacgcttgagaaaaaagaggctaatactcattgaatggcagaaattaagatataaacagagatattcatcttctataatcttaccacctaaccattatgatatgtatgaagaacttaaactataaccagagggctagggagatcagtcaagtgtttgccatctgagttcaattcccagcacacatgtaaggggctggaacacgcttgtaatctcagtgctagggaactggagactgttgagtgggtccctggaacttgctaaccataagtcagcaagtcccaaggtccctttcttaataaagaagtggctcctgagagtgaacaccacctaaggctgtcttttggcctgctgacacgcatgcatgtgtgcatttgcatacacgtgcctctacacacatgcacagtcatcgacattctcaagacaaatatagaaataatgagcaaaatgcaagtataatgctaataaaaactacaaactaaaaactacaggttaaaactaactaccggttaaaaaattgaataattagtcttagaaaataagtttaatggcctgttaagcatagttcactaaggcatgagaatgtcaatatataaagaaggaattctgactatagtacaagaaatgaagaaaagcgttaaggaacgtgaagatataaataatggttcttccacctttttattttgagacaggatctctctatgtggccttggctatcctgaaactcactatgtagatcaggctagcccttgaactcagagagtgctggcttgagttcagtttcctgcctgcagccaacaatatcttccaagatattttatttacatagtccaatataattaggagtaccaaattcctttaagagcttgtttgttaaagttggtgtgtaaggttagacttcctcaaagaatataggagggctggagagatggctcagcgtttaagagcacagactgctcttccagatgtcctgagttcaattcccagcaaccacatagtgactcacaaccatctgtaatgggatctgacgccctctttgggtgagtctgaaaagagctacagtgtgttcacatacataaatatatatattggaaaaagactgcaggaacaggattctctagaaatttctggtgtggggctgagagttggctgggggaagtctgaagccagcaaaagtctatgtaggaacccttgtagccctggctgtagataccctttctgtaccgctttgacaagtttttgcatggcctacacagagctgcttgttgcctgggcacccaaagttctaaagctatctgtgagcatcaatgtaatacatgcatactgactgtgcccaaaggatctacaggctctgctccctctgcaagcttctgtgcaggcttaatgagccccttggactcctgcagcaggcctacattgccagttgtgatcaactgctcccctgcttctaatctaccaggggctctgtccctggtataggaactccagacttgtcccgagacctacctggctaaatgcatagttttgtttttgtttgttttgttttgtttgctacctaacagactagactcagcaccactgaaggaatctgagtctccattttcaagtttgcacacttagatacttggatactcttctgcagcctgaggacacatgcaatttccttttattaccacatattagttaatttttacattatactccaaatgtaacccactgtgtgattctttactgattggacttagactcttaaaaaatgtgggaatgaagcaaaaagacttttgaaattttagagaaaagggcacattttttattttttaaatagaatttacataaaatacagattaagtaaatccacctgaagctcaaagagaaaggggaaattttcaacaccttgagacattgtgatgaatagcagagaaaaaatgtaaagcaagtagacaaaaactagtaaattatctagaaaaaaagacagggacattcatttgtggggcacgtggagtgtgccacaagaggaattgtcatggaaatagtgaaatggggcatgttcaaaccccagaaatctcaaaacttaagaatggcaggagagaaccagctccctcgctgtttctgcacctgcctttgggtgagcacataccccagagaaccccaaccaggtggtcacaagcagtcatgcagcacagcacctggaattcttccctttgcaaatgagacatctcaggagccttagccttcagcccgtgaccttttccttccccgaactatgtccatgctcttccccaaaactatagaactcttggtgcaccctgaaaaacagtgtatgtgttcaaacccacccccaataaaaaataaaaacaagctaagattgtctcagagagctgcttcattaaggatggtcagagcagaccttcgactaaaaggactttaacactaagatccttggagaagcaccccacccccactccccgaccccaacacacacaggcatacttgctcccaactggacctggatcctgcttgtcccggactctgcttcactctcactggcctggtgtacagcggcatcacactccccagagggaagaggtggactgtggaccccacccattcaggacttcaacctgtcctcttggagcgaacgaattggcctctggacatcctgagaagagaggcgttccctggaaccatgttcacttaagagcaaaagcaacagatttggggaaataacttagtgaagtaaaggcactacaagtacgcaaatcctaaatgaagtagaactttgtgtaatcaaagtgaattgagggctggagagacgggtcagcagttaaaactcggctcttccagaggacacaggttccgtccccagcacccacaagccagctaacaaccctctgtaacttcagtttcagggtattctggcttctgaactcagaggataatccatgcatgtggacgtacagatgtgggcaaaatactcgtgtgtgtgtgtgtgtgtgtgtgtgtgtgtgtgtgtgtgtgtgtgtgtgtgtgtgtgtgtgtgtgtgtgtgtgtgtgtgtgtgtgtgtgtgtgtgtgtaacactagaaaaagaacacaaatggctgaggctgatgtgccactgtgcctctgcccctcaccaataataaagctagaaatatgaaatactgtaaagaatagaaagtgagaaattcaacactaactatgaagcaatattttctgggattaaataaattaaaaaaaaaccttatcatgcagctccatgcctttcatttttaaaaatgctaggactgaacaaaaaggtatgaactgaggagaggcataagatagcaattagagagttttaagaccatttgggagtgggcaaaagtgataatttctacaatccagtaaggtaggtaggcatgttccaatgcaccattgtggaaacaaccagat

SEQ ID NO: 244 - DNA, 1479 bp, Mus musculus
atcttgtggctgtgccgtgcgcgtgagccccgtagggccggggaggcaccagctgccgcgcggggaggaggccgaggccgcagcgcctgtgtctggcagagccggtgtgagaagaagagacaacccttccccgccgccgggataatcaagaattttggccggacctttgagtacacctcgggatagtgaggagcccggcgaaaagcacagactatggcgctgaaacggattaataaggaacttagtgatttggcccgtgaccctccagcacaatgttctgcaggtccagttggagatgacatgtttcattggcaagccacaattatgggacctaatgacagcccatatcaaggtggtgtattctttttgacaattcattttcctacagactaccccttcaaaccacctaaggcaagttgcatttacaacaagaatttatcatccaaatattaacagtaatggcagcatttgtcttgatattctaagatcacagtggtctcctgctttaactatttctaaagttcttttatccatttgttcactgctatgtgatccaaacccagacgaccccctagtgccagagattgcacggatctataaaacagacagagataagtacaacagaatatctcgggaatggactcagaagtatgccatgtgatgctaccttacagtcagaataacctgcattatagctggaataaactttaaattactgttccttttttgattttcttatccggctgctcccctatcagacctcatcttttttaattttattttttgtttacctccctccattcattcacatgctcatctgagaagacttaagttcttccagctttggacaataactgcttttagaaactgtaaagtagttacacgagaacagttgcccaagattcagaaatttttttaaaaactggagcatgtgtattatgtggccaatgtcttcactctaacttggttatgagactaaaccaatcctcactgctctaacatgctgaagaagccatctgagggggagggagatggatgctcagctgtcacatcaaaggaagcagcattattctagcagcatccgttcttgtttaaaccttccactgttagaggtttgaggttacatgatatactttatgctcataactgatgtggctggagaattggtattgaattatagcatcagcagaacagaaaatgtgatgtattttatgcatgtcaataaaggaatgacctgttcttgttctacagagaatggaaattggaagtcaaacaccctttgtattccaaaatagggtctcaaaacattttgtaattttcatttaaattgttaggaggcttggagctattagttaatctatcttccaatactgtttaatatagcactgaataaatgatgcgagttgtcaatggatgagtgatcaactaatagctctcctagtaattgatttatttttcttcaataaagttgcataaacc

SEQ ID NO: 245 - protein, 87 aa, Mus musculus
GARRKAQTMALKRINKELSDLARDPPAQCSAGPVGDDMFHWQATIMGPNDSPYQGGVFFLTIHFPTDYPFKPPKASCIYNKNLSSKY

SEQ ID NO: 246 - DNA, 50502 bp, Homo sapiens
ataaagtggtaaaaaacacttgggaaagtttggcagtttcttaaaaagttaaacacatatctaccatataatctagctattccactcctaagctacttactcaagagaaatgaaaacatatgtccatataaacactgtaaagaatgttcatagtagccctatttgtaataagacaaaaattggaagaggctaggcggagtgcctcactcttataatcccagcactttgggaggctgagctgagtggatcacctgaggtcaggagttcgagaccagcctggccaacatggtgaaaccccgtctctactaaaaaataaaaaaattagccggcgtggtggcgagtgcctatagtcccagctactcaggaggctgagacaggagaatcatttgaacccaggaggcagaggttacagtaagccaagattgcgccactgcactccagcctgggtgacagagtgagactcagtcacaaaaaaaaaaaaaaaaaaaaaaatggaaacaaaccaaatgtccactgactggtgaatggataaattgtggcaaatacatacaatggaatattatttagcaataaaagataatgaactactgagagacaacaatataggtaagtctcaaaataattatgctaagtgaaaaaaggcagacaagaagttgtattgtgattcaacttcaatacagctctagaaaatgcaaactaatttaccgtgacagaaaatagatcagaggtgtcctgtgggttaagaagacagaggggtgggggaagaacaagagaaaggatttataaaagagcataaggaaacttgtggtgaagttcattatcttgattttggtgagcttcatgggtatatatatatgttagcttatcaaactgtttatttaggtatgtataatttattgtatgtcaattatatttcaataaagctgttaaaaacataacaatgtagctgtggtctaactggtagagatgaggaagaggtaactgctttatgctagacaacatagttcctttctttcagggttaaactgaaatagtttctttgggcagccaaaaagcacatatctctggcttacagagatgtcaggcaactgaaattctcatgtttttattacatgtctgctggtaagccactcctctgagtgcctgtctttatatgtttatctctaatatacttcatattatagtcatcctccagtatccatgagggattgtttccagaaccactctcagataccaaaatccaaggatgcttaaatccatgatataaaatgccataatatttgcatataacttatacacatcctccttagattgcttataatacttagtacaatgtaaacactgtaaatatactgtattgtctagggaacagtaacaagaaaaaagtatgtatgttcagaaaatatgcaattaaaaatgtgtattttggatccgtggttggttgaatccatggatgtggaactcacagatctggagggctgattgtatttgcttcacatgttactattactcataatgaggcttcttcattataatttaaaatattttatattcattagactggtggttctgtagactgtgataagtgaacactaaggatacccacagagccatcagggtatcctgagagagtggggattggagatggatggaaaaggggaaagaatctgtgtgggcaagttcaaaaattagctgggcctagtggcatatgcctgtagtcccagctactcaggaggctgaggtgggaggactccttgagccctggaggcagaggcttcagtgagccaagatggtgccactgcactccaacttgggtaacagagagaccctgtctcaaaacaaacaaaagacaaaaaaaaaaaaagttgaatcttttttttttttccagacagggtctcactctgtcatccaggctggagggcagtggcctgatcacagctcactgcagccttgacctcctgggcccaagtaatcctcccacctcagcctccctagtatgtgggactactggtgcataccaccacgccatgctgattttttattttctgtacagacagggttttgccatgttgcccaagatggtctctaactcctgggtttaagcaatccaccctgccttgacctcccaaagtgctgggattacagctatgtaccaccacacccggccctcaatcttgtgactttttctattgggtctaatttgttaggcagggattgggggctgaagtggtggtaggagggaaaccaggatcaaatgagagttttttaatcctttacccatggtttccctgctagctgcctgcttataatcatatataaacactaaagtcatacttgcagaaataaaaacccttatgaaaacttaacagagtgtgtatctgttttaggaacaaaagtataagaaaagttgaatcttgtgaaactgctcttctctgtagaaaagggggaaaaagaaagcttactggtttctgttaggaagcaattgataatggcagtggagaggaatgtaaattaatggatctggcactaaaaaagaaaagtatcccagcactaacccaaaacatacagtgacattcaagaagtctgaatgtacagatttcttaaccaccattctccaacttttcaaagctttcaaccaaccactcaacatgatttaccctcagtcaattcttcctattcggcttcagtacttgccctgagccacgggaattctggcgggcagaggggtaggtcggtcctcctgttatcaatttggaattctatggagcattttctcataggtgtaatatatacagggagggtgggttttaaagccttttgtggattgatctgcaggcacaactacttttctataagaaattatgtcctgagatccagaatgagaatgaatcttaaaatgcttctaacatctttaaagcccttttacttccatttcagaatcaggtttattaatttatctgttctacctgcctagcatttcttgactcaaaagtcacaaggtcaaactcaacaaattccactttaggtatgtgacaaaaggattgttataatctctatctacatcaaactaaattctttgaattctctacatgaacttttttccattttgtgattttagtaatctataattactgtaagcacagtctcagtcaccttgatacccacttatactaagtactgccatgtgattttagaacctctgttttatttaggtttatgatcttgttggcaacacataatagtattttgtctgaggcagatggaacagaaatagataatgaattctttttcctggccacttgaaagccaaatgatatcagtcaaagaatgaacaaaagtctcccaaaggttctagtaaagtggtaagagaactgagacatggatcacagcagttagtacagacatggccaaatttaaaagaaatgaaattgtggcagttagtcctacatttgagtttcaagaggagatttgatttgcaaaaaaaaaaaacatgtagcacatgtttccaatgttatgtaaactttagtttcgtagttctttaagagctaaaaacataggaagttcatactattgtttcaagttattttattagaatatcatattttgtttttctataaacatttttttttttttttgagagacagggtctcactctgtcacctaggctagagtgcactgctgcaacatggctcactgcaaccttgaccttctgggctcaagggatcctcccacctcagcttccagagcagctgggaccacaggcacatgccactatgcctaatttttttgtagagacacagtttcatcatgttgcacaggctgatctcaaactcttggactcaagcaatcctcctgctttggcctcccaaagtgctggaattacaggcataagccactgtgcctggcttgattttattgtaacattctaataaaggtaactggagggagaattccccccgcccccaaatattttttaggcaagcttgacccagtaaataaactaagtttacttcctgtactctctcttattagtgcaactatttcagatctttctcccatttcttcaggattatttcattaacatcctgtttttcttgcctctagtctccatcccaatacatactttgggcacatgcttcaacattgctatcacagttacctttttgccatcaaatctgatcaggccatttttgttaaaaattcaatttctccattctatcccatccccttcaaaataaaaggccctcaagatctccagtcatgtctttcaaatctatcttgtctcctcatcttttctgtcttctcattctctccttgccgctccccccgccacctcaacctcgcaatactgcagccaaagtttttctagttttaaaaacttatcaagtcatctctgagactttgcatgctgtttcctcttcctaggagcctccctcacaatttttttccaactttgccttgctccctttttttcatttgttttaatacaactctcttcctcagagaaactttccctgaccaccgccagctgagttcagtacattaatagtgctctgtgcacacatttatgtcactgaacccactctatgatgttgtctgatgcttactggtctcctcaagagactttcttatagatgacatctgtgtcttttatgtatcttcagtgtctagcacctaatagtaattcgatgttttttaaataaatagaaaactaggagtgactctatcaacagatctctactacattaacattctttgtcctaaacctgaaagactcccacttgcctattcagacctaagtatcactgattgacaaaccgaatgaaagtctctttatcgtgcctcaccctacaccaaaagcagtattacaaatatatatttttttaacctgtgtttgtaagtaaaccagctttttggaagacagaatgcactattgtggtcatttcacataaacagaatcaaacagtatgtggccttttgtgtctggctctttcacttgacagaatgttttaaggcttcaagatacattttgtaacatgtattagtactttgttccttataataataataatattccattatacacatatatcacatcttctttatccattcatcagctgatggacatttgagttgtttctactaaaaagtagaatagccctactctgaacatttgtgtatatatatgtttttgtgtggaaaaatgctctatttttatctcaaagatttgtgcatgcttcattacatgccaaaagccttattaaggccaaaatgacatcttagcatgaaataaagtacactttcttaaaccatattaatttgacttaatgagattctgaattgttaagtatagaaatcaatttgatttttgtgcaaacaatgtaaaataacatttggttgacctgggctccaaattacttggtccaggcagaatatgtaaatgagcattctgaatataaaatctggaccgtagcatttacaatttaattaaactaataaaatggtatacactgtactagagccagtgtctttggcaagttataatattctgtaacaaaattaaagatacatgaaaacatagatacaatattaagtacatatatataaaatctgttaattatgtttattcatcaatacattctaattaaccccttactctcaagttattataataacgtggcctcactgaaaaattcatgtaataagaccctggcacaccaccattattcagattggtagattaattgcccatttactagtaattttctctgagacagggtcttgctccatcacaggcttgagtatagtggcacaatcacagctcactgcagcctcaacctcccaggctgaggcaatcctcccacctcagcctcccaagtagctgggaccataggcgtgtaccaccatgctcagctaattgttttattatttttgtagagactgggtcaccctatgttatccaggctggtctcaaactcctgggctcaagtgatcgttccaccttggcctcacaaagtgctgggattacaggcgtaagccaccagcccagctttaattttcttgatcctttctattttctcatgttttatgtcaattcatgcaagataatctgatctactatatttacaaagtttttaggacttcaaaatagtatttattaaggaagggattatttttagttaattaaattttcaacatttttgtacctttattaatttctaaatgtaaatttttctttcagtatttacagccataatttttttcttgttagcattatttccgactgcaatataaaaaacatgattattttcctttcttgtttcaaatgaggacatctctaccattgtaattcaagtaagttaaatgaatgaaaatgttttaactttatttgcaactgtaaagtgggctctctgtaacaacaggtacatgaataatgttttaaaatttaacttaatcttagcctgctttatcctaaggcatcaaaatgcttctaggctatgtttcttttgattttaaccatggcaaaatataagcagaaacgtaagtccacttatgcaaatacaaacttgtaaacagaaagcccaatcaaccaatgaatttacttcactgcctaacaataatgagtttgtgattacacaatcacttgcctttataagcatggataatctagaactccatatatattagttttgttttttgttcttgtttttttttgagacagggtctcactctgtcgcagtgatcttggcccaccgcaacctccgccttccaggctcaagcgattctccggcctcagcctcccaagcagctgggattacaggcgcccgccactacgcccagctaattttttgtatttttagtagagatggggtttcactgttttggccaggctggtctcgaactcctgatctcatatgatccacccgtctcagcctcccaaagtgctgggattacaggcgtggccactattactactatacatttgtttcacactatggccagttaatgtctgactggttactttaataactgacatttatacagcactgtagagtctccagtgtcctttcacatatattatgacactttaaccacacaatcaccctgtgagaaaggacagtcattattacttactttagcggtgaagaaacggggttagaagataactaaccaggccaatatcaagcaaatgggaagcaataactaatctgggttcctccctccatcttcatgcctagtcctgtgcttttagtatatctggctagctatgagagagaacacagattattcagggaggagggaggggccagaggtgttactgaggtgagcctcatgagcagttaggccatgaggtaagcacttcagtgctttgctactcacggggtggttcagacgagaaaaatctgtatcacctgggagctagttagaaatgtaggctctcaggctccaccactgccctaccaaatcaaagtcgcattttcaacaaaaccccaggtggttcctatggacactagtttgagaagcactgcttcactagtgacactacatggtcacttgaacagtatacattagactacttatattcatcattgttgacgtgttaagtttttattaggtaaaactttctgcaacagttttcaaattaagtgtatttttaaaacaagtttatttttccaagtaattgaagatctccacttcggtaactggggtcattaaggaatgttaaaaaaccttaagctggtcagtgcttacccacttttaaattcctcataaaaattaaggtctttcttttgcctgaaggatacactagagagcataactgccgtctccatactttaaacccttgactaaaacaggccaatcctactgaggtaaatcccacctcccaacttggatatttcaggaagtattgtattgtttttctgactctaaactctacctaattaactaattagtctcaacactttctggctcaagaactgaaacacagcaacagaagctaaagtttgagaatttaagcttgttcccacatctacaccttggcggacggcagcgactgattacggagaccagtgaaaaccctgcccctaactctctctgtcctagccccatccactcaattgagcttgactcagcctgctccctgctgttctcagtattgctcccttagggtcagacgtgcactagacttcagcacgtgggagcgctgatgagcggccaacctgggtctatttaaaactactattcccatctcgaggggcgcctcctcccacagcataaccagcccaggagggcaggcgagtaaatactgctcacctgctccaccggaaacctcaaaatcccggcccgagctagactaaaggtatctggtaattaatccttggcacctcccaccacacgctcctgattgggcgcgtgagacaaggctgtgtctgcgcgcgctcttaccagtctggggaattccatttcctctaccaaccaccggcataagcattcaggggcgttgctttcctggcagtggcccgccccagttcgagccggtgccttactgcgtctcgcgagaacttatgcattttggaggcggaaccccgtcaggaaaagcgcacaaaactgctcttaagtcattgcagagctaccgcttcggttagccagccacgaagttctcgcgagagtcgtctcctcgataccaagtgaggaaactgggggacgctgtggggaggggcgtggggctggatcgcgcagcggctgcttcctttaccttcctcccatggtctccttccggttctcgatgcttctctgagcctaagggtttccgccactcgttcaccctccccccagctcatgatcctcctccctcccccgccctcctggtccaatctccgatctgtttagtaagaaggtgctgttccgagaagaaggaaaagggcttgacacgtattcactcggccccggacgtgggaagcaagccgtctggcttcggcctcacatcggtcttgtgctcgggacggcggcgttggcggactgatccgcggcggtgaagaggcaggaggagggggaggggcggagcgtggcagctggcagtagttccgtcagagcggacatcttgtggctgtgtcgtgcgcgtgagccccgtagggccggggaggcaccagctgccgcgcggggaggaggccgaggccgcagcttgagggaggccccggcccctctgtacgcgtgggtgtggacggctagggcagggaagggaggccggcccagtggccggccgggtaagaggggcagtgcgggacctgggcggcttgagcggccagcctattgggtgcggtgggttagggtgggaaggttggggaagccgcggcctctcctgctggaggaggagggggaatgggcgcgtcctcgcgcctaagccggagcctcagggacagcgcgggcgcgtggtggaggtggctgggcgggcgcgcgcgggagcgcgctggaaggcggagtgagtgtacggtggcgtcaggggtgacacagaatagctcgctgcgaggatagcaatacacatcaagtctcccttcctttatttccttccttttcccggccgcacctttggacagaaaccgaaagcagcccggcgtccgtccggagtcttatgcttccccctccccccttgcctttctttgccctagtgacgccggtatagcgccgactaggccccggctcctcctctgctgggctccggaccctgccccgcacccacccctttctcctacgcctcttcctctcccacccgggtctcttcctttctagaggccgggaagttaaacttgtagccaccacctccgctcttcccgtcaccctcgcccccacttcgggccgaaagcacggtacagaggctgttggtggctttgccacgccaccccacccaccccggatcgcggctgtcttaagggacctggattcatcaggggctcttcggggcctgtgcgagtgctgatctgctccgtttttgcaaaaggcgcctgtgtctggcagagctggtgtgagacgagacaatcctgccccgccgccgggataatcaagagttttggccggacctttgagcatacaccgagagagtgaggagccagacgacaagcacacactatggcgctgaaacggattaataaggtaacccgcggggacaagggcatggggtggtaggagaaaaggaaggctcgggccaagaggaaagcgtgggggtgggaaggaagcataattctgaaaatacctcttggatcacttcttccatggggggatggagaacgcagatatacttcttgaagaaatgaagtttaaagctaggaaacggagaacacttgtggcaagtgaggtgttatcctgagtgcttcagtggaatcggtgcaaattaggggtggaggagagtgacttaaggcgcctttattattttatttttttgctgcttaagaaggagtttttttgggggtccgaattgcggagagacgctccagcagatgtcatggcgcttcctattcttggtgcttgaaaacttagtttagttgtgagatcaaggttatctaggccttctaggggtaagaaagaaaactcggaggagagaaaaaaaatctggcgagtcccgaacttgactgagggtcgggtagaagaagtcttgcgtattgaaggtcagtcagtgagtctagtagaaactcttagtcgactctgggcaggttacaccgaataagtgggtttgggaggagatggaatgacacagtgttgccacttcctgtattttgtagttgcagcttttcacccgaagctatttatccgagggacaccgggaactgatgtaaaaggcattctggaagctcccttttccttttggctggagagtgggggtggataaggggtgcgatggcagtaagggaaagctaatgtacctatttttgcctcattctatttaataacacccttgtttcgttacttgaaatgtggtttgatagtatattatcgatttaagttgaaaaaaaactaggatttttcggagctctgggagtgagcggaacctccacctccggtggtttagtctcattttcttgctctaacttctatcccgcattttaagatggcggctgctttaactggttcaggctctttccggcatctcctttcgtaataatgtgaattaatatgatttgttaaatgttaacttttatatcgcgttgtgcactgctctaagatcctctgctcaaaacttacctaaattcaaactcttaaactgtatttcccttttttgtgacttgtatttgtgtgatgtgtttggttgttgcacaatcgaagagggtggagtgtttacagctaacttgaaaaaaatgtcatggaataaattcagccttactagaaaaattgtggagtgtcggtgagtgttagaaactttggttttaatagattacttttttaaaaagagttctgagaggaatggcaagaatttgcctttactaaaatagacctgatactacatttgcctgtatttaattatgactggagtttatttggcaagattggtgtttcatgaaagaggaaggtttaaatcttcactcttagtatgtattgatatgaaatcgtgaattttgttttgggccttcataacatcgtcattttgggttatgcgaaatacaaatttaaatctttgtgaaatgaaagaaaagaggaagaaacgctttttaggagttaaggattaaagtaaaaattattttgaaataattacctctttttgtgaccactttaaaggccaggaacatattggagaagcctagttgtatgttacagtgtggtttacacaaagagcataacattcagtacaaataaaaatcttttctgttggaattagttcaggccactaaaatgtggaatagtaccagatccatagctttttgtgcatgtggaacagaacacgttaaaggaaggcctctgattttttttctcttacaggtcatacccagctgctgtgacaccacttaaatgatttaaaagctttagagagacaatataacagtggttaagagtgtaaacattggagcagaaatgctccagttagaattctagctctgggcaagtttatgtgcctctataagaagggtatctgttgtaatatgaacaataaatgactgtgtgcctaatatgtaccaggcactgttttagacattggggtggcagcagtgaacaaaacaaattttaagttcctagatttgttttgacgattaaatggattaatgtgcaaatttgaacaggctcttggcacatgacactcctagttattactgctattttaatatcacaatttataatttttaaaaaccgtttttgtttaagaactttgatttctagtttagtactcttagttaaccaggttgtctccttttgtaaatattttgaagatttatgtaatatagacacaacataaaaacttggcatattggaaaaaccagtgtttatgtgaacattattgattcaacttacagaaactttgacgtgtgcatgtggtttggtttttcagctgttaatgttagaatcacatgaggcaactttcaaacattccacatccaacaattttagtgagtggacagctctgaactggaatgctcttcggtttaggcacctcttctagaaatatggggtcaagtagccattgatgtcagtatggtatgcttgtgttacgtacctatttcgaatttattcttgtctgaaggtcccacatttcaagtattatgatatatctgtattcctcgttaatattttactgaaatgattattggaatagttttaacctttagtccatttgatcgagcttttgaatttatactttgcttcagctgtgttcttggagtaagttttttgactgttagaccaatcaacttttttcctgtattctttatttgaacgagctgtaatatggtcttaaatagggctattaaacaacaggagttaaaagtggcactccaagttgattggtattgagagctgtagacaattttaccactcccattaaacagggactacaatatatgtgttttagggacgtttgaagataaatatgtgaaccaagcctaaaagaatagctcatgttttcattgtatacaccctgttaagttttcgtaagggtttttatttctggaagtatgactttagtgtttatatatgattataagcaagcggctagcagggaaaccatgggtaaagggttaaaaaactctcatttgatcttcgtttccctcctaccaccacttccactgagataatttcaagattatctccatctcgaaattgaaaaacttaggcatagaggttaagaagatgacccaggttcatgttgtgacagttgggattagaacctaggcagcctggtccagagtatgtgctcttaacaactacagtttgatatcatcctttagtttttttttgtcattcagaacggtttacttttgcatatagtattatctattacagtagttaagacaatgcagtctcatctaaaccctaactcatttaatcctcaagacaaccatgtgggatagatgtgagaattttatagatgaagtaacaggctcagagaaatagtcgtctagtcacacaactagtaagtgactgggattcaaatcagataggcaccaaaagctcaagctcttttttgaaccatttcaattcctttttttgttgttgttggagacggagtctcactgtgttacccaggctggagtgcagtggcgcgatctcagctcactgcaagctctgccttctgggttcacgccattctcctgcctcagcctcctgagtagctgggactacaggcgcccaccaccacccccggctaatttttttgtttttttagtagaggcagggtttcaccgtgttaaccaggatggtcttgatctcctgacctcgtgatccacccgcctcagcctcccaaagtgctgggattacaggcgtgagccaccacgtggcctggcccttcaattcctgttttataatgtatgtgattttagtttgttacctgaaataagctgctttgctctcccacttatacatctaagtaattgggagttagctttactcttaggttatagctaatttgtgagttaagattttggctaataatattttgaaagtagaagtggatttaattcttttggggtagtctcttcaagcactgaaaactaacatgtgccagttaactgcttaggatgtcttagagtgaacaaaatatatttattgtccccaactagtatataggctgggtaaactgtcttgcatgtgtttcatatatggtcctcaaagcttgttgatagccagctcactttctgtgtaggatagttgtgactgaaggatgctgataataataggacctcagtatttgtttaatttgaaaaaggatgcattactgacactgcatacttttctttcatcatgctcatctgcagtgttgattctagtttttgttatttatacaaataaaaagttgaatgctccatcactgggatgaactactgtgtcactagattgctctgtcaaactttgcccctgagtttaggtgaccctttttatccaagacaggcaatctttgaggattctccacagcatgttgctataatctatctattaaaaaagaaactaggttcgtaacactgagataaaaaaatgtttcagattaaaatctcaaacctaggttggtttttgcattctttttttaaatagcagttttcttgtatctgttagcgtatagaagagcttactgaatattatatattgttgggtgtgacatgaattacatttatattccagaacatttggagtttttaaaaaaattttgtgggtacatagttggtgtatatatttatgggttgcatgaaatattttgatacaggtatgcaatgcataatcacatcagggtaaatggggtatatacctcgagcatttatcctttgtgttacaatccagttatacttgtttacttatttttaaatgtcagattgtttagaatttaaaaaaaaaaatacagctgcatgggggtcttagacttactaaatcattttccctggaaacacataattttgaaaattttctaggtgattctgaagctcctctctgattaagaaccacagatacaagggagtaaaggtcctaatctgcattagacgtagtattctagtcccagggaataaatgaggaagatggtccttatctatggtaatctctgcgttcagtggtgaaaataagcatgtaaacacatgaatagttgtttgtcactttgtaatttacctttcaagaatattagatctagtaggggaggtatttaaaataaattttctatactgtattttttgtactagtattattacaatgtgatttgtcttttattataatgacttaattccccttgccaaaaccagtattttgaaattaatgaaataaaactctccattcttggaaatgttgtggtcttgagcttgctaccatagcagtgttatttcataattaaaaatgaatgcattcaccaaatatcttactgcccagtttctcttattagataagatttattcagaattgtatcctcaaccttgttatgtagggaagggaaaagtttagggaagtatttttatactttgttgaaacatctgatttttatctcctaatgatactttcaacataatctattgtaaaagagaccttcaacttttcatagctgaatttgtcgtatttaaatgtttgtcaattgtgaatcatgatttcttgtacctttttcagtatgaaatacttacattaatcctaaccttgctgtaatttcatggctaatgtgtaattgaatgttttctactactgggcagctgtttggctgttaatctttgttttttttgtttgtttgtttgttttgtttgttttaatgtccataaaacacccttcttgctttcatggagcagagcttcaaatctaaatttgggtttctttgcccatttttaaataatgcttacaaaagaatggctttgaataatgttaagtgactttaccttcagtggtgatcgaaagaaaattagtaatattcaatccattcttagtaccttgtgtaatgaacacgcatgcttgtttcacctataattacgactaaacaggaagttaataccttgtcagtgatgcagtgagatactgtgcagtgcctactgttaaaccttaagataaaaaaggatttctcagaagaaatttcaaattaaaatgtgttttaaagggactatttggagttttgtgaaattgttcatatctttttgccaagcatccttctcttgaaataaccatgtttctgaagtttgttgttccctgccttgatattcgcatctacatattttatacagacatttcataacattaaagttaataaaactttatagtaaaccagatctttatatgaacagttacagtagttactgtctgcctgatggacagctaattgcactgcacttcgacctctattgttggttcgcacctttgtatttttctaggttggttgtaaagtcttcttgaggatgattcttaaaatttcttaaggcacttactccctttgtttcccacctcattttatcatctcttccagtccccaaagcagtgttttgtgttgctcagtataggtttttgaggcaagggctgtttttataatgctgattcacagtcatacaaatcttgtcttttgagtcatgtaaatcttgtctttagttctgaaagaaatagactctcaaatagaatacaagaaattaacctttagtaatggcataagcttttagttttccggaaagtgctgagaggaaatgtatctatactactgcgttctgtcctctgtatgacctttgtgtgatgacgtgcaaaatagatggtagagattgggataacaaatgatttgtggaacatcgtggtgataattttactgtcttaaaggtagaatccatgaacttggccttgccactatataggcttttgaattttgacaagccttggggggatgaaacctagaataagttatttatggcgttacgctttaatagggttgacacttaaaaccttgttttcataaatgctaccttttggttatgttgatctgatgaacagatactggctgtcattgaaagaaagttaaccgaatgttcagatacttattgggctcctggaacatggctgctctgtagcttcatgaatattcataatattcataaatatttgtgaataaatatttttagtatttccaatttataagctctttgaaaggagggaatttttttttttttttttgaggcggagtcttggtcagctgcccaggctagagtgcagtggcgcaactgcggcttactgcaaccaccgtctcctgggttcaagcaattctcctgtctcagcctctcgagtagctgggattacaggcacccgccatcatgcccggctaatttttatattttagtagagatgggatttcacgatgttggccaggctggtcttgaattcctgacctcaggtgatccgcctgccttggcttcccaaagtgctaggattacaagcgtgagccaccacgcccagcaagggaggggacattcttatgtttctcctagcatcctttcaggtctttaatgttttcaataccttggcctactgttctttgtagcctgtggttggtcaccactgctagtaccacttatcattgaatgaggaagatagagaatagagaagcagaaagcatagtttaacatctccaacaatcaactgttaaatcccatatcccatagtgactacagtaaaggtcttcctcaagataaaccatttgcaggctttgtattaaaaatctcatgtaaggaatgtttcagaataaaaaaaaaaatagtgaccaaacccattactgcttaaatcatgtacttccagatgagaacactcaccagtggcttaagctgtacctgttggttgccttttagagagatttttttggtgaaaaaaatcctgccctattttctaccatggtgcccaccaggtcttcaggaaataggcaaacaactcagttgtgtaaagtctgttgctgtctcaaatttctttgtagtgttttaactaatgaggcgaactagaccatgtgagagctttgagagggtctcatttacctagcttagaaagaaggcagaggggtctccttgacttcttttcctataggttttttaaggcttttaaatacaagtattttttccagtgagaaggtctggattctcacactagccaagtgtgcagaaagtttgaggagaagcagctcagaggaagatgacactaaaaggagaaagtttcctaaaagagcactctgtggaaaagaaatgtccaaccttttgttctttttatagctagtacagtttcttagtgttgtaccctgattgtatgtgcttgatcttagtgtcccttcaacgtgagtggaaccttgagcaattcctaaagtaagtcagtgtccccaaccaaacattttcctgtttcagtggccttaatagttgagtaatgctgttccccttaggtgaggggtagtcagcacagtataaaaaaattttacaggtgccgtgtgagagctgttccttctggttcttggcactgttcctcttcctctagactgctaggaaggaataagctgaaaatttcaattgtgtaattttttagtgtttttgtccctgaagcctgtgaaactttaggctctaaaaacattttgttaggtgactatcgtagacaaaattacttttaaaaatgctgagtatgggtgtcgttggaaattgatttccagtccagtaaatggtcttgctgtgggatagaatcattttctcaggccatgtaacttgaaaaatagtactggattcacactacgtacgaataatgagatacagactaacggtggatggttatgcggaaataaatactaaggaaaacattagttttccatatcgtgttcattctggagcattgagtaatagtttggtgcagttgagaatttttttccctcagtttgccaaacattaaattatctttgcaaggacaccctgttgagaaaggaacctttttgaaacttacccctagtccaaatttttaagttgttagtaggtacacttagttcacctatcctaaagctgaacatgttctatgcttgaatgtaatcatttctttcccctctcttaagggactcaactgtaaaacagagaagatgagctctatttccgtaaagtggttataagagtacagttaaacacttgtggtgtacgactgctagtatatttaaaaatcaaaactcatttgtcttctatttcgaaaccatcagtgatttcccattgcctttggaatagtctgactaaattcaagggctcttttaaaagatcaagtcataacctgcctttttagctaaatctgccactctcctagtgtactctgtctggtataccaaactctgcagtatttgttctggcaaatttttatgccctgtgttctttgacactcctgactttgagtttctctacctagaatgcttctctcactccttgttcttggtaaatgcctgcttatttttccatcaagagccagctcaaatggcactcctctaaacccaggaaaagttagtggttggtttttcaggattctcagagcatttgagtccctttattttaagcgtgtaggttgttaaagtataatttttgttttgtcttgcacctgctttctgttagctgagtctgaggaggcatttctatcttaattatcttggtgtttttatacctaacatgcatggcaccaaaaaggcaatgttcctatgaatgaatgaatgttttgatggtgaaattaacattacattttcattttagaaatggatttaaattaacctccagtgtgaaagttaaccttgttactcctaattcaattttaagacttagcttcatttagatttcttacatgtttttcagcaaaactcaaaaactaaattgtgtttgaagtggcataaaatctacataattggtattcagatttggtctctcactactgctgtatatattttttaactccttaatataatccagattaaataagggatttattagaaggaaactgggatagttaacaatgaatggaataggtgtaggaaccagagcaagctacaacctcaggaaccaaaattgcacatctgtatggaaagtcagctctttgttattgctgctgttgaatatggtctctttagcttttgactttaccatgtaagtccatgacacgtgcctgtcaacagctatgggtcacattcttatagctcttgattatagaaggaagaatgtccctttgatttggaaactcttaggttgggatggacaatggactaatagttgggtcccagctgagggaacaaaattctgtggttagtcatgtccaaataattggttaatgatggctgacccaggactacagtcacatgatttggagtaagggaaaaggaattcatgagtaagatggtttattgagtagacaaaatgtctgctagctacaaagagcatctgctatgacttactcttttctcacttttttttcctacgatactgtcttgctcattctgtgggcatataatgttacaaaaattatttggtagctcaaaggtaagtgcttgtgcatggttttgttactattgggtactaagtggtactttaaatagtaatattagatactatttaaatggcaagaaagaaaatggtgaaataagaacagcatttgtatctttaaaaaagacctttgttttgattgttaaaatacttaggtcatttttctatattgaatttaaagtaggtaagtgtattgggctgattttatctctttgattattactaaagagatgtcttggtgatggagaacttcgaaagtaaggcatttagaaatgttaggagagtaacaagaacctgaaattacaggagtgaagagctgaaacccagtgttaactagctgaaattataccttcactctaaaaggatgataatgctagcatttaaaggcttagtgatggataaatatcagtgtgccgaaaactcatttattctataagaaatactttcttactttctttgtaattgaaatgtgtaatgttgaagtagtatggtgtttatattctaggtcaacttcatagttttctgacctttagttttatttataatgaagtattccaacattattgggtattgtgtttagaacaaccatgattacattgatttttattttaaaattaaaatattttatcttaatatttattctggccaggcacggtggctcacgcctgtaatcccagcactttgggaggccaaggtgatcacctgaggtcaggagttcgagaccagtgtggccaacatggtgaaaccccgtctctactaaaaatacaaaaaattagccgggtgtggtggcgcacatctctagttccagttactcggaaggctgaggcaggagaatcacttgaacccaggaggcagaggttgcagtgagccaagattgtgccattgtactccaccatgggcgacaagagtgaaactccatctccaaaaaaaagaaaattacgctaaatatttttgttcagacattttaacatatattaaatgtaaaatctagtatgtttattgagttaattatgagtaaataaatgtaaaacttggattgtgttgtcagctttttaaactcttatttcagtattaggtatattcagatgcttacaaagacatttttagacaactgagcatcaggatttatcacataggtcaaaaatttaaataaacaagtggctatattatgtggcccatgtgtggagcagttttgcttttgttcagtaacagatgaattaagagccttgcccaggaatcttggttcaggatgggtggtctacacatggtctgcttgttaagtaccagtccattatgtgccaggtagtgattcctatttcagagatgagaagagaaccatgagaaaaagtaggcctgtgtaagattaaaagtaagactgcaggcctggtgcagtggttcacacctgtattcctagcactttgggaggccgaggcaggcggatcacttgaggtcaggatttcgagatcagcctggccatggtgaaaccccatctctagtaaaactacaaaaaaaaaaaaaaaaaagaatagccaggtgtggtggcatgtgcctgtaattccagctactcaggaggctgaggcaggagagtcacttgaacctgggaggaggaggttgcagtgaaccaagatcacaccactgcactccagcctggatgacagagggagactccatctcaaaaaaaaaagtcattttcttaatagtggataatttaagttgcaaaaaaaaaaaagcttctgaaatactgatttggttcagttaatattttctgttacaattttttgaaggccaaaagccatgtagtttcttttacagattgttgaactgcgatatgaatttctgtaattcccactgatcagaatcaatagtatttggaatgaattttcttccatttctgaatatgtggaagacatgagggtatatctatacagacaagcatataaagggtgtgtgatatacagtcttaaaattgtgaatcttgggatctctggcaaccttgtaagtagttgtgatgagtttccaaagtgaattggcacagcatatcaggacaattctccttgtctactctatttttgttgtttgttttatggcattaatctagactgaccattcccgaacaactggccattttctgaagtgtattttgaatataagaggcaaatatttgcctcttaattttcctgcagtgttgtttattgtgacaaagcctttcttcacattctttatttctttttaacttttcaggttactggccaaggttccctttcttagcgttaaattagtccagtgttaactcctaggaccttctgttccaggagtgctctcaccaagttgaatggctataaacatcatttgtttattaatgatactttgtatttgttcccagcctgttctcaacttgtatatatacttttcgaattgagtctttacttacattatcctattttacttactttatctctacatctgcccacaagcttcacctgtaagttgaccattttacttaatgccaatctcatgctttgctcaggccaaaaatcttagcgtcaccttttcttcccacatggagtcaatcaacaaaattcattgtttaattttacaattaaaaatgtacatttattgttcaacaaattgctgtacatagtgatgcgtacctgcaactccagctgcttaagaggctgaggcaagaggatcccttgagcccaggagttctgggctatagtgccttatgattgtgattccgcctgtgaatagccactgtagtccggcttgggcaacatagtgagattcccatcacttttttaaaaggggagaggattggtggacttttaactaaacaactttaatcaaaacttcattttttaaaaaagatactattagagcagttaaaactttgtgttgatcatcttaacatttttaaaggtagtacaattattcttagtccgtatttgtgtactctagtttcctagccctgtttctcagtgctgttttgctaatatctctaatagtcttacttaatcttgttgaaagtagcacttttgaggttaataaggtttaaattaataacccccattgactgtagtctataatactataattttttaaatggcaaaatgccctctgggagctaaggtgtcttaaaagcttagagcaaatcctgttaaatgggacaaagtctcaattcttttttaataagacaaaaacactttatgtagtctcttttctttttcagtgtttctcgaaatttcaattttattccatgctgctacagaatacaaacttacccaataaaaatagcagctccattgaaagagctttcccacaaattgaaatatttaaagcacagttacaggcttgtgtactgttggtgcatacattgtttgatttgttcagttcctcagttttgcagggaaagatgtcaacattatctgatttttcaagctatctattcaatgattctaattttctaaaagacttggaagctgggttgttttttgttctggcccctcagtttgttgagagcctattttaaagatttccagtggatttaacaaaatgaacaaaatttagaggactcatttatttcccccaaccaagtcagtgccatagtgggacccttacataaatttgtcactgtgtttaaatttgatgtagtgaatgaaaataatcatctgaagccagtataaaataggcattaaacattgttgtccaagctagagtgcagtggctctccaccagcatgatcatttaacacacaaaaacctgaaacacctgggcttaatcctgcctcagccttccgagtagctgggactacaggcacatgccactatgccttgttaaattaagatttgtagctcttcttcccattccctgcacccttctgagagagcttatactgaaagttctgcattttgtgtccttgattttgcacaggaaggcaaaagatcacagttgaggaaaaaaagtgcatgtacccactttgaaaatctgtttccatttttaaattcctgtagttatagggaataagttgttctagtagaccaaaagaagattaatgtttttagttatacacggatgcattgatattgtggtagacagttgatactggctttatcgtaatttttttttctttttatggagaatggggtctcactatgttatccaagctggtctcgaactcctgcgctcaagctgtcctctcgcctctgcttctctgttgtatcttttttatttaggcatcctttcttttgctttctagtacttggtcttttgtatatgagtacgttcagcttttctggggttttttttttgttgtttttgagacagtctcactcttttccccaggctggagtgcagtggcgcgatctgcagcctctccctcccaggttcaagtgattctcctgtatcatcctcccgagtagctgggattacaggcgtgtgccactatgcgtggctaatttttgtgatgttagtagagatggggttttaccatgttagcagcactggtcttgaactcctgaccttaggtgatccacccttctcagcctcccaaagtgctgggattacgggcgtgagccactgtgcccagtctagcttttttggtcttgtttttttgtttctgagacaggattttgtgttttttttctgtctcagacagctctgttgcccagactggagtgcagtggcatgatcacagctcactgcagccttgacttgttgggctcaagtgatcctcccacctcagtcttctgagtagctaggaccccaggcatgcaccaccatgcctagctaacattttcgaagagacgggggtctccctttgttgttcaggctggtctcagtcaaactcctgggctcaagcgatccctgtctttgcctcccagggtgttaggattacaggcatgagccacgtacctagtggtcttctgctgttcaaatggaatcccaaaccttacccttctgtgttatttccatgtttatatgagaaaggggatatagaagatatagtagtccctagacttaatgggtgtactgacttatgccatagactaaacttaagagaaactgttagtttgaaaatgttgaaggcagtaatgtattaacattggttctatttattgtcttttttttttaacttgtgattattagacattggttatatcattggtaagatggagctgtaccatcttaaaaatattctaataaactatattttcatagtagataattcatattgttatgcacaagtcatggaacagtgaactacatacttgttggaaataaaacgttcatattgaattgtgcagactatatgttaagagcaaacgtctttctacttacagaagtacgctcttcagggtcagaatttcaatcacgaggtcaggagatcgagacccatcctggttaacgcagtgaaatcccgtctctactaaaaaatacaaaaaattagcctggcatggtggcgggcacctgaggcaggagaatggcgtgaacctgggaggtggagcttgcagtgaccccagattgcgccactgcactgcagcctggagactccgtctcaaaaaaaaaaaaaatttcaatagttaaaaatggatgctgagtttaaaaaaaaaaaaaaaggttgagttgagagaataaggagattagaaaacaaaaaaggtacttagccccatgagagtttttttggtttgttttcaggtagaaaatagagttagtggattggggaggaaggatggttcaggaagaacaaagaatttaagacagttgagggcctctgaaagtggtcttggaagttcaacaaataacgtgaatgttgagctctctctggtctaagctcttaaactatgagaatatctaattatagctatttcggtttgtaagagattggcttttatgtaaataaaaaattttgtatcaatgtgtttgcatatatatttttacgaactctagctaagatgattgtctcagcatatgttcaggcatgttctctctcctaatggaatatattatttatgtgaattgtgatggagtgtgcctttaaaaatagggtgaaagtaactgaaagcagtggactcatttgcttgttttcttaaattaagcttatgtgactcacccattttctgtcttggtgtaggaacttagtgatttggcccgtgaccctccagcacaatgttctgcaggtccagttggggatgatagtaagtaacttgcaagttgatttttatgcctaatttttttttaagcttgtgcatttttagataaccagagttttttttctttttctagtgtttcattggcaagccacaattatgggacctgtaagtattaagaatttttaaatttagttttaagtgaaaatccagcattgatttggttgtaatttttaacttggtctgtaggtttattttatcatatagttaattctattttggatattccatagttgtactgcatttgaaagaaaaaacataatgagttagtcatttgttacgtgtactttgtgtctatccctgtgttcacgttctagagtatagccatctctatgacctaccaaacatctctgtatctcagttcagtttttctacatagcactgtgtaaagcattgtcatggaacttcctgttatttatagagacaaagttactggctctgatctgccatgcgttgtgttactcagagatcttattctgttactgcagctgccaataatctagcttaattgtattttgatatttgattctttatagaacttcagtttatgcaaaatttgaatatatttaggcagaaagtgatattttgaatatagcaaaattcctttctatcctgggtagataagcaactatatgctggataattgaatattcagaattatggataccatctaagaatttcagagaattagagcgcactaaaacatcctggggtaagactgtatcttacacaaatatttaactttttttttttttttaacttgctaaggcgcttaaggatttgttttctaagttacatgtgtatcttcctgaaaactgtcttccctttttggtggttttataagcaacataaagagcaataatgtactaggtgagataatggtcagtaagtaatatttagaattctaaaggaaaaaatgctcttagagttagtagatgagtcgaatcaacaagtatttatttagtaattctgattctaactttagtcatttttctgtctcaaatgtgagtacatactgtgtgccaggtaataaggatacaaattgaacataataaacatccctgtcgatcttatagggaacttacactgtattagaggagacagatacctaaaacaagtgctgaagtgtgacaagatggaaaataagtgattggtgaatgaagtgctgagtaggataaattaatgggaaattgtagcagggaggattaatttagagtaattaaaatgttagtgccctaaaggtagaaaaactaaatcaaagtaagacatggcaggggtgcaaatattaagtttaatactttgaaacgtcctggatcattttaaaacaaagtaacatttaaaacagtaaaaatagtcctgtaataacgaaatgcacaatcctggctttgtagttattaaaagtacttacttttatctaatttggtagcaatattgtttaattttaatacacgcagttaaatgttgagttacccagtttggcccacacgatatttttgaaagttggcagtcttcaaataaaagccttctgagtaggcccacattccataagcagtaatggcttgggatggaatgacagctgcctcccttttttagatgggatatgtgtttaccacagtgcctactaggtcaattccatattatctgcctagtgttttgtaaagcagttgcttttgcaacctctagaattttcccattttggattaccagttttcaaagaatgctataaaatgccttaaaataaagctcatctttgattcagagggtagttgatagtttcattataaaaattgtcaatactaagaaagcacagaagcgttggtaattaaaacttctaattggatggtgtgcagaataaactaactctttaaaactagttggtttttctgcttgacagtttagactttgttattttgaacaacacactagtttttcccaaaaggcaaggaacatacctatagacaatcaaaaggaaacatgaatgatgagtgtatggtagtaatttttttagagaatggtgttgcttattctgacagattttttagcagtttacttaatttgctgttattttgagaaaacatttaccttttttcattttttaaatatatatttcaggtgatggctattccttgctgaactttttcagcaaccttttaatataatgactagcagttttctgcttttacaaacagaagcatgtgattttcagaaccatttaaatattaacctgattaaccacaactgctgggttttgctttggtagcagtactcactgaaatatgttttcagttaaaaaggttagttctcactgttggttgggtaaatttcaagaaggagtcaaagattataaaaatccacccaaagtacgggtattgtcttgtacataagtaagcacataatttagatgccagctttaaatagttaactatatgcttactgtggagtgcaccaatgaaacaactcattttgttcttttggcttctcaatacttctttgtgacaaagcatcactgtataagataaatagtagcttattttgtgagtatggttgctctatgtagcaagcagttgtgacctaaagcaacccataaattacagatttagtgggagaactggacagttaacaacgtcacttttgctttggactactacttaggtcccttaaagtggtgccagtgccacagaactgaagattcctgactgtagggaatataccatctaattttgagtttcaatagagtaactttgattttagtgagttgttgggaaatcctttagatcattagttatgcagcaaaattgcttggctttaataatcatatgtactggcttattctttctgaaggtaagctacttcggaagcacaactattgactaaaaactaaaccttcgaaagaaatgacagcattgctagttttttgtgtgcgtgggtttttttggggaggggggcgtggggtactgtattaaggttagtttccaacaagaattgatgtaattagaagaaattgacttccttacctattgcctctgatatttacttgcttaaatttttttttattggaaatccagaaaaagtggatttagagaacaacactaactcccacctaatctatgacagagatgtagaagagagtacctgtgaaaaatgtgaaagtatctgaaaaatgtaacctttggcagcctgagcatagtcaaccagaaaaactatctgaattaaaataattggtccataggtactattttatttggtccataaggattattttttcaacttttttttcaagtgtattattatgtcatttcccacgtaggttactgatacctgaagactttttccacctttaaccttactcgttgaggagctttgtagtctaataaaagagaaatataagtaaatgttagatatatgggtggataatggtaactatgtgcttaaagaggtataaaagaagggtagggagcagataagacaaaggaagggctatattataaggaagaatattccaagtagggaagagaaaaagatatgttatccatataatattttatgtgcagtagagaacatgttctatagaagagacagaagatgaaactagatgggcacccagatcataaagcaccgtatgtacttaggagttggaattatcttaaaaactatcatagatttcaagcaggggagtaacatttttaaaagaccactttatcattaggatggagggataatcattagtaagctattgccataatctaggctgaagataacatcatgaactaagatggtagtgacagtgggcataaaggagaagctaattcaagaaattttaaagatcttacttgataactatcttgattctgagataagagaggaagaagttgatgatgagatcctggtttatggctttcagttatggcttgctattaataaacaggaaaaaagggattgagacaagtttcagttttggacgcatgacatgagatatccaagtagagatatccaagtagaaatatcagtaggcatttgaatatatgccctggaatgaataactgaccagagatatattttgcaactcaaatttttatgggtcagcagttaagagtagaaaatcaacctataagaataccagcatttttagctgggtgtagtggcacatgcctgtaattccagcttctttggaggctgaggcccgagaatttacttgaacctgggaggtggaggttgcagtgagccgagatcacaccactgcactccagcctgggcgacagcaccactttaaaaaaaaaaaaaaaagaataccaacgttttattgccacagaagagctgaggcactgtgagggagcaactttgcactgatgagagcaaaagaagtagaaggtttctgaaaaaatctaacataaattctggacttgtacgatttgagtcgatttgctgatcacagtgttccttattctttggggattttgtttctttttggtgtagtttgctgctgattcataatagaatttaaatatcatagggtctcaattttttatattgcctagtttcattatctctgaacctcgtagttcttcctcttttggcatggcagaactttagtgttaaattgtaacattgaaatattttgccttctttataaagttcttttttcgaacaaacgaaacgaaatttggctttgcctaaatcccatcagcagattgcctttattcagaagcagtcatagacagcatttgattttatgaaaattgaaatgaaagcttacaaagaacttctggaattaggttattaaaacttcaatgtttggggccgggcatggtggctcacgactgtaatcccaacactttgggaggccaaggtgggtggatcactggaactcagcagtttgagaccagcctctcaactaaaaagacaacaaaaactccgtctctactaaaaagacaaaaaaaattagccaactgtggtggttcactcctgtagttccagctactcgggagggtgaggtgggagaatcacttgatcccaggaggcagagggttgcagtgagccaagatcgtgccactgcactccagtctgggcgacagagcaagaccctgtctcaaaaaaaacaaaaacaactttagtgtttgggattacctttaaattgttaattttacacagaaaaaacatatcttgtatagtattggatcaggtgaaagtatatgctatttgaagcatctattcaaaattaatataactatttaataaagacatgttaatctaataaactcaggtcacattctaagtgacctgagtgtttttctagttccatattttgtagaaaatatgaaaaaggactgggcacggtggctgatacctgtaatcccagcactttgggaggctgaggcaggcggatcacctggggtcaggagttaagagttcagccaacatggtgaagccccatctctactaaaaataaaaaattagctgggcacgttggtgcacacctgtaatccaagctactgaggcagctgaagcaggagaatctcttgaacctggggaggcggcgcttgcagtgagctgaggttgcaccattttactcgagcttgggcaacaaacagcaagatgatattctgcgtcttgtttgtcccccttcccgttcccattccccccgccctccacccctacaaaaaaaaagggggaagacttgggagatggagaaggactcactttaaataagctctggctgggtacagtagctcacacctataatcagcacattttgggaggccgagatgggtggatcacaaggtcaggaggccgcaagactagcctggccaacatggtgaaactcagtctctactaaaaatacaaaaattagctgggtgtggtggtgcatatgtgtaatcccagctacttgggaggctgaggcaggagagttgcttgaacccaggaggcagaggtcgcagtgagctgagatcgtgccactgcgcttaagcctgagcgacagagtgagactccgtctcaaataaataaaagctcttccatttactagttgtatatttctttgaacctgattcttcattaataaattgacctttcttctttgaactcgtgtcccttgttcatatttcatgatacctataacatttcattgcagttactttacatgtctatcagtgtaagctcatcaagataaaaaaaattgttctttggatcccttaacacacatacagtatatagcaaggggttagattaattgaattaatgtttatttattttacagaagggtaggaattagatgagctgtgttagtgtcaggcctgttttttatgtgcctgacatccagaatgggcatagtgaaaggctcatatatagctgtatatacaaagcctttctaatagaggggagtcagtgttggtaaaaacccagttcatgtaagttgtaaaacatgtcttcggattggttctttgcatacccagaagcagttaggcattccacattttaactttaaattcctgagtaggtcagtatctttgatcattaagtggtcttcaaaagacttgtgtttgaatcttggttctatcatttaccatttgtacactagactaagttctttaagcctcatttttctcatgcataaaataggggcaatgcatgtattttctggtattgattaaaatgagaagcttaggcttttctctgttctcctcttgaaggtggtgtgtgtgtgttacctggaatagctaacatttggtttgccagtgggcagaatggactgttgtgaagccatttgtacacatctggctattggaagaaataatctacatgtgtaaaattttgtttacagattattctgaaacatgattatgtaggctttattgctgtgttgtacttttgagaattgagatctagaatacttgcgtttctggataactttttaaaaaaacattttggtgacgtgtaaaatgactaggtaaattagggtttattactgtataagttttaagtttttttctattactatagactgaattttcatggaatagattatttattgcagtgtaaataggtgatttgggttcattattagagaaatgcttggaaacaaatgttacggaatatttagcaataatattttaaatttgagttaagcatacttttctttttacagaatgacagcccatatcaaggcggtgtattctttttgacaattcattttcctacagactaccccttcaaaccacctaaggcaagtattttccctcaaaatctgttagtatagatttatgctttatttcaaaggaatagagcattcttggaagatagggttctgtgtaggctgtatatatatgttgaattgcactcatgtatagatgctgactcttaacctttggtttaaagagctagacctcagtttgagctttgtaaataggaataaggtttgccttttctttaatgttgcaagattcagaccatgtggaagcttccgccctcatctgtattattgttacacagattctgatttttgggcttttgttgtcttgtaagcatcaaatgtccaacttcaatttatatttgcacgtattgttacagcatatgcttattatgcttatagttttgtatacgtaagtgtaaatttgtgaaaacttagagttgcttagtgcactggtttataggtattaaaagcatattatccttcacttttcagtcattaacataaattcaacctgtatgaataactagaaaaggtaatatacaaaggtcataaacatgtcactataacaatctctagtaatgttataggtgcaatgtgatggtttccatttttgtgattcaagtttatgttttatgtacggtggaaatgcagactcaggtgtacctgtgtaacttaatgaaactttaaatgagatggtctacaaattttggttacatccaaaagttagggcttttataaatgaatgtgttaaatacctttaaattgccctttgattcatgatatggtagggccacagtaacctttagaactttacatcatatgagtaatgaaatttttatccaaaagtttaggtttctgttgtaaaaagaggaggcagggggttgtggtcagattgtaaaaatcagtttctataatatttagaacttctatgctaatagatgacatttttaacattgtggcttgattattttaagttttgctttaaaagatgtttgtttttatttgaataaaatacttaaaagtttttgttttaggttgcatttacaacaagaatttatcatccaaatattaacagtaatggcagcatttgtctcgatattctaagatcacagtggtcgcctgctttaacaatttctaaaggtaaatatttctagtgaaataagctgttctcattgtctaataaagcttcattcttagatctacttatctgagtatttttattatggcagctttttggtaagagatggggaagcaataaagttacttttataatttttgttcttttagtggtgttgattaaagatactttgtgagaagttgttaaaattcaaattgtggtgagtaggcattatttgcctaatgagttaccttcatctcatcttataatagcaaaatttattttaatagacttctgtatttttcaatcccaaaccacttggacatctcacactaacttgcggcctttttaccaagaatggtatgatatacctaaacttaatagagcttttgaatcctgaggtttccactctaggaaaattctgattttgctttcctgggttaatttttagacaaatcttcagtcatgttttatgtaaccatgataggttgtttctacctaatgacagtctaaaattatataatcttcgaaagatctgtagatcaattctggtctcttaataggcatctgttacgttatatgtaacaagttttccggtctccgcatgaatatcccaggtgaagttgtaataattaacactatttcaccattaattgttttttgattttatgagttcagtaagtacaaaaaagctttttcaaaaggcaaggcattgtataaaagtttcatatgtgtatatactgcacttgaatctcatggagagagactgtagcagtagcatttcccaaactttattgagtagaatcacttaagggagaaaaagaaacaacttaggcagatgctgccataattcgagtgtttttaaaattttacacctgtttttcaccttcttggatgctttctaatttcttttcaaatcatgctacatacctaaatatcagtttccaagtttttctactactgctgggagtgtacagtaacactgaaaactgtttttgtaagggcagattgaattggtattgttttgtcgttaaagcaacttacttttttggcagccatactttgctaacttattaaactagcagtcacaactgaagctaccttttttctgtgagttattgtatagccaagtctcctatattaggtaattttatattctgctgtatttggggtttgaaattaaatttgctgtagtcaataaatatgtgacagtgttgtcttttttatactattgctttttttaaaaaaaaatcggtcagaaccatttcaagcatttatatcttaacattttataacagcaccaccatatatggtgactggcacatagcaggcactcaaagtgaatgcgatctatgttccttaatgcttgacatcttatacatcagtatgttgaactggttaaggtaaaaactagagctgatgactcacttagtactaaagagattttggcattgtatttaactagtactcttgggaatatggtttcttgcttacaagttcaaggagacatttagtggagcacttgagggtttttctcagaaattgccaagacaacggctaagaatggatttttcatcatgcctaatggctatgaatatggcatgagtgttacctgcatattcttgctaaagtcccccccccccagccacagagtaccaagaaactcaagttctaatatcatttatgcctatttaaaatatatatattaatatggcatcagttgcctatcttagaaactatttttatggctagtctgcagtgaatttcatgccacaaaaccctgtttttagcacttcttacttaccaggagcttgtcttctgtgaaacaaaatctctgtaaaactgtgtctcattgagataaagatacaaactaataaaagtcttttgaggattgagttttgtaatacacggtttagaaaaatttatttatccaaactcctgaaactgggtaacagatgtttttgttttcttgcagttcttttatccatttgttcactgctatgtgatccaaacccagatgaccccctagtgccagagattgcacggatctataaaacagacagagataagtaagtatgttaaaaagttattataaaagtggttttacttaatgagttaggcttatactttgcttgtgacagtgccaagaagacttgatatttagtaagataatagttaaaatatggagaaagctattgaaatgtggttatttaaaaaaacttaactaggctttagcttatgtgacagtgaatgctcccctctaaaatgttttattgttgttttttttttcctagcgtgttaaacagtatcactttattctcaacttttggggaagaaagcaaatttttctttaccccaagcatgtttttccaaaaatgttagtactattgtaaaaatttggtctaaatttctcaaatatttgaattatatttatgttcaacttaaccattataactttcatatgttataattaatgctaagtgtacttgttcaattaggtacaataggttagcaagagagtggacagagaaatacgctatgttgtagggtaagaggatctgcactctatggtgcgcttattatggtactgccagcacttgagtgctgcatgcgttaaggcactgtattaactaacaaaaggtaacaaatatggcagtcttctgaaaactgtacatttaactgcttggtctctgtttaacgtgaaagtaaatatctggtagccgttactgcttgaaagtattgcatggcaaagcagttacaatagcactagtaagaaatgggaatttatgtagtatcttttttttttttcaaactatcatggtgtttaaattttagcttgagactttgtaccaatcctatacagaatgtggtggtttagttcaaattttgccgggagatagtaatgtaagggaaaaacacttttaagcctaagcatctaaactaaatgttcattactgacaagcatgcattagcgtcagctgtactttgtggctccctgtatgctaaataaagcctttgttttaaagtgctggctttttgagagagtatccttaggagatgacaatgaattggtagaaagaactttttaaaaagtttaggaaagttgttggaccatatttggttcttggtttgaaataaagctagttaatatttaaacaatataaaaattctcctgtgcatatatatatatatatattcatttcttaaggttatcactgttttttgttgttgtaagtagtctatggcatgagtataatccagggggaagctgatagtatttatcaatgttagtagtcttcctgagtaataaccttgcttgtgtgtgaattacctgttgatctttttaaacgaagatgcccttgttgtactcaacaggtctcagtggtgcttattagcctcagttaccacacttattaaaagtaacacgtgattctgatgaacacaaccactcacacacacaccccttttgaaaattactgccctttgtcattctgcccagtgtcatcttccccttctgcctctacctaagtcccaaagccattttttcttgtaatatccaggaccaagtaatttcccaaactctaggattcagataaaattgttctagtaaaagcctagttctggccttggtggaaatttctgtggatagatagaatgtgtatactattttaacatttgtccataatgaactgtaaaaatttcttcacgttaaaattagagcatgagctcggtggtagagaaagaaagggtcttttgatttttgttagcctcccaattttcagtgctgctttcttagttgtttttaaaatactactttcagagcatcaggctctcatttcccacattgctttgagtaccagtgctatttctcccttgttggcttttattctaatcatagtcattagagatgacttcatgatgagtctggagatgataaaatggaaatctttcccttccatttaaagtattaggaattctttattttaacttttaaaaataacatctttatttacaggtacaacagaatatctcgggaatggactcagaagtatgccatgtgatgctaccttaaagtcagaataacctgcattatagctggaataaactttaaattactgttccttttttgattttcttatccggctgctcccctatcagacctcatcttttttaattttattttttgtttacctccctccattcattcacatgctcatctgagaagacttaagttcttccagctttggacaataactgcttttagaaactgtaaagtagttacaagagaacagttgcccaagactcagaatttttaaaaaaaaaaatggagcatgtgtattatgtggccaatgtcttcactctaacttggttatgagactaaaaccattcctcactgctctaacatgctgaagaaatcatctgagggggagggagatggatgctcagttgtcacatcaaaggatacagcattattctagcagcatccattcttgtttaagccttccactgttagagatttgaggttacatgatatgctttatgctcataactgatgtggctggagaattggtattgaatttatagcatcagcagaacagaaaatgtgatgtattttatgcatgtcaataaaggaatgacctgttcttgttctacagagaatggaaattggaagtcaaacaccctttgtattccaaaatagggtctcaaacattttgtaattttcatttaaattgttaggaggcttggagctattagttaatctatcttccaatacactgtttaatatagcactgaataaatgatgcaagttgtcaatggatgagtgatcaactaatagctctgctagtaattgatttatttttcttcaataaagttgcataaaccaatgagttagctgcctggattaatcagtatgggaaacaatcttttgtaaatgcaaagctgttttttgtatatactgttgggatttgcttcattgtttgacatcaaatgatgatgtaaagttcgaaagagtgaatattttgccatgttcagttaaagtgcacagtctgttacaggttgacacattgcttgacctgatttatgcagaattaataagctatttggatagtgtagctttaatgtgctgcacatgatactggcagccctagagttcatagatggacttttgggacccagcagttttgaaatgtgtttatggagtttaagaaatttattttccaggtgcagcccctgtctaactgaaatttctcttcaccttgtacacttgacagctgaaaaaaaacaacatgggagtaataatgggtcaaaatttgcaaaataaagtactgttttggtgtgggagttgtcatgaggctgtgttgaagtgacttatctatgtgggatattgagtatccattgaaatggatttgttcagccatttacattaatgagcatttaaatgcaacagatatcatttcaggtgacttaacatgaatgaataaaagtcaatgctattggattgttttttgtttgacaagtgctatctgtgccactgatttaacttctgtagtaacaagggcattaccattcttcacctttcctaattctgatcccatagttttacatttttcctgtttattttgattttgttcactgctttatttcttaaagttctagcacatctgtgactcctccacttccacatttttgcactgcttacacttacgtgcaatcttattccttgtctgcacacacatgtggaaagctagaaataaatgttaaaacttactttttataaacattttaatatgtagtttggacatgatttattgacttaaggttcttctctaaactggaagtgaaatgcatgccttctgaagatgttctggctttgttaattctgtaatcatttcattggggaaaaaaccagctacgcagtttttccaatgagtgaattttttcattttgtgttttgcttaaaacggctccttcagggtagatgtcatactgcataacttttttggattcaaattatgaatgagaaattagttaacattctgctccacaaggtaagaaaaactgctctttggctctattttcaaaattacttctgagatgcatatagtctcaaaataacagctttagtaggcatatcacttcttgaaagccaaacatgagtgtaagacacttttatgaaacacggtggatccctaactggctttcaaattgacctttatagccttagacaacccttaggtatttacggagatgacttctttgattgtcataacaattagtggatgtgtccagttctctgtatctttgacttgatgctttatacatcatttcatttgttgcttctaagggaataagccatagaggcttctccaggtttaaaagaacagtaaagtacctggaaaaccaacatttttgaatgtatggacactggacatgagatatgtacaatgaaatcttaaaagaatctaagaatttgccctctttgccccactccacccagtaatttgacattactagtgccatgtataggacccaactgagtattagaatcagttttgactatgtctttgtatttcctaaatcttttaatgcataaaccgaattagggtccagttggcctgttaatggtaaatttacattttaaatgactcagtttgtttttcctgggcgagtttgcaatgtgataatcagattttttaaaactgattaatttgctttcttgtgtgggtgtactcacattttaaagtatgaaccacagttaactagtggtctcaggggtagtgaaacactcacttttttttttgtttgtttttttttgtttgtttgttgaaatggcttagttgaagtatacttaaggtactgatcatgctgtgttagtaatttgggcggggaggggggtaactcagccatgttttgtgttggcataacaaaactgttaatgattgttgattacacttttaagtgaatttgtcttttatgaggaacccagtgcaagtcactaaatattgtctaatagtgacatctgcataagacttgtaatagctgaagttaattgagcttaaaggaattgttaccattaaagtctgtgtttaaagacactttggtcttactcggtaattccagctaacatgaaatccacacttgagcttaatgtgtgtgagctcgatttttaattttatacagtttatgaataaggtggttctcaaaatgtttcttgagataacaatctcagcatcatttaggaaattctttataatataagttgtcaggccccatcccagtcctgagtcaaactggcatggagcccagtcacctatattaaaacaccctccaagtgattctgatgaatagtgaagattgagaaccgttttcagaagtctgttcgtagcattcccttgtaacagactacaaccagtaatcctttgactctacagctatttttttatagctgtttttggctttagagaatgtgtttaagtattacgtttctgatacctgacaatttcctagtactttgaattgtaatacagtacattgatttccacatttacacttggaatattaaaatacattaacgtcctacagttggctaatttgaataaccatactggcatggaattcaaccaatcgtcaagtatttaaaagtaatcaggtgcaaagatctacctaagtattgtgttggctagctgaacaaatttgaacccagatcccattctgtggcctgacactaggcaatttttccaagtggaaatgatgctatgttaagggtgtttgcagtgtttgacagatattaaaggtaccctaaggtgactattaagatttctcgtgctgtcccattgtaatggaaaaatcaacggttaaaggtatttggaaatggcttcaaaacatgacagtgccaccccctgccaaaaaaacttgaggaaccattttaacaaaaagacttaaatatattgaagttggccgaatgtcttaagtccctagaaattattactgtgttgcattatttgttgctaccttataactacttgctcatttctggcctcaggtttgaaaaattttatatgattcaggtatacaagatgtttctgacaattgttcttttacttgggatgcttccattaaagtcccattatcagtatctagctcttcccaaactgtatgctatttatgaatgagattttttaagagccctcttttctgtattgtaaaaaatattatgaaatttacatttttacgtactactgtctgatcctctatagaacttgatttctcatttaccgtatcaaatttgtagtcaaggctaaacaatgaactttcatgtcatactatcttaggagcccagttaaccaccgtcatttactaaccttcaagctatttctcctgagctcccatatagcttctattcattatccacatgacaagctaaagggcgtcttttaaaatgtctaaaactggacatatgtctataaagacatacacatatacatatactattaccccatgctcagtaaatgtcaacattaaattgcaatggcctaaaacctaggcaccatctttgacttttcacactccaccttcaatcagacttaacagcagcctttagaatctgcccatttatcatgttgactgttagcactatgatctaaagctatatcatttcttatttggattattggagtagcctcctgagtgatctccccacgttgcagcaatctgtctgtcccacacacaacccctttaaaccttatcagatggcatggctttcctccaaacctaatggtttcccatctcattcggagtaaaaacacaaggtattaaaagtaatctacaaggctgtagataactttcttccctacctttgcctcagcttaatccccaattccttgcttgtctcaccaccattccaactctctcagctcagtcacatgggactgctgagacttgcaaagatgtgtgaagatgtttactcttgttcttacctttgcctaggatgatcttaccccacataccatacagcttccttttccctaactaggtctctattcaaataccttatcagagtggtttttcttgactattctataaatacaccaacacagcatcacctctatagagtacatcatggcatattcagtattatctatcttataggtaataattgtctcaccctcagcgccaccccagttctatgaggacagattttttttctcttatttatcaatgacgagatgactacttgcaacattttaggtgatcaaatatttaacacaaatgactgagccaaatggtagcctgtcaaaggtacatgtacttactcgtcatttgtatatcttcttagggaaaatgtttaatcttttgcttgcttcatttctaactccaaaagaacaaagaaaactaatatactattaaaaatttgttaatcagaccttctttattgtaagtaaaataatgcagttcagattctgtcagcctggatgattaccctgataaatcctttgaaaaagcaaccacttgctgggggaaaactttttttttttttttcgatgtgtcaatgttctatcaagaaaggaaggagtactctcaccaaaaccaaactgaaaccaagaacccagaagaaaacagaacatacccagaaccagcttgcattgcattttgaaaacacttgaagtacctaccccaagtgaacttttttcattttttctacaagacagggtcttgctgtatcacccaggctggagtgcagtgatacacccctcgacctcctggactcaagcaatcctcccacctcagcctcctgagtagttggggctactcgccatgttgcccagactgttcttgaactcctgggctcaagaccattcgccacggcctcccaaagtgctggggttacaggcgtgaaccatcatgcccagctgacctttaattttcatgactctggcaaagcccaggatgcacccaaaagtggtgtcaaatacgagaaacccattcctagtacaactaggactctacctatcttgaaacttggtgctctgtgacaggagaatattgtgagaatttgtaataacagtttgggctttgtgaagatttgcaggcttaggtggtcccaggaaattcaagcagaggatttaatttttagagtgattccaaattagtaaaacaaccagctactggcagaagcaaacactgtaggaattgcataatagctcacattttaaaaccagcaagaaaaagtacaaggtaatgtagcaccatgagttgccaaccaatttgcaagaatcaaaacattaaatatcaatatttaaaaaatattagtcaaattgtaaaggaagactaaataagtgacatcttgtatatggaaaatcctaaatcataaaaaccacttagcgctcatagaattaggcaaatttgcaggatacaagattggcacacagaaatcagttgtatttctttaaataattattctaagcaatccataaatgatgttaagaaagttccatatacaatagcatcaaaaagaataggggcccagtgcagtggctcacacctataatcccagcactttcggaggtcgaggcgtgcagatcacgaggtcagcagtttgagaccagcctggccaacttggtgaaaccccatctccactaaaaatacaaaaaaaataaaatagctgggtgtggtgacgtgcacctgtagtcccagctactcgggaggctgagccaggagaattgcttaaacctgggaggcagaggttgcagtcagccgacatcatgccactgcactccagcctgggtgacagagtgagactctatttcaaaaaaagaaaaaattaataagggaaatgcaaaaacatgtacactgaaaactatcaaacttctgaaagagaagtcctgaataaatgaaaagacatcctgtgttcatggatttgaagatttaatatgctgaaatgacagtgattctcaaagcaatctacacattcaatgcaacccctatcaaaatcccaatgactgttttgcagaaatgataaagtgtaaaaattcatacggaattgcaaaggactgcaaggagctaaacaatctttaaaaagaatgaaagtaaggaactcatacttccctatttcaaaagttaatacaaagctacagtaatcaaaatagcatacacaggaacacatagactcatggaatagaattgagaggccagaaattgtcatacatttacggtcagttgatgtttgacaaagatgacaagaccattcaatgggaaacaatagtctctttaacaatatggtgtagagacaaccagatatctacatgcaaaagaatgaatttggacccctacctcacatcttatgcaaaaattaaaatggatcaaagtcacaaatgtaagagctactaaaaccataaaactcttagaagaaaatgagagtgtatctttgtgttcttagatttggcaatacttagagatgacaccaaaagcacaaacaaccaaaggaaaaagataaattggacttcattaagattataaacgtgtgtcaaaagacattataaaaatgaaaggataacctacagaatggacacaaattttcaaatcatctatgattaggctctagtattcagaataaagaatttttaaaactcaacaagaagatgaccctatttaaaaacaggcaaaagatttaaacattttcccaaataagataaacagatggctagtaagtaaatgaaaagatgttcaacatactagttattagagaaatgcaagtccaaaccacaatgatgtatcactttttaccccatagaatagctgtaaaattttaaaatagaaaatgtgctggtgaggattttgtgaaactggaaacctggtacaatgctggtgggaatgtaagatggtgcagcttctgtggaaagcagtttggcagttccccaaaaagttgaacatagaattattgtatgactcagcaatttcattcctggttacgtacccaaaacaactgaaaacaggtattcaaacaaatacttgtaaatgaatgttcatagcagcactcactattcacaatagccaaaagatggaaacaatgaaacaaattgtggtatttccgtacgatggtatattattcagccacatgaaagattgtagtattgatgcatgctataatgtggatgggccttaaaaacattttgctaaaagaaaggagcaaaacataaaaggtcacatattgtataatttcatttatatgaatatccagaatagttctatagagacagaaagcagattcagctactaggaagatagggaaatggggaatgactgcttgatgggtatgtagtctcttgtgggtggtgaaaatgtcttggaactagaagttattatggctatacaacattgtgaacacatgaaattacactgaattgtgcattttacaatagttaatatgtgaatttcaccttaaaatatcagtgacaaaagatagtaataaccaacatttatgtaatacttttaagtgtcaagcacttttctaaattcttcagacacgcacgcgcgcgcgcacacacacacacacacacacagatattttatttattttttgagacggagtttcgctgctgttgcccaggctggagtgcaatggtatgatctcggctcactgcaacctctgcctcccaggttcaagcgattctcctgcctcagcctcccaagtagctgggattacaggtgcttgccaccacgcctggctaattttttgtatttttagtagaaatggggtttcaccatgttagccaggctggtctcaaactcctgacctcaggtgacccgcccccctcggcctcccaaagtgctgggattacaggcaggagccactgcacccggccaattctttacataatattaactcttaattctgataacaaacttgtgtacttatttaaatgcttatattatttctattttatagatgaagcaactgaggaaaagaggttactatttgcccaaagttactcatctaatggtagaggttgggatttaaatctagataatcagattccagaatcttacctctctatcattatgggagaaataaaataagtttaaaatatgaataaagagcaagaggctattaaaatgatcaatcagatttgaaaaataaccaaaagcagtacttccagaatttagaaaacaaactaattaaaacttaaggataggtttaatagcctagttgacacagctaagtaaagaattagaggaatgaaagatatgaaaaaatcattctgaatgtagcacgaagatgaagatgaaagtaacagcttaagaaccatggaaaaataacttggtctaacacatggctaattggagcttgaattcgaattcaatttactgcttccaggctccaaatgcgcctttcaataaagtagttcctcattatccttgggagatacattgcaagacccctagtagataattgaaaccacagatagaactaaacccactatacactatgttttttcctatatatatatatgataaagtttatgttagccacagagattaataataaaatacagcaattataacaatatactgtaataagatgaatgtgaactctcaatacatcttattgtactgtactaacccttcttgtgattatatgagataaaatgcctaaatgaagtgaatgacataagcatgatgacataaatgaataattccagaaataaacaattcatgttttaaattgcactgtgttctcagtaacatgatgaaatctcatgccatcccactccttcctgctcagatttctgttagtcacttagtagccatcttggtaatcacatggactatcacagtattacagtgctgtgttcaaataactttttttacttaataatgttcccaaagcacaagagtagagacgtaatattttcacaccatggtgaatcatgggtaagaaaaactgtagaaaatgaaaccatagataaagggatactacagatggtgtttgacttacaatggttcgacttacaattttttgacttcatgatgatgcaaaatgatacgcattcagtaaaagccatacttttgagtagccatacaatttttctgttttttccttttcttttttttttcttgtttgaaacactctgtcacccaggccggagtgcagtggtgcgatcatggctcactgcagacttcacctcctgggctcaagcagtcttcccacctcaccctcccgagtagccgggaccacaagcacatgcactgcacccaactaatttttgtttttatattttttgtagagacagtgtctcccaatgttgcctaggctggtcttgaactcctgggctcaaacaagtctcctgcctcagtctccaaaagtgctaggattacaggtatgagccacagcacccggccctgttttccattttcaatgtagtattcgataaattacatgaggcagtcaacactttactataaaatagcctacagtaagataaaataatccaaaacaagtctaatgttaagtgttcagagcacatttaaagtaggctaggctaagctatgatgtttggtagcttaagtgtattaaatgcatttttgacttatgatattttgtatttacaatgagttcattgaaatgtaaccccatcataagtcaaggaacatctgttactgtatatcttctgtgataggcaactgaatttttttcagagtccctcctttaacgtgggcacgatgttaatctttctaagtaaagggcattggaggaatactacagaggaagaggttctcctgctattcctgttatgggctgagggttggctagtgtgagtatgaagacaaccagtaaatatccacaggcccaaaacacaatctgtctgtgaccttgcagctttggcctgctgataacctttttgcacccctcttcacaaggaaaccaaagctcttgcatggcctgcactgacgtttgtggcctggagactcacacatctgaagtcactctttaccagcctctgcacaacctgtgcatagctcacctgtggcccagtgctctacacagatctaccagtccctctgcaacttcctgtgcagcctaaatgctctggatgcattccaccctatgagtggtagattatttaataatattatttcagtgttggttaattacatttgattattctatgaatatgtaatatgttgatattaggggaatctggtcagtgtgtataggggaaatttctgtactaattttgtggattcttctataagtccgaaattatctcaaaataaaaagccttttaaaatgtagggtaaacacaaaaaatagaaaaggtgcataatttctaaattagaaga

SEQ ID NO: 247 - DNA, 1854 bp, Homo sapiens
cctgtgtctggcagagctggtgtgagacgagacaatcctgccccgccgccgggataatcaagagttttggccggacctttgagcatacaccgagagagtgaggagccagacgacaagcacacactatggcgctgaaacggattaataaggaacttagtgatttggcccgtgaccctccagcacaatgttctgcaggtccagttggggatgatatgtttcattggcaagccacaattatgggacctaatgacagcccatatcaaggcggtgtattctttttgacaattcattttcctacagactaccccttcaaaccacctaaggcaagttgcatttacaacaagaatttatcatccaaatattaacagtaatggcagcatttgtctcgatattctaagatcacagtggtcgcctgctttaacaatttctaaagttcttttatccatttgttcactgctatgtgatccaaacccagatgaccccctagtgccagagattgcacggatctataaaacagacagagataagtacaacagaatatctcgggaatggactcagaagtatgccatgtgatgctaccttaaagtcagaataacctgcattatagctggaataaactttaaattactgttccttttttgattttcttatccggctgctcccctatcagacctcatcttttttaattttattttttgtttacctccctccattcattcacatgctcatctgagaagacttaagttcttccagctttggacaataactgcttttagaaactgtaaagtagttacaagagaacagttgcccaagactcagaatttttaaaaaaaaaaatggagcatgtgtattatgtggccaatgtcttcactctaacttggttatgagactaaaaccattcctcactgctctaacatgctgaagaaatcatctgagggggagggagatggatgctcagttgtcacatcaaaggatacagcattattctagcagcatccattcttgtttaagccttccactgttagagatttgaggttacatgatatgctttatgctcataactgatgtggctggagaattggtattgaatttatagcatcagcagaacagaaaatgtgatgtattttatgcatgtcaataaaggaatgacctgttcttgttctacagagaatggaaattggaagtcaaacaccctttgtattccaaaatagggtctcaaacattttgtaattttcatttaaattgttaggaggcttggagctattagttaatctatcttccaatacactgtttaatatagcactgaataaatgatgcaagttgtcaatggatgagtgatcaactaatagctctgctagtaattgatttatttttcttcaataaagttgcataaaccaatgagttagctgcctggattaatcagtatgggaaacaatcttttgtaaatgcaaagctgttttttgtatatactgttgggatttgcttcattgtttgacatcaaatgatgatgtaaagttcgaaagagtgaatattttgccatgttcagttaaagtgcacagtctgttacaggttgacacattgcttgacctgatttatgcagaattaataagctatttggatagtgtagctttaatgtgctgcacatgatactggcagccctagagttcatagatggacttttgggacccagcagttttgaaatgtgtttatggagtttaagaaatttattttccaggtgcagcccctgtctaactgaaatttctcttcaccttgtacacttgacagctgaaaaaaaacaacatgggagtaataatgggtcaaaatttgcaaaataaagtactgttttggtgtggg

SEQ ID NO: 248 - protein, 87 aa, Homo sapiens
GARRQAHTMALKRINKELSDLARDPPAQCSAGPVGDDMFHWQATIMGPNDSPYQGGVFFLTIHFPTDYPFKPPKASCIYNKNLSSKY

SEQ ID NO: 249 - DNA, 107304 bp, Mus musculus
  misc_feature (1)...(107304): n = A,T,C or G
tcctgtctcaaccactattgccaaccaaaaacaaacaaacaaacaaacaaaaaaccaaaacactgtcccaccccagaaaaaccactaagggatgaaggaagaataagagctttggggacagtaaggatatgagaacaagccaataagaacttggacaaattaacttcacaatggcagtcaggtgctgggcagtgggccaggcaccgagagataacctgggatagagaggaagggtcacattagctttgattgggcaccactactctcgggccatgtgttcttggtggggggtctctgtgtcacttgagaaatcagatctgtagaatggcttccccgggtcacttgtgtggctcctccggggagatggctctagggaagagtctcgccatgagatggggctgagtgggtggctgctcttgaatgcactgacagggggccaaaagcattcgggatgtgctcctacctgcccagggagggatgctcaggctcctgggagtgggcattgcctgtgactcaccatgagctaaggtgagcaagcctcctgctcctggccccagctcaaagcctccaggagcaggctgtaactctagatgctcatggaagcagaggcttgcagtctctggggcggcctccagccctctccacatggtgtctccggaagtggcgctggtggatccgggggttctgttctgcctcttctggtgggaaaggtgtgtgtggtcctgagaccaggactgatacgcttgctggaggtagtaccttaggccatttggcagcatctgagacacttgttctagcaggtgactgctggacagctgtcccaggatccttattccccacctttgccctttcccacctagaaacatctcctttgatacctactccgtctccatttgcatctcctgaacccttcccgtccttcctagatggccttgtgttgctgggttcaaaacttggaccctactgtccaccttttacttatctgtcctttagccactttctctgtattttagtttcctatgacagaaaaaataggaagaaaaaaaaatctaagcatcaggggaatgttaacattatttattcatgtgtttatattttatgtgattaaaatataattataccatttcccctttctcctctcttacccttttcctggctccatccccgagtcccctgcttcctctcctttaatcatggctgtttcgtagacatggaaacaaatagactggttaagtgtagcctgttgggcctggttagtgttgccagcagtgcttggaattggaaacccagtcagagccctcattctctgggagaacttcttcccgccttggttattgctaatggtctatagctctccatcnnnnnnnnnnnnnnnnnnnnatagctctccatctaggggtggggtatcaattttttcgtgcatagacacacacacacacacacacacacacatatatatatatatatacatatatataatgtgatgtggggggtgtgtgtgtgtgtgtcctggacactgggatagacttatgtgggtgttgcaggtctggcccccagtcctcacgtctgcctgcaagattaaatatttagggagttttctgcctagcgttgggagttcagagggggatgaaagtagacactgggaaacagatgaggtacagaaaactagacagcacctagcacctagcacagacagaatgctcaggaaatggtgggccctcctccttccttcccagggtcatgccctggctccgacacacagccccgatgtttgctgaaaccttgcagacctgactggctgagctgggaagctgagctgatctagtcaccttagaatgtgccaaccaagaagtttctctgagggatttatgagatgggtaagccctgagggcgtcaatccaagtcttctactgtctgctgacatgttcagccggcatctaaaaatggaacagtaagagtttgccttccttgcttgagggtcatcccggtgtttccatagagtaccctgatccgggcttacacctctgaggcagaggtgggtggtgtcaccagtagcagctaaccttgtcattttcatttgccacctcaacacaacctccttgcagaccgggtggtgtagatcgagcaggaagggctataatctgaggcgggggggttcggggggcgggctctgaacacttctaagaagttctttgggggctccaggacggatttagatgtttctagttttgagagtatgacttgacaggtggaatatttccctagcatgtttaaggctgggggtttccatccctggtataacgaaagtgcctcctactgctgcaaggaagcccagaaacagaaccggtggttgcaagggcagaggcagagggaaggaagaccgtgggggaggggattatgaagtgaacataggaatagtctgactcttgagacccgtgatactggcagacactcctgacagaaggagacgggtgtaagactgtgttacgaattacatcacagggctggagagaccgctcatcctttaagagcactggctgttcttgtggagaaactgagttcgattcccagcatccacgtggtggctcacaaccatccacagtgccaatgtcaggtgatccaacatcctcttttagctcccttgggtatctacccagcatggacatagtgcatagacatacgtgcagacaaaacactcatacctgtaaaatggaaataaatctcaaaagaaaaattgcaacctagtctgaatagggtgatgcacacctgtaatcccagtactaacgaagcagaaggaagcaggtctctgagagttcaaggctagcctggtctacaaagcaagttccgggataatcagagctacttagtgagacctaaaaaaaaaaaaaaaagtactacaccctctacactggaagaccagagatgggttgttcccagtacccctgtcaggtgactcacaattgcctctacaactctacctatccagtatccacttctggtctttacaggcatggaaggcacctttacaatgccccccaccccatacatatcttaaagaaaaatacaggcagccagctgattatcaggcacagcctcatccctcgtgttaccgcgccaatgacccatgaggttggtgcccagttttgaatctttatttaagagaggaggaagcagggtcctcggaaatatatccgtactttcctgcgacctggcagctaagagacaggacactgtggccccagagcgactccaaagccttactgcttctgtcacctactaggtgaaacatgatgggaagttagcgtgtggagcggagctgtacgcgtgggagggagggactgcctttgccggagggggtttccacctggccaagctccggggaagcagaataaactgttgagttctgtccctaccttggggtgattacctgggtacatgaagcatgccatctctattcttgcatagtttctttaatgactctggtgattgacggcttacctagccctactctaaataggggtttggagagctctcacctcagctttcttgtcccggaggatcttcccgaggagtctaggctaccatccgagccactctgaaggcacgttggggatgagaggactcgcatcgagatggcggctgattggtttcaaagcctggctctgccctgggcttgcctgtgtggccttggataaatgaaatgcttccacggtctcattttccagcgcctcagcttagaaaaggaaggccactgtccaagtgttcagtgagctggacccggtgctgcggtctgtgaccccagccctgggaagctaaggtgagccggcaggcgctgagtgtggagccagcctgggttccacagggagctgcaggcctgcgtgagccacagtaaggccttggctcccgcttgccacctccgacgcgtgttagaagaaacacggaagcacctgcgggaagggaatggaattacctgaaaatcaaatctacaggaaggaattttggtggcccacgcctttaatcccagcatttgggaggcaaaggcatgtgggtttctgagttcgaggccagcctgatctacagagtgagttccaggacatccagggctaaaatgttgcattgctaccataaagataaagcaaagatnnnnnnnnnnnnnnnnnnnnccataagtgtttgggaaattaaacaatatgtttgcaaaaaaaaaaaaacccacaaataaatggcacatatgcccaaacaaagtctgtatgcgaatgtttactgtcatcttattcgtaattcccagtgctaggaagcagccaagatctcctttggcaagaccgcataaggaagcctgggattcgcagatagtagacttccacttggtggccaaagaggctctgttgctgtcctgttgacatcatcagaatgcttgtgacttaggaccctgacccagagtgcggagtgcacaggtttggggttccttttgaacacttgtaggtgcacatgtggaaggcagaggatgtctctctggaggcgggtctcttcctctatctcgtgagtcccagggacttgaacacagggcaagtgcctttacctgctgagctgtcccacaggccttgctttgtttgaccgggacttacgtagctcaggctggcctccagctttctatgtgtgtgagggcaacgttaagttactgatcttcctgtctccacctctcaaactcggggatcatattgcggcattttatgggataatggggatcaaatcctgggctttgttcattccaggcaaacacactttaccaccagagctagtcctactctggattaaaaatctgtctcagattaagacagctctgagacgggagttggcttggcagtgacggccccttgctgcttggttcaggctcagttctcagcactgctgtggaatttaacagccatcttccgtgacactggctctcaagcttcctaacgccaagagccttcagtacacagcttctgatgttgtggtgacctccaaccataacattattttattgccgctttataactataactttgctactggtttgagttgtaatgtaaatatctgatatgcaggatatctaacatgaccctcttgggggtcatgacccccacaggttgcaaaccgccacaccgtgggctttagttacattcaagcaaaaacactcatacacataatagatttttttttttttaatctatgaagaaaccataacaagacttggagagggctggctgtgtactgaagttggttagctttttttgagacagggtttctctgcgcagtcctggctgtcctggaactcattctgtagaccaggctggtcttgaactcagaaatccacctgcctctgcctcccaagtgctggcattacaggcgtgtgccaccattgcccggcctttggttagcatttttacggaccacttatacagtcctgggttaggtctccaatagcaaaggccctggatgtgttggcaggaagaccccattgggaggatcagaaattccgtcctgcctaggagacatgagaagcagagaaaggctgcacaggagggcctagctgagggagctatatcatgtggtgttctgatcacgtggcattctggaaaaaattaaaactatggaaacagtgaagagatcactgctcctcaggggactgagcagacagatgaacaggcacaacttgggaattttaaagacaaagctagtccacatgacaccgtaatggtgcgtacatagtacataccacggcatgcttgttcaagtccagggaacttacaatagagagggacattgtatagtgttgttgctagtggatctgttaggggaagctgtatgtcagagagtgcttgctactttgtcatttttttcccggtagcttgaagttattcttcctctttctgtatgtatgtaagcatgtttgcttgtttttcttttggtactggggatcggacccagggccttgtgtgtgcaaagcatgttctactgcagagttatacgctggggaccttgacctgtgttggtacctgagtcctgtacccgggacccactgtatgtggaaggagagaactaatttcagaaagttacaagaaggtcgggtaaggaagctgtctgggcctcatcacagaaaatggcagcaaaagagaagacatgggcaccaggtgtctggggaagaccgactacccctgcctattggtgcggtgtcagggagaagacacaagtgagatactggctctgaggatgagagcatgcttaagccgggcctggcaatgcctgctccccggagtctgtgcctgaggcggatgatgggtcctgggaggctctccccggagtctgtgcctgaggcggatgatgggtcctgggaggctctccaaggctcctttgaacgtgttcagtgggtagaaccatcctataattaccatggggataattagaggcgctttcatgctctctttcaacaaatattacacaagctatggccctctcatcttgggaggggtggggtggagttggtggagatcagagtgcccctcctgggggggcgggcagccaacacctgaagccttgccaaacacacctgactcctggccaaagctcagagtgttggagatacacctggggctgctccagcttagagctgagtgtctctggcacgggcactgaaagtcactctttgacttccaaccaatgctagggctccagttcattccggtctggcctttccagaagaccacaagtctgtggtgctcttgatggtgacctggagatgcctcctgcatcctgacaggcttagccttcgatgcctgagccaccaggctctgggctttgtcttcatctctagggaccgtgcacacggggtttctggggcctgggagaccttcccagccccacctagggcaatttggttcttgtcataggctctgtgtgttttcctgggaaccattttgggagcttctggttagcgcagagtcttctgttctagggaggcgttgggtttgttatctcggtcacttcagctccactctcctcagactactcacttggcctaatcttctgtgactcactgcgactcaagcctaagagaattgcccagaggcgcctgcttgtcatttctgttttgttagctacttgtctggtctgttttgttcccaactcccttgagaaagttctggcacctcccatagccacacctggttatggcttcaggcctttcccatgggatctgaaaccccagtcactccgcttggagactcagagtgactgtgtcacgcttaaggtcacaactggcttttttgcagaagtacctagaattgttaaggcttctgcaaatgtcaagaatttgggcttcgccccgggcgtggtggcactcgcctttaatcccagcactcaggaggcagaggcaggcggatttctttcttttttttggtttttttgagacagggtttactctgtgtagccctggctgtgcctggaactcactcgtagaccaggnnnnnnnnnnnnnnnnnnnnnnnnnnnnnnnnnnnnnnnnnnnnnnnnnnnnnnnnnnnnnnnnnnnnnnnnnnnnnnnnnnnnnnnnnnnnnnnnnnnnnnnnnnnnnnnnnnnnnnnnnnnnnnnnnnnnnnnnnnnnnnnnnnnnnnnnnnnnnnnnnnnnnnnnnnnnnnnnnnnnnnnnnnnnnnnnnnnnnnnnnnnnnnnnnnnnnnnnnnnnnnnnnnnnnnnnnnnnnnnnnnnnnnnnnnnnnnnnnnnnnnnnnnnnnnnnnnnnnnnnnnnnnnnnnnnnnnnnnnnnnnnnnnnnnnnnnnnnnnnnnnnnnnnnnnnnnntttgggcttcactgtttcatctccccaggacaccaggggtttgggttgggcagaggtttgaaggctgatacctttctagctagaaaaaggtggttttattgagaccttgggttaaaccctctctgacaccttttcttggcctctctggtgatactaaggagggggccacctagaacctggctggtcccagcacctggaatgtggcgggggtggggtgggagtggggggagaggaaggcggaaggtatgtgggaatagtgaacttggccttttcacgaaaggcttcctttccccctggagaacaagcaaacagaacctgtatatagggcagtggccaactgacctctccggtgacagagtcagggtgtggcattccctgtaagcctgggcaggccctgggaaactaaaagagtcagagcctggcttaatgatgggcgagccggagaggatcctgaatgggcaggtactggagacttgctctgcaaagggagaaagagatagggtttctgggaagcgtactgtgttcgttagccaagcatggcccccaaacctcatctttccgttcacaagcatagtgactgagcgggaggcctagggaggccttcagagcatggtctccacccatcattttagtgtctttgtccaacaacctgtggcataaactgttcattcctgcctggttccaagctcagcccagaaattcccattactgggtcttgctctctgccgctctcttggcaaaatgatttttctgttggtaagcctcttgtggtctgaggatgtctcactcctgcctgagaaaatgttctccaatgcctttggggagggggttcagttcattgtaccatcctgtctttacctcaggcctacgttcctgaggttggtctctggtccaccacagctttctttcttcttcttctttctttcttctttcaagatttcattagctcaggctggctttaaactttgtgccaaagtctgtaagtcaaattctctgcatatctgaggatgaccttgatctattgctcagtatacacccctccccccaaggcccacccactacagttctgggagtacagtgtctcgtggtctagttttgttgctttaaaaatcctccacgtgtcccttcagcctgataaccagtgaactttttgctgtttccatagtcatttttccagaatgtcatgtggtcagaaacatacactgtgtagcttaaatatgtttcctcatctcttgctatatgcttcttcacgtttctccctgtctttcattaactcattatagagtctctctatgtattcttggctggcctggaactcactatgtagaccaggctggccgcaaactcttagagatctgcctgcctttgctgggattaaaggcacgcaccactaggcctgggtttttaaattttttttcctaacacatggtcacacacaacgctctaacaactgagttatgcccattcaccctatcaaagtagcctgcacccttcctttagtctctattaattgctctccattattaatagccccatgactctgaaataatcttcgtgctttagccagctcgaaccacctatgtctcttccctgagaatatgcatgtaaggacaagggcctaggtgaaggcgctgacgcctagctggcacccaacaaggaccccgctgatcgcttctatgaagacgagcatggtagcatttgacttggcaccaggcgccgcgaagggacgtttgcagaaaccaaggagggggaccgcgcagcgcgggaacccgaatgcagcgctctgtccgcattttgacagttgactggcagctgaggacccagggacagccgacggtggatgatggaaggttgacagctgagtggcagtcaaccgccgcgcaccggggaggaccactgcgcgcccaagaggcctagcgcgcggcggccgctgcagctaaccgtagccccgagccgacctgggctgagcgctccgcgcatgggcagcgcgcgcgagggggcggggcgccggggtcacgtgagcgtgttttgggcacctgaccagcggcccgggctcgcccccacccgctcgctcgctccctcctccctcggcgggcgggtgtgnnnnnnnnnnnnnnnnnnnnnnnnnnnnnnnnnnnnnnnnnnnnnnnnnnnnnnnnnnncgccgctgccgccgccgccgccggccatgtcccccggccgccgccgccgccgcccgagcgcggcgctcccgcggaccggcgcgcactgagcgcgggcccgagccaccgtttcggggcccttgttctccgcgccgccgccgccgccatgttgggtttggagccgcagcggagccgccgccgccgccgcggctgacgaggccgagcgcggagcccggggcccgcgcccgctccggggctcagggagcggggcccgtcggagtctgtcggagcccgactgcctgtcctccgtgcgagcgagtgaaggagcgagccgccggggcccccggccgcgccctctgccgccggccgagcgagccgcggagcccccgagaggcagcaccatggcggaacagacctattcgtggtgagtgcgggcttttggggacgaggaggccgggccgggccgggccgcaggtgctcgcggggctcggggtgcgggccgctgggcgtcctccgagcccgggggaggggcggtcattcgagccgcgcagcggaaccgactggcgcgggtgctggcgggccaggggggaagctggagaagggtgggcagagaacgggcccgggcgaaggtgtaccccactctcggcgagaacaggtggtaagaggcacaacttgcaagtagtgagggcgggagcgaccgcttccgcggtgggcagaggccctgcggccccgtgatcgagccctggcacagcggagagggggagtcttgttccaggatggccacattctgtaaaggaagtcgtcggtagcagcggggtcatgggtagtctttgtaaaggggttggtactctgctctggggattcgaagagtgctggccggtgttctgggggtggagggctcgatcacgggaatgtgtgtgtgtgtccgtccaggttgagtccccctgcctgtgggacttttttttagcagcgtgtttagggctgaggcacacacacttgtgatttacaggggggaggtgacagatgcgtccaagtttggggggaaagaggtgagaagggcagaggcgtggagtgtttgccgcggaaggaggttggttgtaccgggggcgagtgggaatggtgtagttgagctgtggcttgagggtgagaaaacaggagatgggtgggttggtggtaggtaccgggcgggcggggaacctggtcgctgcagcctaagagatcggagatggtttcaagcacttgtggcttggtaccagaactgtcgacttttccgaagagtggggttgaaggtccgcttcgttttgtaattggaaaagtgagttagttcttcattcctggaccctaaacctttaagtaccagaattgccttttccctaacctgtacagattgtgtggctaccttcggaaaagtgagttagttcttcattccttgaccctaaacctttaagtaccagaattgccttttccctaacctgtacagattgtgtggctaccttcccaaagcacggggcaaactgtcaagtgttgggagcgtaagtgagctgtaactaccatagggagacagtaaaagagccgggttatacacgaaaacaagggatggttatgctaagtcgggagctcactgtgtcctgatggagggttagtgatcgaacatgctttagtaatgcaaacggcagcgatgtatgcacaatctgaaaaagaaggtaactgggaagttgagaggaaataactaaaagaaaagttgggttttggtggctccagttgtggtttaaaaggacagactaatagttgtgagcagcagtgagggaggggcatctcaatggcaggtgggattcagtttcttacctgcagatggactaggtaatgttggtgctgccatgggcactggcaacacctagagcttgcttgtcctgccccacgaggactcctctgtgaatcctcatggctgccttgttggtttggtttggttttgaactgtactgtaaaaagaatatggattggttgaaaaaaaaataccagtgatgaggaactggggaaagtgctgtgtgcaacacacattcgcagccccagtttggagccacagagtgatgtcctgtgtgtaacattgaaggtgaaagtgccttaatgggtaggtaggccacctacagcttgtgtggtgcttgtgggctaggtaaagagactactttgtggaggctgatcatttatatgataaactctcttgaaacacttactcccttgggtcttgactttatttgatggaataaaggaagcaatcgagtgagtgccttgccatcaggaccctcagcccctcctttccagcttgttttcaggagcagagtccacagtgtcctgaggaaggatggtgcacaggggagagggctgggaagctcggcccctaccctgttttctggttcttccaagtcaaccagggcacaagaactaaacacacagtatttggcagatagttctcacatgtctctaaggaggggaaatcttccgtatttcagaggaggacacaggctcaggaggccaagtgatgtgtcctgagtatgtggcccatgatgctttgtgaactctctgcttcacctattctcacagaaatatcagaatgcaagagctattctggacatatatggaagctgaagtttggatttttttggtcattcttcacttgttttttttagacttatttattattatatgtaagtacactgtagctgtcttcagacacaccagaagggagcatcagatatcattatgggtggttgtgagctaccatgtggttgctgggatttgaactcaggcaggacctttggaagagcagtcagtgctcttaaccgctgagccacatctctccagcccttcacttgggttttatagatatatataaaaatgatactttaaaaacagaatcaagtgtgattatttgtattctgcatttaggaagaatgtagttttatctgagaacaaatcccagaagggatgtagtatttaaaaataggcttatgttatagcctctgacatgtaagttacatataaagcaagattgctgggattggtcaatactgtgatgagctcacaagtttgttattttattctgttgacttgtacatatttaacttttttgtaatattaaaaaaattggaccctacctataagatcatgtggttctgatttcttgtacatgttcatttcctagaaaattttgtcactcaaaggtctagctcaagctccatctatctgaagtgtgttctgcccattcctgaaggcagtcttgttatttttagtacttgtggtcctgtctgcatcacctcttccacttgttatgtaaatcctgagcctggtcactgtcctttgagagagagggctgtggtacacctgccctttggcctcttctagtgcctaacacagtgtctggcacacagcttttgtccaggaaaccctgtgtggtgagtatgacaggggctactgcaggattcctgtctactaggtttcctgatgtcccatcatatttacaatatggtgtcatactttgtttagtcttctgagacaaggcccactgtggcatccaagctgacctggaacacatgatttcaagccgaccttgtaatcactaggtcagctacctgcttatcttttggatgctggacaacaagccagcaacactgctccctcttgaagtttggaaggatgccaggatcttcttttttctatttgttttggttagcctttggtttttatttgtttgttttgttgttttgggctttttcttttctttctctctttccatctttctctctttctttctttctttctttctttctttctttctttctttctttctttctttttttgggacacaggttgctccaagtttaaggctggcctgagaatggctttatactcctgacctttctgcacctcctcttccgtgctgggatcatgggcaatgctgccacatgggttcccctagtgctggggggggggggttcagacccagggctttactcactcacattatgcaagtagtcacctactgagtgcatcccagcctcccgaaagcctcatgaattaaccgtcctttttactctgaggaagtaaaagaatgcatgcaaacacacgaactgaaagttgaagggaaacacttgcccagtgtgtacttatgagtagttgtttcagtgtaagtactgtgagaagcctgaacttggcacttgaaatcaatgcaatctttgtgtaggattgcacttgaacctgctaatggttgtgcttggcttactgtttctgtagggagaaggccatcttcctgcaacattcaagtgagtctcattacccgaaaactggcatagtaatttattttgtattttcccttgtgctcatgttttgaggattggaaagttaaaaaactagggctcaaaagactatttattataaggcgggctgatgagactgctcagaggtgaatgaactgcttccccagcctgctcacccgagctccacagagctgtcctgtgttatactcagttatacatgtgtcatacatgtgctcgtgttccacatacaaacaaaatggaaaaaataaaaataaaagactgtaactaactcacccatggatacaaaccatataagtactcagagtcaagactgtgtgactgtgatattaacaatttcagtaactcaggcagaggcaggtgatctctaagttggaggctaccctggtctacacagccaggtccaggacagccagggccacatagagatcctgactggaaaaaagggaaaaagaaaagcacgcctagctgtaaacatagggagaaggcacaggagtttgtgtttatgtgagggatgaaagagttttgtcaggctgttgtgtttctatctctgagagatgacagacagacagaataccttacccaaggctgtgttgagttcttgtcctgtagtaggtagttggtagaatcttatggagcagatgagtaagaattgcttttgcctgtcctgctggtggttctctgtggtcatggacgttatgtacagagaatgaagaagaatacaggtctcagagctagtggacgtcaaccctgatttaggttattgttatgtacgttgtatttggtcagatcaataagattttaacaggctgccactatttcagaatgtagtttaaaactgtgattaaggttatatatagacttgacaagacttactcaaacatgcttgcctataggataaaaagtgctatgatgttatgatttgagtcatatgatatttaagctaaaattagccaatattaactccataaatttgtttttaaatcattactcagtattattatgagtttttgtttttgttttttcgatacagggtttctctgtgtagccctggctgtcttggaactcactctgtagaccagactggcctcgaactcagagatctgcctgcctctgcctcccaagtcctgggactaaaggcatgtgccacatgaagtttttaaaggcaaagaaattggagatatttttatatgatcattccctctacagatatcagatgtagatacagtgtgagatgtcacacagctatgattgcaatgtcagtctcatcagtaaatcactaagtttcattgttcatcaaaccatgcaaaatgaaaggatagttttgtgtaccatgccggtctggaactcacaagtttacctgcctctgcttccagagtgtgggctagaagcttgcatcactgctcccacccaggatggactgtgttttagttgggcattggcatctagacgcttgagtaacttacttcccttacgtgcctgagtgcatctgacctttagagagcactgtaatttgttttcaaaatggttttaaggggtttgttttgtttgttgtttctagacagtgtttctctttgttccttagctgtccttgattctctgaatcatgctggctttgaactcagattcgcctgtctctcaagtgctagggctttacaaggtgtgtgccaccactgcctgctaatgtttttagagtttaatggttctttcttggaagttaaaatgttatttttatgtgattctgtaaactgagaatctgtaactttgagtttctatattacactttctaatcttaaggagttagttgtagagtgcttagacatttaacctgttaggtgtgtcccaaaagacttccgagcagccaggtcagttttataggaaaatctacgggttgttcctgtgacctttgggaagaactgtcacctttcatattttaacagtcactgtcactagggctgtattttaaataagaaagtctcactgatggagtcctacaaaaaggtagcactagcctgctggagacctgtagaaaagttttgatttttgtttgctttgcttacaggatttcttctaacttgtagaaaagttgtagataaactattttggaatttgattattaatggttggccttctcctccaatctagactacaattgtggttttcactttgtgacttacactgagtgtaagtgaccacacagatctcttactacattgaaatttaaaaacccaagactgaattctgtgtttgcactgggaacttcctggtttgagagagatgttttttccgtctctgattgactgtatatcaggcctagtgtttagtcaggcactgtaccactggaacaaccccccaaacccaccacaccaccaccaccaccacaccaccaccaccaccaccaccaccaccaccaccaccaccaccaccaccaccaccagtgtttaactgcttctgcccttcctctgcaggcttcagaggttctgtgagatgctgtgtataaatgcttctggaatttctcagtgctctgtaaagagcggttgcatattttctagttacttattaggttccagacagagttcttccgtatataggaatgacttttctttctgaccgtctaaccaacattgaaactttttgatgtctttatcaggaatgctaagtgatattgtataaaaaaagtagaataacttgcaatttgctgttgacttacaggtctgggtaggcagttcaggaccttccacgggtttcataattcaccactgcagctcacatggaaaagaaaatgataaggttacattttttttcatacaataattatatggatcctttgaggggcaagtggactttccctggacttctctgtaatgcacaggaaagttttgcactcttttaacggccaggggcaaggctttagcagtttcttatctatttccttacccacagtgagtctgacaggcacacccacttccctccatctagcagcccagactgcactcttgacctaaataggacatgtggggagaaattgtgtacattgtttcttcagcctgcaacactgaccttccgagagcctaattctgccttcagaatttgattaaatctttcatttgtttaaaagaaaatattgtgctggcatccacagctccttttttgatttaaatacatgtttgaatccatttctcagaaatgcttataagaatcttagaagtcttagaagtaagaatttattgtaaagaatgaattatctttatctttgccttggctagtgcaaacatatttagaaatgttgtctggaaccacaagcccagccagctgaagactagggagagaagacgttattaaccaagtgagggcaaaagtaggagaccagacactcaggacacttgagaagttcacagtgagcaagggactggagtcagaggagcagagactcacagtggctccagtgattaggacagagagtgagaggaggctcatcaggagctccgggtgaaaaaaagagcaaccagaaaacagaagccaggccatcggctttgccaaggaagtccttagtgcagtagagctccaagcaggtggggtggagccctgagggttggacagtgagggtggaaaggcctcttgagcccactgaggaaagagggaaagggtgtttgccggccaggggccagagcagtggtttgttttcacttcagagggactgtgtgtttgaaggcagatgaagaaattgatcttggaaagagaaaaggctttgtttttgtttttctgtagtgtaagcttagagtttatttttctgtaaattattgtagctattatccaagagttgtgctgaaaaattaatgggagatgtttagtgtgcgtggctaaccttgtcacgtgtcttagatatgttgccactagagttagttgtatttaggtagtagtcttttttttttttttttttcagttgatggaatataaccaatatattcaaccttttcacatctgacttttgggcaaatatgactttacaatacaatttttttttaaagatttatttattatatgtaagtgcactgtagctgccttcagacaccccagaagagggcaccagatctcgttgccaatggttgtgagccaccatgtggttgctgggaattgaactcaggaccttcggaagagcagttcatgctcttaaccactgaaccatctctccagccctacaatcccattttctttgaagtgtttgttgtcaagttacaggaacttagtaggtggcccctgtcctatctctagatatgtaggtagatatgtagacctgcactttcagagtccatttgaaatgttgtcatctttaaaatgatctcaaatctcagccgggcgtggtggcgcacacctttaatcccagctcttgggaggcagagggaggtggagttcgaagccagcctggtctacaaagtgagttccaggacagccagggctatacagagaaaccctgtctcgaaaaatcattaaaaaaaagaaatctcaaatctcactttattttgcttaccagcaagtgtgcgtgatctgtatgggcaggtctaccatgggttttgtgtggaggtcagagaacaactttttggagctggttcctgctggtgtcctctgcctttacatgggtcagaggtcagccagtattacccgatgagccacctcgctgatccaaatgttggtctgttgctccaaggccttttggtgaaacttatagctgtttgttgtgacattgaatgtatttactgtggttgtttcccaccctgtgacagtaaaactgcagcagagtatagagtcagctgtttattttgtggacctgaatacagtgggtgctcagaattatattctaatttttagttttaatttttattttgttgtttgagacgagacagggtttctctgtgtaaccgtgtctctctaggaattcactctgtagaccaggctggcctcgaactcagcaatctgcctgcctggtctcctaagtgcagggattgaagatgtgtagctgatgctcagatttttaaaaagtattttagagatttataattttctagacagtggattttagagtatgttcctcagaatctgatgtcagagcacataggcatgaggaatgaatagttacatgatgctgttgtctgtagcaaacgcagaagaagaggcagtgctgttggcctgaccacgctcatcacaggtcttttcttcctgctgtccaggtagcaacagaggaccgcagtgcttttgttcctcctctgcaactggacctgcattgtccactctccccttccccgcttgggttcctcttgagcttctgatccgtacacctccaatgagctaggcaaacaccaactgaggtacatccccagcccatgtacttatcaaattccttaggtttttttattttttaattttttaacgtgaatgagtgttttgactatgtgcatgtaaatgtactacatgaatttctggtgcctgtggagaccagaagaggttgctggattcccctggatgcaagagaagcaagtctttttttttcttccttccttttttcctattatttagctctggctgccctggaactccctatgtagaccacatagagatccaagacatctagaggtttatagagggactctgtcacaagaataaagttgttttctgtatttgtttgtttgtttgtttattgtggagcgtgtgtgtatgtgtacagaaacatgccacagtgcatgtgtggaggttaaaggagaactctgtagagtgtttttctctccatcacatgggtcccaaggactgaacccagatcactttatctgcagagccacctcaaagagactgaagttttctctcttaactcatacttctttcatgtttaagcatcatttattcagaagggcagcttaaagcaataccttggcgtgtgtacttaaaccttatgtcctttgcattgcctcagacttaggtcagaattatggcctgtggacttctcttacccagttgcccttttgtttttgttttgttttgtggtttttttgtttgtttgttttggtttgttttttgagacagggtttctctgtgtagcactggctggctgtcctggaactcactctgtagaccaggctggcctcaaactcagaaatcctcctgcttctgcctctcaagtgctgggattaaaggtgtgtgccaccaccgcccagcatatgcagtcactttaggttaaagtttggcctactctccctatcctcttcctaccttgcctcttgcaaaaactgtttttgtttttgctcccccatgggatcctcctgtctcagccttctgtgtgcagaggttacaggtttgtatgaccacacttcgctcttgtattctctttccgaggacacaaaattaaatcctaaattggtgagaaagaataagttatgtgctttgctcgacccagactggacatacagctattggaggtgggcaaggaggggacagaaagagtggcactccctcctccctaaagtctactgtagggggtgactacaaagaataatgtgtttttcctctaggtaaactacatgtgactataattttacctgtcaaattactaagctgtagcatgtgacatgtgaaggctctgctgcagcaggcaggaatcagaccctgattgagagccatgctcattgagagtggaaggtgacgtgggcaggcgcatgagcacaggcgctgtcttggtcatgaccgagccatcgtggttgtttactttagctgtacaacagtgacagccaattaggaaatgaaagattgtttctgtagggttatattgtgtaaatatcggacagaagagagagcagtcctaggagatggtgagcaaatgaatgactagtagccaattgtattttcgggtcaggtattggttatgttaagactcggtctatggcttgggtgctttgctttgttaggggagttgggggcattgcatttggagtcagtgtcttactgtagtctaagctggccttaagtgtgctatgtagttgaggtgattttgagcacatgattctttttgtacttgttaagtgttgggattacaggtgagctctgtgtgggcaaggctttgcttttggtgtttcataggactaactatttttggtgggtgggtggttggttttgaaacaggatcttatactgtagctcacaatgtctgatttagaactcttgtgtgtcccagggtacccttgaaggaactctgtgtgatcttctgtctcatcctcttaagtgttgggattaaaaaaaaaaagtgttgggattacaggtgtgagccttcatgctcagctcctagtttttatagaatattctttggtattttgcccatttattttttccaactttccaagctctgtaaagtattttaatgttttatttggaagtttgttatactttttttttttgttgtttttttgttttcgagacagggtttnnnnnnnnnnnnnnnnnnnnnnnnnnnnnnnnnnnnnnnnnnnnnnnnnnnnnnnnnnnnnnnnnnnnnnnnnnnnnnnnnnnnnnnnnnnnnnnnnnnnnnnnnnnnnnnnnnnnnnnnnnnnnnnnnnnnnnnnnnnnnnnnnnnnnnnnnnnnnnnnnnnnnnnnnnnnnnnnnnnnnnnnnnnnnnnnnnnnnnnnnnnnnnnnnnnnnnnnnnnnnnnnnnnnnnnnnnnnnnnnnnnnnnnnnnnnnnnnnnnnnnnnnnnnnnnnnnnnnnnnnnnnnnnnnnnnnnnnnnnnnnnnnnnnnnnnnnnnnnnnnnnnnnnnnnnnnnnnnnnnnnnnnnnnnnnnnnnnnnnnnnnnnnnnnnnnnnnnnnnnnnnnnnnnnnnnnnnnnnnnnnnnnnnnnnnnnnnnnnnnnnnnnnnnnnnnnnnnnnnnnnnnnnnnnnnnnnnnnnnnnnnnnnnnnnnnnnnnnnnnnnnnnnnnnnnnnnnnnnnnnnnnnnnnnnnnnnnnnnnnnnnnnnnnnnnnnnnnnnnnnnnnnnnnnnnnnnnnnnnnnnnnnnnnnnnnnnnnnnnnnnnnnnnnnnnnnnnnnnnnnnnnnnnnnnnnnnnnnnnnnnnnnnnnnnnnnnnnnnnnnnnnnnnnnnnnnnnnnnnnnnnnnnnnnnnnnnnnnnnnnnnnnnnnnnnnnnnnnnnnnnnnnnnnnnnnnnnnnnnnnnnnnnnnnnnnnnnnnnnnnnnnnnnnnnnnnnnnnnnnnnnnnnnnnnnnnnnnnnnnnnnnnnnnnnnnnnnnnnnnnnnnnnnnnnnnnnnnnnnnnnnnnnnnnnnnnnnnnnnnnnnnnnnnnnnnnnnnnnnnnnnnnnnnnnnnnnnnnnnnnnnnnnnnnnnnnnnnnnnnnnnnnnnnnnnnnnnnnnnnnnnnnnnnnnnnnnnnnnnnnnnnnnnnnnnnnnnnnnnnnctgtgtaatactggctgtcttggaaaccctgtagaccagaactggtcttgaactcaagaagatctgcctgcctctgcctctcaagtggtgggattaatggtgtgagccactgtgtgtccaactatcttaatgattggtacaggctgtacagaattctgtctgtggtactagagttacaccacctataatttagactgtaactgacctaatgagttggtgtatttcactttaaaaaaaatagcttggtctatatgttgaacatcagttgatgtagagcagaaaaatctctctccagaatgcctgtggcccctactgagggagctcaaagctaaggactgacactacctgaaggcggttttggatggtcttttatacttaagatgctgtcattttgtcagcctaggctcatgccacagctccttgaaggtctatttatttgcataacttgctcttttttaagattcattattaattcttacactgcatatgcatgtgtgtgtctaggaatgtagcctgtgtatgtgaagaccagaagagggtctgtatccctggagctggagttaaacagggttatgagcccccagcgtgggtggtagaacagaactcggtcctttagtgggcatcatgtgctcactctcaatcactgagccatctctctagtccccctccttccattactctcttctctcttctgggcagttcatcttttcctgcgcctttcaggcctagacaccgggagctttgtgttttcctgggtgctgacttttgttgtcagatggcattatgctgtgcttaacttctggattagtgtgctgctttgtgtgtatggcatccacggaaatgagtgtgcttggactgacgactgatttagcgcccactatgaagggatccttgcagacattcttacagagacttcggggctgggctctatggtggtttcttcattctgaccacaggctgtttctagccctttgtgaattctctgccaggtacttagaactaacttgagtctataggggatcttacaaactgcaggccttcttcctctccagactcctctttctcccacactcttgtcttcccagttcactgagagagactttgggattctgtagcctcttctttcttttaattcttgctgtttatttttgtatttatatttgcttttttaaaaaatcagtatgttaaaagatatatttttgttaatataccaaaatggttttttatggtctagtctagtctgtaaatctgacttttttttcttttttcttttttcttttctttcttttttttttttttagtatggaatagtttatgtagggcatggcgaggggagttgagggagtagagacagagaaaggcagagagagagagagagagtatgtgtgtgtatgtttgtgtcagagtctcaggtcttcacatatttatttctttaattagaagaccatgctttctctgtgacagctaccaaatgggattttctttttctctcactctcacgcgctctctctccttccttctttccttccttctctccatcctgtactttgatttagagtttggctaatattagcatttggaagagcatgtcacatacatgagtgtcacatgtacaagtgtcacatgtacaagtattcctctgggtattgtagttacaggttagctcagttaggactttatagttggttttgtttagttttctgttttgagatggcttttgcttatagttcaggctgctctggagttgagtttatggcagtctccttcagcctcccatctaacctgaagacagttttatacgagactttaagcaatgtgttttcataaaacagaagtttgtgttcattgacacattagaaagcagcagtgtcaccccgttaccacaggggttctgtctgtggcagtttaccagccctgtcttcccccaccccgaatctgaatttattggctgctaataagaaatgtttttgtgtttatttgcacatgaatgcattaaaatcatgacagttgactgtaaaaattatgacacatgactggagtgagtcagtgatatgttttaaggatgcactgagatagagagcagtgttgagtacatcatcccagctctggttcagctgccacatagtggtgcggtgcagcacagcacagcacctgcccactgccactctgcagggctgggaacactccctgtcagccttagcgctcttgttcgttttattttaggtgaggacaaacaccagaggcagtttgatgaccatgaagtgtgttctataagattttagaagacattgtgccgaattcaatgtgcaattaacagcatctatcttagaagactggctttatgagttgtgatggtttgtgccatgttctgttgtgagtgtgtgtccttgataagcccattacacttctcacacttttacattattaaaaataccgccgccgtcaatcaggtgtatggtatacacctttaattctagcacttgggaggttagcagcagatggatttttgtgagttcaaggctggcctgatctacatagtgaagtcaaagacagccacgacttcatagagaaaccctggctcaaaaaataaataagcaaataaatgaatacaaattttaaaaattttatcgtcactactgaagctcctttgtatttttctatggcattaaaaattatttaattttttgttactttgcaaagttgctgcacagaatggggttttattgcacctcatgtcatattcctgagaaaggaataaaaaaatttcccaaacagaaaaacccacagttctagaaatttagtgctaaactatcaataagtttgcttcctggataagccactcccttcaaggacagcaaaaagaaaggtcagaatttgcaaattcttgagtgttgacctgttccaagttgcctacctagtacagcagtgccaacacagttatagtctgagctcagatggggatgggtgctgaggtgggcaaaggtaggaaggtcagccttaaagcctcctcttccccctctgagacaaggctgtatcccagactggcctcagattctgtgtattgttgaatatgaccttgtacttcggattctcacgcttccagctgggattgagccactatgttctgtttcctcagtgtggaggtctgacctggacttgatgcatgccaggcaagcattgtatctgttaagtctcattctcagccaaaggacattgtcttatcattggaattatctcttcctgcctttgtaagtgttcttcaaggagagcagatgacgtgaacagttatggcttaccttgttcttccgtgcaaatactactcaagtctcctcagtatatctgcagtataccccaaatttaaggaaatgataaaaatttgatgagtactccattcagtcccagaccttcgccattcctacaccacttactaggacttgcacatgacaaagcagcctgctaccaaaatttacatttaaggtgacaagacacaagtattctactatactgtaaaaatgttgaatgctggctaaactttaccctttgttagaatttaagtagaccccacacacatcagcctaatccagttgttaccagttgcaggggtagtgttttactcttttaagggggaactgagacacctgtgttgacctgtgtgtttgcattgtagggaacaaccaaagggaatgtagaaagagaaaattcaaggagtgatgcagaatttggctacatgtatcgcacatgtgcacatgcacatacacatgcacagctctttgatttaaggcttggctaattttgtttcatttgaccagaagaactgagagttgttaaggagaatgaggctgagtggctgtaaccatcagattcagcactggctgtcactgtttcagtcactaagaatacagctcctgcaggggccattttgtccttccttttgtcaaagctgtctcctcacttagatgcagctttagctgtgctcctgcccctccctcctcagtcactctccacagcactctgattgcttgcactgcattctgtctatccttccttcatgtgttaacttgcttccttaatggatctgctcctggaggttgtattcagcattaaatcctaaagttagttaccaggtcttgtgtccttcctctacagattagaaaattaattttcttaaggatatttttatgtgcctatttttttttttaatataagcaagaacttgctagtttctgttgccatgctggtgatcaaacccaggacctgtttcctgctgaataatcacttttatctccaaagacttgttatagaggagtactgttccagtctctgctctactgctgtgaggagacgccatgaccaaggctgcttatgaaagacagtgtaattggggttggcttatagtttcagaacgttcatggcaggaagcatggtataggcacggtgctgtagcagtacctgagagagagcccacgtctgatccacaagtttcaggaagtgaaggattggaactcactcttccaacaaggccacgcctcctaatccttcctaaatagttcagcagctaggaactagcttcaaatataggactatttgtattcaaaccaccacagaaactcaaaacctctggctattttcattcctttttaactcattttatagactctttggttagctatctagtgataatattgagaacttccccagaagcagcaaatatgcatcagattaagagtcctcttcttcctgcatcctgcaggctgcaaatatccctgctagcagaaaaatgctgtgtggtgtttagaaacttgaagtatgtgtgggccctcttacatacaatccaaccctcacggagcgtctagataatcataaagtacctgcttggggcttgaagagagcaaatgagtgtgagctaagtggcacagtgcagaattggcggggctgctaagtcagaaagcctctagagagagccaggctaatactgccggttagaactgctgccccatagcattgctgctgtttctgatgtgtaagaaaagaccaggttgttttcataggcatagcctcattttgagatgtaattcacttatttacatagtttatagaataaatacagcctaggtgtcctgcctgcaacctcttacttagtttgacctcaagtccaagactttgtctatggcatcagacaggctggcttgctctcaggtgccagggtagtcacacttctccaggagttaatggattatattaccctgcacacagtgtttactgaatggatcctgagtaaatggatggctgtagcatcaacatgcacatggagctggataagacaatctagtacagttttgactggcattcatgaagattccctttcgctgtggagagagtgggggctcaaatgtcttctgttctaggttaattacagcattgtgttggacagacagaccaagcataggtcgtttctggatcctttggaactgtggcttgtgccacagtaaagccctcgtgagcccaccaggcagagtcacacagacagtgctgaagaggtaactcagcagttaagataactgggtcccagcactcacatcaagtgacccacagccacctgtagctccagctccattggagttcagaaaggtgacctcatcttcctagatcacaggactgatctttctggggagcaggaactctgaagactcagcactcttggtcccttggtagggccttctaaatatgtctagctatatgaatggaagaaatgttgggtattctcctccatcctttttttattttttatttttgagatttacttatttttattttgtgtctatgggtgttttgcctgcacgcatgtctatgtgccacatgtgtacagtgcctgtggaagccagaagagggtgtcaggtcccctggggcagggtttacacacagctgttacaggcatgttattgcacactatgtaaaatttacctcttattattaaaatgctgatttatctatcccactatctaatttcaatcctgaccaggcactgtaatgcttttatgctaagaatctcaagttgaggtttttgtattttactatctattgtaaatgtcaatttaatgtctattggtgtagcccctaagacctggagtctgcagtgaccctgcccccaaattaattctgattggttgataaagatgccaacagctgggcagaagagacataggttggggtttaagtttcatgggctgagggaagaggaggaccaggaagaagaagaagaatgtgttggagaaggtgaagcagcttcggctcttaagagtcaagagagcctggccctgagggctgcccaattggagccaagagcattcagtaagtaataactcagggttataggataggaaaatagattctaacaacatgaagggtaggcagcccagctcttgtgttgttaaggtttactataaataaaaaagtttgaatgtgtttcttatccaaggattcagtgaccaagatggggtagagaccccgggctggtaggtaaaatactttttacaacactctcctgtctcaagtatgtgtaaacaatgcttaccatttattctgatttgtcaataaaagctggaaaagccaataactaggccatagagaatatatagggcaggacttctgtcagccatgggaggaatgggggaagggaaggacagtgagggagagaggaagagaggatttgccataaggaaagggtccagggagataccatgggagaacacacctgaagtcgtctagagagccagatctcaggggtcttgactggaaggtagcagattagattagaggattagaatggaattataatgcctagttattgtgcttttaaatataaatcctagtctctctgtgttgttattggggaactagctaggataaagaaaaacagccggtgttttaatttacttcatacatttttaatattcattgttacagactattagctgccatgtgggttctgggagctgaacctgggtcttctgaaagatcagtcagggcttctgactgccaagccagctctccagccccagtgctgagtaattctgaccagtgaagcattgcttcctcagcagcaaatgctcagaaatgggcgccttttcagccctcagctgtgctcatcttcctaggacagaaaatcctttccactttggccttcagacttttccagggctcctgaaaagcccttagaattgttctttaaaaagataaacagagtccttgtagagtctgtagtgatctctggctaaaaagaacagtggtctgccctccccactgacccatgatcactgttcctttgagctgtgtgagccctgagtttcatggttatactagcagcagcgtcagtccttctaatctgaaaagaagtttaaggtgaccttgtgattccagagttgacttaagatttaaggcccctgccaaggagaaattgtaaggtctagatcttgaacccctgtcttctacctgatatagctgggactcacgggggagggttgagctttagagccgaggatggtactacagtatgggcaacgtgaagccagaagggtcaggcaactcaaggcctctgtggccagtagaagccaagcttttcctgagtaaatgacactctgctgtgtcagacacatgcagagtgtggagtaagattctcagcttccagtcagtgagcatggcaggtgagagcagaggtaaagaactaggtggagtcggggcagtgggggctcacctctaatcccagcgatcaggaggcagaactttctcagcattggtattgttaatatctggactagaaaggtttttttgttgttgttgttagttgtgagctgacctgtgcctcaaaaggtattgtcaaaggtacagtttgaagatctgaatggtattatttgcaattatatggtcacatatacttcacacaaaatgagtgttccatgtgctaagcagaggatgtttgttaataggtcggagaggctgaaggaaatagaatcacagggaaaaaaacaaaacaaatccatcctttctttggagggggtagtgggtgacagggggacagcagcagagaggagtggctgaggagctctggactagcttttataaaggctgaagcagagaggaattggttttcatgcgcttcgaaactgccctgtcgcctaggaaagtcacgtacttcattttcatttggtaagaaggaacttatatatgaatgacccccatcttattttcattctgggcttttaaggtctaatgtaggagcttcatgtgtgtgtatatacgctctgtgtgtgtatatatgctccctggatagatgcaatccagagatagaatgcagggagtcctacccttgtgcatggtatttcaggtaatggacccagtaagatcatgaccgaaggaaggctatgtggaggtggagagatgcttattcagtttttactttcctcagtgtatttactaaggccaggctttgaacaagtacaagtgcagatgggcttggcaacttcccaagagaattcccattccacattagaatggttaatcctgaccatgggtcagcttgagtggctaggagccttggaggttggtaaagcacacatctgggtgtgtctggttgatctagagatcatggactctgacctgatccatggaacactcccttggaagcactgaggtgataagaggaacataggcttctgaggcaggatgttaccggggatgtgtcttactccttcctgtactcctaggctctgcatcttgtctgccatgaagtgagcagcctgtcttgggcaccggtaccaccatcacattgtgctgagcacacagagcctcggaactctggaccgaggtccctgagcctgtgggccagagcagcttcctcctctcagttgctctccttgggtgtttagctacatcttctgagcaattgcttggtacaaggtgtccatctaggcactcaaaacataaaggagcaaacaacatggctcttcatggaggagtcattttttggtggaggaagcagccattgaacaaaggtatacacaggaagtgataaagccagtgggtagcagagccctttggagtcttatgtgagcctgattaagtcatatagacctcattctgagataccgtggacttcagaggttttatgtggatgtccacattggccactgagcaggcaagggttcacagagcaccacaatgccagtgaagaggtccttaaggcttatgtctcttagctcctctattttaaatgtgtttgtttgcaagctgcacatggtagtacatgcctgcaatcctaacactagggatatgggaggatcaacttcagctgcatagagttcaaagtcagtgtgggcgatggttcaaggccttggcttaaagtttaaagtttaaggcttaaagatggtttaaggccttaaaacaaatagataaacaagaatacatgtgtttatagagcctcagttgggaagaagggaggcagggagggaggcatgcatggagttgttctcagtaagtgtaggactcctggtactccacagacttatcattgaggatcataaagccagtgtaagcccagatagaacagtcatgtttcttttgcagttcttggtacggtttcattttattagccggtgctaaagcccctgtgaccatattctgtttgagtttatgtaaatcatcatccttcctggatgtagggtctttaccaccaggtcataaagtagaaataatgcattagcacagctagcgggcctattctcagacttggtgtcttccattgtaccggaactgtttgtgggtacattaccagttttctttcttgacatccatgtgttgtttttgttttgttcttttaaagttagtgtctccttatgtagccctgtggggcctgaaatttgctgtgtaaatcaggctagctttgaaattacagataacctgcctctgctttctcagtcctgagattaaaggtgtatgccactatgctcagcaacaattataaaaataataaatgtacacgggaaattatatggggaaataagaacaatacataataaatgttgactatacagagatggctgttaccatgcctcagatctagtcgttttctatgtgtctgtgtatctgtagtcatgaaatctgtaacttcatagtttgtctattatttctattatttttaagctttctgcaatgtgagtttataatagtttttaatagtgcataaaagttttccacccgtttatttctgaaataatcccttgtgttaaacgtttacattttcccagcttttcagtattataaatattacttatgggtatataatatcaccccaaggattcaaagaacccttattttagtatccataattgctcattatataaaagccaaacattgagggaatttagagcctgaaggtagagatcctggtaatctcacaactcacagataattgtaaaaatttcttatgacttcatagagagactcttacatgtatgcacccgtggaggccagaggtcaatgttgggtgtctttctgatcttactgtttgagacagtctctcactgagccctggcaatactgatctgctagagtggcccaccactgattccctagggattcccctgtccccaccactgccctacctttgatgtggcttccgctgaggatctgaactcaggcacgtatgcttgcctatcgtgttttaatagactgagccatcttccaatatataaaaatggctggttctaggttgttctctcttgataatgtgataaattactccattcttttagtgatcttctgtaagtaccccacccccacccccactttaccttattttctgcatcagtttgcagtgtctgctcctttctaatacaaatggttcgtgctctgtctaggtcatcactctggtactgagtctgtcttctgtgatcatcttttcttcctctgctatattgcctcaaccacaatggttttgggattaagctggctgagacaacaggaagacatggagatgcaccagcagcagtgtgtgtgtgtgtgtgtgtgtaatctgaaggagagcacaggttagctaatcttgatacagagcagtccatcgccttgttgagtgtgtgggaagaagcagctgtggttgatactttatgcacccaggggaggaccttgacatcccatgggactgaggctatgctcatgtcatgaatgctcatccaagtctgggtttacttgctccccacactcttagcaatgatttctccttaatagcagattattcccctacaaagatgttaaatactctttcagatgcttctcttacctacacattcttggtcccacaccatctgagctctgtcaagagttgtctgtactcactgtcatcttccattctgtttcaacccactgtaccgaaacagtgaccactgtgctgtaagcagaattggtctgtgtattgatgtatttgttcatagttggctgtttttctttaagaagcttgttggggggctgcagctatggcttagtgggtaagaacacagattgctcttccagaggacccaggctcaaatctagtacccatgtggaagttcacaattgtctataactccaggtccagggaatccaataccctcacacaggcatacatgctggccatagcagaaatgagcatttaaagagaggtggtggtgggggggacagcagcagcagcagcagcttgttgggggtctctgcttggcttccaagatcccacattctttcctgtgtcactggctgcacctcctctcttccatctactgcctcctccaactcttctctctaagcctgctggccacatctctcctaaatgtctccctgttgtctgttcccatggccatagtatccttatgctcacagctgctgtatttgtgatctaccccagactttgccctaggtgctcatcctgtacttccatcctaggtaaaacactctgggctgataaccacttcagacttaatccccgctaaccctacctctagggaggcagaggcaggtcagtctctgagctggaagctggcttgctctacatatcaggtttcaggccagccagggctgcatagtgaaagagtctgtttcaaaagtcaaagatgaatatctaacatctagtggtgcttttgagccccaaacctctgctgccacacctcccactgttgggaggtgaagagaaagttttttttacttgtttagctgatttgtaaagagtctttgaaataaatctgatcattttttatttgtttttaattccactttttaatgtttcttgaaggcacattatagaaagctttcctatagagagattttaaagtatactctataagaaaagttaaaaaggtaccgtaagtgaaatctggaaagggcaggctttcactgcatctgattgagaagggaaagtcttactgatactgctccgattgatactgctctcctgtcctgggcatggatggtcgctatcaggtggccagccctgtgtgctttctcccctctctgctgtcccctcctctcgatggctttttcccttctctgctgtcccctccccttgatgagaagcagcaacaggagcacaccaggaaacctggcatgctgtgattcctatcatcacatttcttaaatatataactgtaagaatgttttattgtagtgattgccatttgagctagccaaaatctattatgcccaaaagaaagttttcctgtcttggacacactggacgaacactgttttctaacaggactgacaaaaagctcaagtttccattcagtcatacaggatgattactgaactctgtggcatctgtactttaggtaggtttaatttaaaaccatttttaatcttagaaatagttttagtattattagaccctttttcttttgtctcattaaaacatagggtttatcatttgtttgactgttacagcttcagtaacatctaaggcccttcccattccttactgtgtcattggtgggtaagagtgtgttaaaaaggataagcagcctgttagcatatccatacgtaatcacaccacatgtgcatgatgtatgcagtatcagtgtcagaggacagctttgtgaactctgttctctcctcttttacttgggttggactcagctagccctagcaaggcttgcccagtaagcgctgtacccactgagccatcttgtcagctcttctccacattttacatcagtgtataaataagagtagatttaattgcatccaactactggaatatataatttacaaatactagccaactttactggcttcttcagcattctaaaagagtttgggggtagggaatatacttaactcataccccgtcactgacttttttctgctttatttagatatattttattagtatgttttgaggatttcacacctatacactgtatttcattttcatattcactccttatccctcccccagctccttctagctccttcatctccttaccctgccaacttggtatccccatctcccatttttataatactgctcatttacccatggtatactactgtgtggttgacttatcaggggtcacacctgtaaagaaaagtgactgtccttccctagaaactgttcataaccctttagttaagggcaggggctatgagccccttccacctccatgctggagtgttgattggcacaggtctttcttatgccctcagccataacgctgtgagtttgattgctgtggtcctttcttgttagaaagcattgttttattatactccctgacctttgactctttcagtctttctgctcccttttctacgatggtccttgatgcttcaggagaagagagaatgtagatatcccatttgggttccagagcctcattgatacttattctctatactgggctcagttaggagtgtctgtgttaaccagtgcactgcacagagaaacttctgatggggtttgagagccacactactatgaagacgacacaagaatatagagcactttgatgatgtgtgcatttagcagagtaatggggcatttcaccccagccaggaggtgtggtacatgtcttcactcccagcacttggaaggccagcctggtctacacagagaaaccctgtctcaaagaacaaaactaaactaaactaaaccccctctgtcctgagatcatggatttttggccagatttatagtatcaggcatgcatttcctcctctggagtagaccttaatatccaatcaggaagcagctggctatcccaacacactcattctgctatacactcatggatggagcgacagtctggtaattttgttaggagactatatcaaggtaatatgtaagtaaggcttagttctattcatataaataagtttatagttatcaagtgtgtgttacgtcctaaagagcataagtaaaataaagtaaaaagttacgtgctaaaatgttaaaagtcagggctggagagggaggaacgattaggagcactcactggctgctcttacaagaggtcctaactgagttcaattcccagtgcccatgtggtgattcataacgtcccaggggatccaataccttcctctggtctccatgggcatttggcacaacatagtgcgtagacatacatgcagacaaaacacccataacataaaaaatgttaaagttatttaaatctgtatacacttattcattgtgtgatcattacagttgttgattaaagaatagttttatagccaagcatgaagatacaaactccttatctcagcacctgaagttcaaggttatctatcctcaacacatagcaaattcaaggccagcctgagctgtataaaattctgtctccctccagccagccacccccccccccgcccaaaaaagaaagaaaataaaaaaattgaaatttttattttcagtgtttgcttactttctttgcatattatatataatgagatgcaccaaaagaatggtaatttagagcatttgggagaaccttgccattttttgtgtaccttctcggtttaaatgtaatttttgggggggagggtggagcaatcagtagtaattaatgaaagataaatttggcttcctttaattgtaaataagtagttcagttatacaagtgtatgtaaaatatgccatttaaaataatatgtcaattctaaaatagtacttgttatgctagctctaggcagggaacagcaagcaacttaggcagaataaagctctgccattctcttaatagtatatctagtctccgccacttggactatccaagaaatagcatctgccctgacagacctccactctgttgagttcattaacttgaggtggattgaggatggttctagacccaaatctacccctcagattgccttagggctgtttactgtgatgaggctcttctgtgaggtgtcttgaccgttattctgctcctggtaaactagctgatggggctggagagatggctcagtggttaagagcactgactgctcttccagaggtcctgagttaattcccatcaaccacattgtagctcacaaccatctgttatgggatctgatgcgctcttctggtgtgtctgaagacagctacagtgtacttctatacataaaataaataatttaaaaaaagttaaataaaaaaagaaactagttggtgaaaaaaaatgaaattagacattttaagtcttcctttgcttctttgacaggaaaaaggaagataggactctcatcagtcagcggtagagatttcttctctccctgtagtatacaatagagaacctggctgttctctcaccaggaggtgagaacggtgctcacacagcactctcatcccaggggtgctgatacaagcaagatgcggttgttgggttttcctgatctttctttcactaacttgctgctaataaaagttattctctagctagagggacaggatagctcaaggtttatagtacctgctcttacagaggacctgttatcacttgactgatgactgcttgttctccagtttcagaggatctgatgccctcttttgatctctacaggcagctacactcacatgcacatatcccctcatatgcataattgaaagtaacagacattaaatctgaaaaaaagatactattctcaagccagtgattatgcccataattattaatgaacagagttcatgtttgctgaggcatttgagaagataccccaggggattgtggtacccacatacaggaggacagcactttgtaggggatgtgaaattcaacattagcagccatcagaagccagtgtagtggttcccttaaaagggaacctgatgtattttccaaaaccccagcaaggtcttgaagggaggaattaagttagcctttttcttcttcgctcccctcttccttgctgataatttcctttgaattttcttatgttttgttctgtgtataaggaaacttgtggctgttgatgaaagaattcaataacataaaatttcatttacttgtatttattaagccaaaatgctgttgtacttcttgagcctctggagaaaccttgaaaatccattggactttaggcttactgtgcataccacttacttaattactgccctgagcctagctagagttcactgtcacagatcgaggccggaatgagacttatgcacttcctcacagccactggcttttctattcctgtccgtggcctggcaatcaaaaccatgaatctgttccaaaagcttctgtgaaagcagttgagaaatttggaacatgtaaatgctccagtaaatgctccgaagcctggtgtttccattccattttaccaactttatccacactattaaaaaaaaaaaaaggattttttttttcttgaaagctttgtccttgccttttaaaaaaaacaaaaaacaaaaaacaaaaaacttttctggtttttttttttttttcttttttccggagctgaggaccgaacccagggccttgggcttgctaggcaagcactttaccactgagctaaatccccaaccccctnnnnnnnnnnnnnnnnnnnnnnnnnnnnnnnnnnnnnnnnnnnnnnnnnnnnnnnnnnnnnnnnnnnnnnnnnnnnnnnnntgacaagtctgtagtatagaccatggctatactgtagacttgtatactatataccagttagtataggattctggggtaactgttttaaactgaaatagttgctgtgtaaaccaggtgctatgtttgtttcattgttattaagcagcagaattccattgcttttaatacatttaaaatttgtgtgaaggctggagaggtgcttcagaggttaagagcacctgttgctttcattgaggatctgtgtttagttcccagcacccatctggtagttcacagtgacctataacaccagttccaagggattcgacactctcttctgatctccagcatcaccaagcacacacatagtgtgtatacatacatagagataaaacaccgatacgcatgttataaatccttaaaaaacacatttgaggcatgcatatttaacagcttgacccttttaattgtggtgtctccacaattcagttatctaataatttagagtatcagattgatgctgtgtttctggacactgtcttaagcactcttcatacaacaatatgcaagtcatcgtaacctttgctctcctgaaacttagccgatgctgcagtggagagacattgaggcataggcagatacaaacagaataactaatgactcctcagaagataatgaacagtgtgatagagtggctttgtgggaaatgatgtctgggtaaaaagaaggatttagaggaatcgatattttatgcaggaggaatagttctaatgtagaattatgtgatagtgataggaaacattctgtcagattcatttgaggtgtccataattgcatttgaaatgtgtatgtctgtgtatagaatgagttaatgaagttgttgagtgacttgaattaaaaaaaaaaaagactcaatgaaaagcataaaactgccaagccatgtttgttaggattgaggcgagaagaaatgagtctaggaataaggacaaaattgagaatcagagagatatatagacaagagcttaacttagtggggtgtttttgacatgtaaaaagatacttgtgggctggtgagatggctcagcggttaagaacactgactgttcttctgaaggtcctaagttgaaatcccacatggtagctcacaaaccacccacaatgagatctgacgccctcttctggtgtgtctgaagtcagttacagtgtacttacatacaataataaagaaatctgggcccgagggagtggggccgaccagagcgagcagaggtcctaaaattcaatgtactcacatacataaaataaataaataaatcataaaacaaaagatacttgttttatgtgtgtgagtgatttttatttgctttttttttttttttttttctccctttgagacaaggtttctctgtgtagccctggctgtcctggaactcactgtagaccaggctggcctcaaactcagaaatctgcctgcctctgcctcccaagtgctgggattaaaggcgccaccacgcctggcttttatttgcttttattattattattttttttttttttttgagatcataccagtatccacaggtggcttgcaaccatctctgtaactcttaagagatttgataccttcgggctttcatgagcaccaggcacacacatgatgcacagacagacagacagacagacaggcaaaggcactcatatacataaaaaatagatcctcaaaaaagaaaagtgctagttatattaataaaagttttgtccataatagtttctgtcagatttctccttaagtgtatgatacacaattaagtccgaaagccagtaattgtgattcaggctattgattagtgtttaaagtacaaagccacattaaattgacacaatgtcattttgaagaaaaagttagctaactagtcagtaattgagcctctttgacaagagaaaggctaatccatagcagaattcggattttataggttgtttgtttttgtttatgtgctttgttttgtttcagagacagggtgtctctgtatcctgggctgtcctggaactcaggcatccacctacctttgccttctgagtgctgggattaaaggtgtgtaccaccactgcctggcttggatttttactttctaatggagggagggagggagggagggaggnnnnnnnnnnnnnnnnnnnngctggccggccctgaccgctctaccttaggatgtgagctttcttagttacagtttaagataagctaaagcagaaggtgtataaaatccatcttaacgagttgtgaaagaggaagaagaactttttggagacacttgagcaagtccccacctgagttgtgcggcatgagagggagtctatacatgacaacctattagcttcctttagaggtgcccctttcttctaatctaaggtttttgaggagcctttatatgttgatcctttttatttagatatttattacatttgatattttatttaaattgtggatatagcacatgttatggttcatgtgtaaaggtcaggagacagtttgtaggagtcggtcttcttccacctagggatcagattgttagtcatcagacttggtagcaggtacttcacctgcagtgtcatggtgcctgccacgtgttagtttctgtggctgggacagaaaccaccccaggggaggaaggatttactttggctcatagcttcagaggtcttgattcgtgacgaacagcctttctgtttggtctgcagcacagcggagatatggtatatgggcataacgaggacactgctcagcacaggcagttgggaagcagagggacagaagggatccaggatcagcatatcccctaaagggctccttgccagcttgctttctgagcccccaacttagtgtccacctcctcccaacagcgctgtcaagttatgattccattagttgtggtgagtctgatctgctgattaggtcaggtcagtcttcattgtccaatcactccttagtcaattcaccaggtgaggaccaagccattaacacacgggccttgtagtgggctatttcttaccaggccattgggagccaactggctggttgactttatttttatggtccatgtagaagggaggaaggtcatattttcttttaagaagatttcccatatgttccacccggaatttcttttttcttttttctttttttttttaaagatttatttatttattatatgtaagtacactgtagctgtcttcagacactccagaagagggagtcagatctcgttacagatggttgtgagccaccatgtggttgctgggatttgaactccggaccttcggaagagcagtcgggtgctcttacccactgagccatctcaccagcccccacccgaaatttctactgtgccttcttggtattgtcaaattttaattgccttgctacttgtgattacaggcaaaattggaaaataagttattttaaatatcacctgactcagtgatagaatccttggcctgcacaaagccccaggttcaatctccaggatcccccactccccagtcaagattctgtaccaagattcgggagaactggcagccttgccaactcagctcccacctaggcagagatcagggctttgagttggcccacccaactcaaagcatctgccccactgatgaactgctggagtacacaaagaggccagccccgcagatccaaagctgcaggacctccatgacacgggcaacaacagggtaattgaggagtcctgatgaggatccagtattaacagtgtagcagaagtcagaggccacaaactagaccagtgactcactgcagtgaacatttgcaagtaaagatgtgtggacaaagggtgtactgtggacacactgagacacactatcacactgtgacacagtatgactcacagtggtactacagtttctacactggaaacagtgactacagttttcaggaccatgaaattcacaaagaatcaataaaaagttaagaaagcaggtgggaaggaggcttgctcccctgccaggttggagctctgctttcttttgtttttgccttccctttgttaaggtggggggtgggggaggtaggtaggtaggtaggtcacagtgcagagatacagtgggcattctgggaatgctgtgtggctggctgcttgcctgctaagttgccttggcagaagttgctctgttgcttgtagggatctcgcctccttttcataatggatatacagtgttaggatagatgtgctcattctcaaggtctacacatcatacactgcaagcagttgtttagtttgaaatgcagctaatttgaactcagtggtatgaacatcatttgtttcaactaattgaaaattgattttaaatgacccattctttgtatgtcactaaagaaaaaatatgctgccaattttaaaatgtacttcaatgtcaaggttgctaaaatgcagcgaaagtatatcctttgtgtactggctagttttgtgtcaacttgacacagctggagttatcacagagaaaggannnnnnnnnnnnnnnnnnnngagcttcagttgaggaaatgcctccatgagatccagctgtagggcattttctcagttagtgatcaagggggaaaggccccttgtgggtgggaccatctctgggctggcagtcttggttctataagagagcaggctgagcaagccaggggaagcaagtcagtaaagaacatccctccatggcctctgcatcagctcctacttcctgacctgcttgagttccagtcctgacttccttggtgatgaatgcagtatggaagtgtaagccgaataaaccctttcctccccaacttgcttcttggtcatgatgtttgtgcaggaatagaaaccctgactaagacactttgttaatgctatttcttctgtgtttggcgtttgtctcccatttcttttagccggttgaagggataattgttacgtgttattgagaactatatggttaaatgcaaacaaactaagcaaaaatactgtactaaactaatactatcactcttgttagcatcagatatgttcccaattagtcttttcttataaagctaaagtaacagatttcatgaaactattacagcctgtaccagtcatctattgctacagcctcaaactcttgtctaactaacccctaccctgatgcctaagccatgtcaaagttagagtttcactatctcttattgaaatttttactgggttatctgtagactgacttgcaatttaaaaaataaatgaatctcatactccctttacctagagtcacccaatgataacactataaaactttactgtaaggtgtcccgtaacttaaatggaggtagtgattatgttatcatgtgtcagtctcagaaaagtagaaaacttgaagcaatcccactaaaatcagggactagacaaggctgtccactttctccctacctatttaatatagtatatataagtgaccctaaatattccaccagaaaactcctaaatattccacagataaacaacttcagtgaagtagctggatataaaattaactcaaacaaatcagtggtctttctctacacaaaggataaacaggctgagagaatagtcgcaaataatataaaataccttggtgtgactctaactaaggaagtgaaagatctgtatgataacaactttaagtctctgaagaaagaaatcgaagatgatctcagaagatggaaagatctcccatgctcatggattggcaggattaatatagtcaaaatgactatcttgtggaaagcaatctacaggttcaatgcaatccccatcaaaattccaactcagttcttcattgagttagaaagggcaacttgcaaattcatctggaataaccaaaaaaactagggtagcaaaaactattctcaacagtaaaagaaactctggtggaatcaccatgcctgacctcaagctgtactacagagcaattgtgattaaaaactgcatggtagccgggcattggtggcgcacgcctttaatcccagcacttgggaggcagaggcaggcggatttctgagttttgaggccagcctggtctgaagagtgagttccaggacagctagggctatacagagaaaccctgtctccaaaaaccaaaccaaaccaaaccaaaacaaaactgcatggtactgatacagagacagacagagatcagtggaatagaattgaagacccagaaatgaacccacatacctatggtcacttgatcttttacaaaggagctaaaaccatccagtggaaaaaagacagcattttcaacaaatggtgctggctcaactggtggttatcatgtagaagaatgtaaattgatccattcttatttccttgtacaaagctcaagtctaagtggatcaaggaatttcacataaatccagagacactgaaacttatagaggaagaagtggggaagagcctcgaagatacaggcacaggtgttgatacagtgcagtggttttactcgggttcctgcaagtcccttagcacctgtgtgtgtgtgtaagagggcggtgtgcacaacttcctccctggcctgcactgtacacactcctgtgtcccctttccagcactccccaaaccattctgattaccagtgctgacctaggcctctcctctctggtccccaacccctggtgaccagcaatgctcatgccatttctaaagttttgtccttttaaagccatgtgtacagtagtggttttgtgaagggctcattgggggtgacttgtcttcgttctccatgatatatattgaactctcctgaccttagagatcataacgggagccttgaagttggctgtcttcttcagtaggtctcttgtgttatcttttcctctgtctgtagagcctgaacgtccttacctgtcagctcagggctccaagtaaacaaaaatggcatctgcctaggctctgaatgaatataaccacaaggagcacaaagcgaagaagcccaggttccaaggggaaggaagactgtctgcctgttgatgggaacattgggagcccaggtgtgtggaagagtagactgtgtccttagtggccaaccttggaggcaatctaggatacatactgtgtatatgacggtacagacgtctgtctgtatctgtgatgagtgttttcttcgtttttgaaatgtggattagtttgaaatcctataaaaagtaagaagtagaacatgatgattagctgccttctgcaatggcagctgcacataaagcacttgtgttgcaaggcaggttgccagagttagagcatcagctatggtgaggattcccaaggtatctgtagtatttgtggaacaagtggaagctgccttcaggtgacaggctgatagcccgtgaggatcattcacctctctcgttgtcctaggccagctgtctttgtgctcttcaaatagagggggcttgtggacatagttttggagtctgtgttgctaatattggacgaccacacaaattgtgttgtgtttcaggtaagacatgtaaggatattgtattctaggatatttttagcttttcagaacatatcttttaagaggtaaaagaaggaaagagacttttaggcaagaaattgaaactaggaaagcatttaaaaaaaatatttatttattatatgtcagacaccccggaagagggcaccagatctcattatgtggttgttgggatttaaactcagtaccttcggaagatcagtcagtgctcttaaccactgagccatctcaccagcccctggaaagcattttcttaggatttttttttaaatgaagtgttaaactttgctgtgaaagtgacagtagaatgggatcagaggtttagatctcagccttcttcagtgtgtgtcagtctctgtgtatgtgactctgtctctcctgtctgtctctgtgtgactgtttctgtgagtgtgtctgtctctgtggggtggggcctgaaaaaggttctcatgtgttacagactgggctcagaagtggctttgaacttgtgatctttctgcccatgtctcccacgtgctgctgaattataggtgtttcctaccttgcctgatttaggtagtataggctagagaacccagagctttgtgtgtgctaggcacacactctaccaatgcctggcagattcccatttgtttacttacttacttgttattgtgtgtatgtgtatgatgtatgtgtgtaagtgcagacatgctcccatcactgtacacgtggggaggtcagaggacagcttggagcagttggttctctccttctgccctgtgagtaaaggagctcaaacttagatcagtctggttccgcagcagcaggagcttcatccaccgagccatctttatggccatggcactgcctttgtctcctttaacctgagtttaaagtcgaatcttagctgactgtgatttcttttttcctgccccaccccacccnnnnnnnnnnnnnnnnnnnnccgccccaccccattcctcaagctcagggctctgccatgagctaaatctgtagccctccctttttttaaagacagggtttctctgtgtagccctggctgtcctgggactcactgtgtagaccagggtggcctcgaactcaggagatccacctgcttattaaaggtgtgttttactgttcattttattagttagatacaagtgatgcttcatcatctccatgtactcccttgctgttgcagtctcttctccaggaagagcatgttcacaacttttacttattctttaagtgacattgttggttttatatagaaatggaagagtcatacactctgctcaccagtgtttatctggtggagacattgtagcattttatcccaggctggctttccattttgttgttcttgtgatcttgaggactaacttgggacttcaccggtgctagcccagagccctacaaccaggctcagtcccccaccctagaaggcatagtttgatcatgatacttactggtcccagctaaggttgagttagttgggagttgtggctggttagagcatggcctcttggagctggagctggtggagcctctatctgacaggatgtcagggagatgaggtgagccaactccagcacacaggaggagaggagccccacattgctcccagctcctcagttcccacccaaggggctgctaccatgccaaacccatgcttcaaatctcacatggcctttatggtgcacctcaggcaaacccacactttgccgccatacctttttctcttgaacccagatgagtggctgcatgaaggaaaacgcaatacaaacttagttcagaaacaatggtaactcaatctctaggcacaacaactaaaatctaatcttgtagccttattaaaatctgattcctccagtggcgaatccttgcaccatgatactgggaaactctagcagctacatcctacccttatgctgtccccgttccaaaaggccataactctcctgcttctactcttcctccttccaaccccgaagtcccgcctactcacccagtgattggctcctttattcattaggggattggttcccaagaacagcaccaggcccgtgcacaacaaggaagcttcagtggctcttcctctctgtcttccctgctctctctccctcagttgtcctacctgatagcttgaacaagggtgcagggtacataaggaaagatggaacgctggccagaagcaattttactaattggagtttatagcagatattagttcctttaagaagacaggagatcttcttggttttagatctggtgaatgggaggtgaccttagaaatggaggtggctttattgaacttgagtctcagatactcccttgttgagtatttgttatggcttggatgagagcggctcccatacggtcatatctttgcatgcttagttctcagttgatgaactgtttggaaggatcaggaggcgtggccttgttggtgaaggtgtgtcattgggaatggaactggaggggccatatctcctctccctccctcctcccaagtaaatgttttcttctttcagttgtttcttcacagcaatagaagggtgattaaaactgttcatgtgacattcctcttcaactttttaattatctgataaaaaacatacaagcaatagaaacatcaggaaaaccattggtggactagctaggtcacagcctgtaagccactctaataaattaacttttatatgtgttacaaattcattctaatagtcctattcctctagagaaccctgactaatatagatttctgcaagtttataagattttggtcaagttctaaactagttttggataaaggtaaaaggcttctgttttcactgtcattaagtcactggaggagtgtactatgtaagccatgctgttcagttcgcactggcttgtctgagcttttccttgccgtgcatctgttgtagtcagtagaagacagtcttcagcacaggtgtcatagctgtgaccctggatatattctcagaccacaattaagatgcacatgtttttccagctgtaagacccagaggaccccaagggtcaccgcaggaaagggtgagaacatattgtaacaagaacctttgtgtagtttctgctctgctctgcactcatccttaccttccaaagctgttgataaagtgctcgggtcaaccagttctagctcagtgctattgcctgggagactgtgttcttttttatctgagtgctcatcagtcattggtatctttctccctgttagtcttggtacttgcagctgttggtacatgtgtgttctttctgtcagtcatgaaagtataataaaatgcttggtacttaggaagggatgatgatattttgatacttgccaatctacccccttgttgtggcctggctctgggttgttgaggacttctgctagtgcacacacacatactatctttgtgaacgaaaatctactcatctctccagacgactacccaatccactaggacatgattccacttaccagattacactcattgtcaaagtcagtccacggggaggaagggataggttgtcttttatcttactggctgtcttagcctggtgttcttgtttagaaaacaagaagacacagcagtgcctgctattttttctgtaaatgttcaaatagtaaatattcgtggctttgtgagccatatggtgtctgtcacaaatactcagctgtcaaagcgctgaagtggcagcctagacagcacataaggaatggattttgcgtgtctgttggaatgtaatgattggctgtagtttgctgacttcctgagctgtgtaacccttgccatagctctgtgtttctccaccacactgcactgcactgcgctgcgctgcgctgcactgctttgtaccctgtgcctcacacagttgttcctcctgaggactcttaacttaccttcgtccccttcagtaaatgattaatttgttcaatttttatttcacacgataccgattctttcaagctcaaaatacaatcacacattgtgcattcattctgagaagtgtgtcactgaaggtgttgtgtgcatacagtgaacatctatcctaaaattgccaaatgtcagtggcttgtattgtttggaataacctatccatttattttgatgtgagttggtgttttccctgcatgtatgtgtgtgtgagggtgccagcttatttggaactggagctagacagttgtgggcttccattcgggtgctgggaattgaaccattttcctctggaagaatagccagtgctcttaaccactgagccaactcgtcaggcccctcccccatcaattcttaaaggaagaaaccaaaccaaccgaccaaccaaaaccaaacaaacaaaaacatactgtggtcctaggaactctttagcacctgaaaacccctcggtggtcacatgaacccagtagctcctcactgcactaccaaccatggtggtgttcagtgggcatgcaacttttgttttttgtttttttttttttcccccattggctattttaaccaccttaaagtggacttcaggaatatcacctacagcatgaccttttcgaccaaatccagcaacgagaacttcatcattttcctcaatgaagttcaggcagccatcattgggcacgaacactgtgatcttgcagttcttaatgagctgcaccctgacgcacttagtgatggcagaatttggctgtttggcctcaacccctactatttccagcacaattccctttgcatgagaggcgcccccaaacggattggccttcagggctgtgcccaagtgggctttcttgtactgtttgtcatgccacttctggtcccgtcggtgactgcggagcttccgggcagtttggagaccacaacacttgcttaaatttccagggcaatgggtctggagcaggcgtccggcaaggccgcctgaaggccgcaggaactcttccgtatggtcatgtgccctcgggacggcgcgccccttctcccagcctccgcacggttacaaccctactccccgctttatcgccccacgacaggccgtatccctagctctagagccctgcagcggcccctcagcccagccccgcacagctcacccctttgtttttgtttttacggccagtttcaccctagaatgttgttgataaagcagtagagactccttgtctcaatccttgcacacatagtttaatgttcccacaagcatctgtgcacatgtcagagtgtcactgcttgtcttagccaagcccctgtgcagctgtgtgctacaccagctggggttgacatgacctgttcttttggggaaggtgccatttttacttgtaagaatgtggtggacagagcacagttagtaaaacataagtattgtcagtttttcaaagcaaaatcaaccttgttaattgtaacatttgatcagccttcgaatagaaatcggagatttggggattcttacttgctgtgagctttaggaatggcagttaatatatggcaaccttcaaatgttgtaaaagaaaaactggaaacttttttgaagagctgtatgaacgtagtgcactggcagcttacgcgttgcttgcatcctgttacagagccttccatggataaaaagatcacccagagtacaaaataggccattcagctgacatgtaatatagtcctgccattattgttactctgtagacaggttttcaaaatcccaccttttagaaagttactctggttaagtatggtggctcatgcctacagtcccagaggctgaggcaggaggatcattattttcaaggctagcctggagtggatagtgagaccctgtctcaaaaaatggaaaaacaaagaaacaaaaaacaaacaaacaaacaaacaaacaaacaaaaaccaacaccaaaataacactgccccatgaacattagagaaagccacccctcagttatttgaaaaagctttaaacaccttctctcctgcagctgtgtgtctaggttacggccgggttccccacagtgcaagcctggccgtgtgtggcagcaggctgtagatgtgtgcagagatgtatgagaaggctcttctcaattgtgtgctgtttaaagtcttacggtaacatacagccatttcactgtaagaaaattaatggatattttaaacttctcaatttcttatttgtttgctgttttgttttgatgatactatggagtctgtgctggtcctgagcttgtctccaccttctaggtgctctgattacagggttagataatcaagttactagatctctaatacaataaataccataaactatagcttacacaaataaaagcctaacttttaggagtcctcagttttaggagtataaatggtcgttcaaccaaaaggcatgagacaggctggcctaaggcagcatatctgcagagctggactaggagtgctgggtttgtgatggacaagaaaggacgttttcactgccctgccacagacgtgactgaggtgtaggacacattactccatagtctgtctcagcctggtgggatgctttagtgtcacacacacttgctggtgatgcagctcagtgcatcttaatcgcctctcttccagcatggctctcacaatctcaggacacacgcctatgtctggatattagagggctcctggagcttcctggctttgtctgttaaagataaggcctggtgaggcttagagaacccatgcttttcatactgactctcagatgttcgagctcagcacggcacatgcatcagcatatcactggccaagtttccccgtctctgtaaagtgtagttggcagacctgattttgacatgtttcaattcatatatttagtttcttgttgcatttcataagaatatgtatatttcataagagcatagttttatgtttattgtgtatttaaagtcattgggaacagactcgctaaaggactgaggtacaacacatttctggggatgctttgaaagtctgaagcagaggacaggaagaagctgtagagtaaggttgctaagcagaatttcctacagttcctcaaatatacacccattttattgacacagttacctacctttcccccttccttctgcctgcctgcctaagtcattaaccttttaagtaataactgtgccccccaaaagcaagaatactgtcttgtcttagggttttattgctgtgaagagacaccatgaccaaggcaactcttataagggacaacactttttttttattttaattttttattattattttttaagacagggtttctctgtgtagccctggctgtcctggaactcactctgtagaccaggctggccttgaactcagtatctgcctgcctctgcctcccaagtccctggactaaaggtgtgcgccaccagtgcctggctgaggggcagcatttaattggggctgccttactggtttagaggttcagtccattatcatcatggcaggaagcaaggtagacatggtgctggagaaggagctgagagttctgcatcttgattcaaaggcagtcaagaggggactctcttccagacagctagaagaggatctcaaagcctgtctccacagtgacatacttccttcagaaaggccacacctaactccacctccaccactaacctcctgttagtgccactctctgggccaagcatatttaatccaccgcaaatataaaagccaagtcatctccataagccaccatcaggagggaagcccggtggagagctcttcgttctctctctagttggggaagaaaacaattgaaattgcttttcaaaatacctcctatgaacgccatgcaagcagctgcctaatctcatttctaacaaaatctaaattgtaactacattaaaaattcaaggctaatggaaatcatgctaacatggttttcaaacacagtgtccatggcatagcttgaggatgtaggaatttgaatctattcctgatatgagtgaaaatggtgtgccgtctctggaggcagtttggtagacctgtcacactgcatgggtggttcagtttcctgcttcacccaccagagcttgacatacacacagactctcaacctaaagtcctgagttcaagagtccttaatgcacaaatagtttgctctagcagaattttcatagcatttgtttttattgtatgtgtgttttgtctgcatgtatgtttgtatgtgtgccacatgtgtgtctagcccccacagaggtcaaaagagggtattgtataccctggaactgctgctgccctctgggtgctgggaacccaacacagatcctccaaaagagctcttaactgctgagccatttctcccattagctagaatagattttttttggtgggggaagcagttctgggttttgttgataagggacggggtagggagaacaaccaggcatgagcggtgtcctgggctcagtcccaacaagaaagaagcgataactagcaagagtaggactaggcttttttgttccagttagacattagttggcagtttctgattgggtagtatgctacctggttttgattacttaaggttagagccatctcagccttgcgaactttcaactaagttttgttttacatatacccatgaatattagatatatttgtaatggctactgctcagaaactgactgcagagttggctagatggctcagcagataaaagcattgactgctgataaatggtgactgggttaccctgagggtgtcacacacctgtgtgtgcacagatacacaaaggtaactaaataaacggaatcctaaagataagctatggacctcaatgagatgttattattatgtctttaaaaataagagttgggacatggcagtgagtggtctcatgtgggtcagatgtagccaaggatggccttgatcccctggtctttccccctgcacatgcacagggctggtattagagcacatacaaaatgttcctctgcatctaccctgtcctcttcactaggtgactacagtcagcatacagctgccattctgctctcctttcggtttttttttttgttgttgttgttgtttttggttttttaaaaagatttatttattatatctaagtacactatagctatcttcagatgcaccagaagagggcatcagatctcattacagatgattgtgagccactatgtggtggctgggagtcgaactcaggaccttcagaagagcagtcagtgctcttaaccgtggagccatctctccagccccctgctctcctttccaactatcaccgtttttcttttttttttttcaaagatttatttattagtataagttcactatagctgtcttcaaacacaccagaagagggtatcagatctcattatgggtggttgtgagccaccatgtggttgctgggatttgaattcagtacctttggaagagcagtcggtgctcttacccactgaaccatctcaccagccctatcactgtttttcttaacttgaatttcttaccagttcccatttgatacccaacagtccattaagatactctctgccagctagaccatagccacacctttaaacccagcacttgggaggctgaggcaggcagatctctgagttcaaggccagactgaagtacagagcaaattccaggacagccagggctgcacagggagacccttgtcttgagaaggggttctgagggggtgtgcagggaggggtctttgcagaggtctccattccatgtgaagcaaacaatactgagtaaaactgtgctgatctctttatatgatgtactcctttacccagtaacagctctcacagactgtggctgtcatccccaggtcacagatggaaaggatgacagataaagaggttagggcgtcagccgagagagatcgcagattaaaagtcagcagagctgaccctgcggcctcatgacatacctgccatcctagatccttccttttctttctccatttagattttctttccagtgttacctcctacctgatgtttaactctggagggttcccagcccccatctttggcctcttcccactgctgtgaagatgctaactcacacaggcctgtgctcacacttatcacaaggcagccgataagcttccagcacagagcagctgctgggctctgaccctccatacctcactgctgtgtgttcacaactgactcttctcctttgttgctctctgcgctttttttttctcatgtagttcctctttctgtgtccagcttccctagaaaccgtttttaacccattcttagatgggtctgcctcccccacccccacacaggtctgttcttatctttctcctctgtgcagcacttcacaactacattcagttaagggggagaacgatagctccttttagaaaactcaatcccagcactcgggaggcagaggcaggcggatttctgagttcgaggccagcctggtttacaaagttgagttccaggacagccagggctatacagagaaaccctatctcaaaaaaaaaaaaaaaccaaaacaataaaacaaaaagaaaaaaaagaaaacttgataaggcagggaccaagaaaccaattatttccatattcccaagtggctttcagaatacctggcacataagccccctacatattgtagagtcagtggaatggggaatgtatgtagttcagtgatagcacattttttttttcaaatgtccaatccccatctggtgatgcatgcctttaatcttagcacttgggaggtagaggcaggagaatctctgagtctgaagccagcctcatctacaataacaagttcccaaacagccagagccacacagagagagacactctgtctcaaacaccaaaattttctaaattaaaaaaaaaaattcctctctgcagagaggaggttgattcatcccttcttgaaccctccttgttcttagcttctccagaaggcctgtggaaggtggcatggttcttcttcactttatagcggataccgtttataagtgagtaggttcataggtcaggacataggatagctgttccctcagggaaccaggggaggatgaaagaaaatactaagagagacaactggaattgggggttcatttctgggatgagcttgacatctatagtgcgatagcagcccccagaatgcacaagtgtaagtcttacactaggtaagactcctcgtgggggatatggagcctgaaccggccagcttctgtaaccaggcaagaggacttccagtgaaggaattgggacaccagctgagccacaaaacctttgacctacaatgtatcctgcctacaagatgtgctggggttaaaagggcacagaacttgtgggagtggccaaaaactgtatgatctaagtagagactcatggcacgagtggaagtccatacccaagactaccttgaaggccaggaaccagctgctagatagcccagaatgctaggacggaaccaaacatactagcagttaaacaatgatgtcaatgaagtgattcctcataaatagaagcctaatatacttgtcatcaaacgggctttatccagcagctgttgggaacaaatgcgagatccacagccaagcatcaggtggatctggagaatcctgtggaaggagaagggtgaggtcataggagtcaggggtcgaggattccacaagaaaacccacagaaccaactaacctaggctcataggagctcacagagtctgaactgacaaccaagtagcctacatgggactaacttgggccctctgcatgtgttatagttgtgtagctcattcttcttgggagaattctaacagtgggagcagggctgtctctgactcttgcctgcttttgatatccatggaggcctattctctcttctgaaaagaaacaggaggagtggattgggaggaaaaactgcattcaggatgtaatgtatgtgagaagaataaacaaaatattaaataaaaataaaataagtatacttgttttgcccgggactggtgatttgtgcgttcctggaaatgcttgagaacaagattttgagtgtgggagcccaggcattagtgggactggagttgagggtgtggtattgtaggacagccattcctccaggtccaggccataagagaggcagctagcaggaagaagacagtttctttagacaatcatgtataaaaactagctacaaaatagaaactagttttagactctccctaccacgtccagttggagataatcaatagacattaagaaacaagaaaaggagtgggtgagagagatgtggtttttatctcaccgttaagtcaggccaacagagtacttttattctttgtcagctcagaaaagtgtgttttcactggggtaggttctggttggtagtggatgttacaggcgtgtataaaatgtaatttttgtgtgagtgtatgtaatgggggtgactttttgcaccatatttccatcctaggaagttagctctccgtggagctgtccgagtatctttggttaatctagaatgcctcattttaggaatgttattttcgctaatgctgatgtacatctcagttcttaaaggcagagtcttgagaatctactgcctgtgatttaatgtctgtccttttatttctctagggcctattccctggtggactccagtcaagtgtcgacatttctgatatccattcttcttatagtctatggtagtttcaggtaagacattcttcatgggatgtgttcggttgcagatagaggaagcattgctctgtggcgagcaatgggtttatcagggattgagtttgagagggtaattataatatgtgttctttggttgactgctgctaaacatgtctcagttttgcttatgactttagcatattaacgtaaagactgattaattaaaactgggtctgcagccaggcagtgatggtgcacgcctttaatcccagcacctgggaggcagaggcaggagaatttctgaggctagcctggtctacagagtgagtttcaggacagccagggctacacagagaaaccctgtctggagaaaccaaaagaaaccaaaccaaacaaacaaaacccactaggtgtgcagctagtgactgagctgagaagcagagtttatctgggaggctgtggggagtgctgactgatggcagttttgctctcacagggatggatcacacatttaaacaaagacagctcagaacacaataaatgaataatacgtgctgcaaaatgaatgataaatagtgggggctggagagatggctcaatggttaagagcactgactgctcttccagaggtcctgatttcaaatcccagcaaccacatggtggctcacaatcatctgtaatgacgtctgacgccctcttctggtgtgtctgaagacagctacagtgtactcacatataaaaataataaataaaactttaaaacaaaaagaatgataaatagtaaatgtaattttctttctctaacttgaaatcagagtgtagtcatccgccttgaatagacagagaaggattaagtaaagcagtatgcagctgtgctcagggaccttcctggtcccaaaagacctcttcacaaatagtattgttacagaaaccaacttttcttgctacaaaagcattgacattgtttaatccatacaaattgctgataagagactttttgactgtcagaaaccatttcctatgactcacctgtcactagagttgagtatgataacattccaagtcccccttgttgcccttgggaatgagactggattctgatgagtacatacctgtcctagtcctcatttgtgtgactaacaagaaaacaaagaagccagacagatgcccttttcagattatccgcagttgaaggagctgtggtggttggttgtgtgactcaggtcattgtgtggctgacacagtaaaagtgaaggctgcaggctggaaagatagctcagcagccaagagcacaccctgctcttgcatctaggcagccattgtaaaccagctccaaggggaccaccacccttctctctgggctctgagggcaccagcacacatgccatacactctcaaagacaacacagatactgcacacaaaattttaaagtgacggctgcttgggaatttttaaattaagaactggaatgataaatgtgtcagcaaaaggattttgaactatttgatacgtctggattttcataagtattttgtaaaatcacagacttaaagccttttatcccaatcattggagaaaaaaagtgtattggtataatatgcacactgattaaaattttaatcacaaagatatctacagcaagcccaaggttctttttctgggttagctgtttggtttggtttggttgttgtgtcaacacaagctagagtcctctgggaaagaaggaagctctcttaggagattcttccatcagatggtctataggcaaggctgaaagggcatactcctggtagatgattggtggggtagggtccagccttctagaccagtgccagcctgggtgggcaggtgggcggacaggtggtccagtggtcctaggctatgtaagaaaagagcataagcaagccagtaagcagtgcttccctgtggctgtgcttcagagccccgccccgccgtccctcggtgatggactgtgatcaggaaaacgaaccccacaaacccttcccttctctgagtcacttttggttgtgggttttttccaacaaagtaaaataggacacaattgttatttctcttgagacagcgtctccttaacgtagccctggagactgtccaggaactcactatgtagatcaagctggcttcaaaattaatggagcttctcctgcctctgtttcctaaatacttgtattaccatgcctagcttaggatacatgtcaaaaccacttctaagaaactagtacagttagaaccttaccaaagtgatcaatattttgtatttctacccctaatattttatcttttttccccactgatacatttttaaaagatttgtagttaaaaaaaatagccatttttagagttacaactcacaccactttcattagtgggaaactgccttttgttgcgcgcacgcgcgcgcacactctcacacacacacacacacacacacacacacacactatatacatttagaaagatagtatcctttttatttactaattttttttcccatcacacaacacccaattattttctgtagtcatcctattagggtttagtaattttgggcttcttatgctctgattttgtcagagatttgagttgttaaccttttattttctctcggattgagctctcttagggccagcagataaaagcctctgttgtaccagcctggaaatgcagtcagatccctgaaacacgtgtaaaagtggaaagagaatcatctatgcagagttttcctctgatctcacatatacaatgacgtgcccacatacacataaacattccctgccccccagtgcctagctatcatctatcatccatccatcaatccatctgtctgtccgtccatctatctcccctgaaataaatttgttttaaagataaacattaaaagttgaaatacttaactagtttctttctaccacatgctgccatattatttccagacaattgcaccagtttaggtttgcacagattttaatggtaacatagttaccatataggtggacctcctggttaacagtgaggagactggggcccagcctccacactgcacagcttgctgcaacagagtttgattggagtggctaagctgctgctcctgtgtatgatgtctttacacttgaatgcattttctgtaggaagtaaatcatggtgcctctggttacacttgaagttggactgagtgggtaatctcttctctcttctaggtaaagtgtgttacttctttatttactaaaattcagctttgaaactatcttaatacatctaggcttttctctgtgctgaaagcttcttgttctggcttggttgaaagtccttttttaaaaactggaaggggctggagaaatggctcagcagttataatctcttgcagaggtcctgatttcaattcccagcagtcacatggtggctcacaaccatctctaatggttctgactgcatttctctgactctagatgtgcctgctctgacatggcacatcccgcagccatgggatcttaggacgtggctgtcgctaactgcttccattgctgtgttgttaacagcatcaatgtcattccttcttattgctgggcagtttttctggctggctgggctgctgttggctgctgtgaatagtgttgctgcaagtgcttgtgggcagtcagggttgatgtgagtgtgtgttctcatgcctcacgagtagtagaaatactggacgacttggtaattctttgacttaatggtttaagaaaagccacgggtttcaaggcgtctatgccacttggcccggctgctagcattgtaagagtttgtccattctctcaccaacagttctcctttgagtgcttttttcagttttttccttactctcttattttaactatgattctcccatttcccttctccctcttgctccagccccactccggcccataggttttttttgtttgtttgtttctcattactgatggtagtgagccaccatgtggttgctgtgatttgaacccaggacctctggaagagcagtcagtgctcttaacgctgagccatctccccagcccctgttttcttcatttttactatatgataaggtatatcataagctctgctatgacttccatacctgtgtatcattgtttcaccacagtcacgcacaaacacattcctattcctcccgccccgtgggctctcgtcctctcccagacagtccttttctgcttgtgtgtttttcttcttggtgtcactgctgtccagtttggactcagtgcgtaaggaggcatgtctctgttgggtgactgtgcccagcatggagatttccacttctgcctggtttatgtaatgatgccctttcttttgttgttgtttttgttgttttgttttgttttgtttttccagacaggatttctctgtgtagctctggctgtcctggaactcacactgtagaccaggttggcctctaactcagaaattcgcctgcccctgccccccaagtgctgggattaaaggcatgtgccaccagtgcccggctgtcatttcattttttatgctaaataaagcatgtgtgtctgtgtcacattttagaaatgtatttgtccagatgggcagtagtgttgcacacctttaatctcagcacttgagaggcagaggcagttggatccttgagttcaagagcatccagtgctacacagagaaaccctgtctttaaaaatagaaaaatagatctattgatccaatgagtaacatgtaagaagatgtgtgacttgcatgtcgccacatagcaaacactgttgtaagggtgttagtgctgaccacacagccggaaactgagctaatgctgggattctgtctcagtccagagtcaatgtcattgtcaccccccttcctctcttaatctagtgggtataggtggtgtctcattatgacgttgattggtgtttcctcgtggcttatggtgtccagctcttttcatgtgtttatctgtcatcatgtagagtctttggtgaaatgtctgttgagaatcccctgcccttccccccacccccagctctgagggtcaagtgtagagccatgagcatgccatacttattctgagcctctctctctccccctcttcctctccttctccccccacccctctctctctccttctccccccacccctctctctatctctatttttattttcttagtgttgaatttaagagtccttcacatactatgaagatgcctttatcagataagtgcttgcagaacgttccacatttaagtctctgaatttttctttttattttctatatatttatagttcgtatgtttcctgatggactgacctttataaaatatccctctattacctgtggcacaccaccccttcggaaaacctctttctccagaaatatttacattgcaacttataacagtagcaaaattacaattatgaagtagcagtgaaataatgttgtggttggggtcaccacagcatgaggagctgtgttaaagggtggcagcatcaggaaggctgggtgccactgtctctgctttcttaaagtttctttgttaatatcttactgagtctgctagaatacccattcaaagtctttttattttatagttttagagagcttgttaaatatctctgagtgaagccccagtggtggatttagagagacatgtggggactatgtgtggatgtggggagtgcacacgaacgcagtttcacagctcttctcctggagctcccgaatgagactcacagcacccttgagtgtaaaatgctccagcgtatgtatggtcggaggccacctcaccgtctggctgttgacccctctgttattcctgacctaggtcttagacacagcatggttgtcgactgaatacagactctgtgtcctaactgttcagcacattctgtcagacctaaggcagccttgggcaagcccaagctctccttgtctactgcacacagtgcagggtttgcaaagcagccctaggtctctgctcaggaaaacctttgaatctaaagagtaagttgagttctgttcatagagtgaggatgttttgaggccagcctggtctacgaagtaagttccaggacagccaggggtatacagagaaaccctgtctcgaaaaaccataaatagatagatagatagatagatagatagatagatagatagatagatagataaaagagtgaggatgtagctgaatttagaacacttgacttgccaaccatgtataataccctgattttgagggtttattaaattattcattttggcttgtgtatgtgatgcctgtgcatgtttgtgtgggtgtgcataacggtagcgtcctcctcaacagccctccaaaccttactttgtgaaatgatgtccctcactgagcctggggttcactgggtcaagtaggctgactgacgtcagcactaaggatcctcctgtgtgcaaccagcactgggttctacactgtgccgctgcatctggctgtgctctgggcctcctgcttgtgtgctgtgctgactgaggcatcttccctaccttagctgaataccattctattcctttcttacaaaaagcacaaaccctaaataaagccttactaagacattgagagtgtgttgaacaacttcctgctatcgtgtcatgatagactcttgtacatggcatgaagtgtggtatttgacactaattagttgacttgaactccgtccagctcagcataccaccacagtgtcatgtaaaaggctgctgacttgataacctgtctggaatatggcagcatgtgtacagctcatctaaagcagacatcagatgggaggagaggctgcagtagctgagtttatgtggtgctctgaaacctatccttagcacactagtgcatgaaaaactgtgtgcactgtgttagtccttctttaaagatggcgcagtggagcttggcatggtggtgcacgcttttaatcccagcacttgggaggcagaggaaggcagatttctgagttcaaggccaacctgggctatagagtgagtcccaggacagccaaggctacacaaagaaacccggtctcaaaaaaaaaaaaacaaaaaaagaaaaaaagaaaaagaaaaaaaagaagaagatggctcagtgggaaagaccccttgctatgaaaacagaaggatctgagttcacatctcccacacacatgtagaactgcatgtggctacagtaacactagggttaggtgatggaaaaatacagattcagccagcttagcccagacagtctgatccagtaatagatcctgtctcaaaaatgcctccacagatgctcacatgggtgtatattcctgcatacagcgtacaccccccccccacacacacacacacggaggtgggggaggccgggagagctatagtaaatgtatttattcatagaggataaaggttctagggcctcttgctttgtatcatcgtcgccgccgccatcatcatcattttgcatattttgtattgtgattacccctcagttacttttccttgtttaggaagtaggtaaaggtcaggcagctgcggtgagatggtgactcagcagctctgagctgcttagacagcagagaactttaagatatcagcaggatgggctttatccagactcctctccttggcctgtgggtttggtcttcacatgtagatggtgccttcactggtccttctctcctgaccgtgcagacggaaggtccatctgtctctccctttcccttgcccacatctgcttatctatttccctcaatagcattttaagctaggtgtggtagtgcacaccttcggtcctagcactttcagtgcagaggcaggtgtacctgggagttcaacaccagcttgctagaccaggctaaagcctgcacagtgataccctaagaggagtagaagaaagaactatcttacctataatacctctttaaaaactgtttgcaaatacacttacatgttcaggtcctgtggttaaaactgcagataggaatcttgtgagtataccattcagtcccacataggtagagagtgatattactgtcagagcacaatacactcaatgattttgaagagggataggataaaataacaaacaaacacacagggtttctttgctgtctagcccaggctgtcctcagactggccatttcctgtgtcttcatcgtgaatgctgactgtgtgcatcactggttgcatattcattcccctctggaagcttgacctactgctgcttctcttgagtcatagttggtatcagtagaaatgaaaacattggtctaggtcttttttttaagacaggatctcaccacataaccctggctggttcacacttttgatgcaaacttggggaattctcttgcctcggcctccagctgcagggattttggatacgtgcttgcctctttctgttgatcattttttacttccgtcttgtttatgcatttgtatgtgagtaattctgtttgtggcaaatgtggaagacctcttagtagagttgattgtctcccttcatatttgtgtggataagactcataagcttttgacctgctaagcgttctcatagcccacattgctcatttaaacattcatttcagtaacccaaatgtgctctttgttaagcaaatagccagggtacggtttgaatggagtgtgtagtaataacatcttgatgtaaaggcatcatatcatgttgtagagcagaaataagattaaggtggtgagacagggctggggtgatggcggggggtcatctctgcagacagaatagactgatcaatggctagccaagcactgggctgtctgcagagttaataagttaccaggtaagttaggataaaattccacaattcacagccatcctggtacctaagacagaagtcttcccacaaaggcagtatttaaacagctgaagtctgctgtcagctgtgcaagtgtacaggctgtgactagatcccaacccaggcccagtgatggaacaatgtaaagttggaaaataagacctcccagcatcaggaggcagaggcaggcagaattaaggccagcctggtctatacagaggaactctgtcttggggcggggcatgggaaggtgactgcctccatagcacctcagctaagataaaatgtgcttgccttgcttggtcagtttatttgaaaatattcaggctggcaagatggctcaacagctaagagcactgactgctcttccgaaggtcctgagttcaaatcccagcaaccacatggtggctcacaaccacccatgatgagatctgatgccctcttctggtatatcagaagtcagctaataataataaatgaatctttgggccagagcaaggactgagcgagtgggactgaccagagcgagcagaggttctaaaaattcaaccctgacaaccacatgaaggctcacaatcacctctacagctatcatgttctcacatacataaaataaataaataataaaaatctttaaaaaaaatattctttaaaaagagtgtgtgtatgtgtgtgcgcgtgcgtgccctcccgcccgcccgccggcccgcccacatgtctccagcagagtggagaaaaacaggtcaaatccagaggagttgtagttacaggttgttatcagccaccacacacacacactacccccacccccacaatagacactagaaactgaacacaagagcttcaactgctaagtcatctctttggctttttgggggtttcttccagagtttctctgcatagccctggttggttgtcttggaacctaatcttgaactcagatccaactgcctctgtctcctgagtgctgaaattaaaggcctgtgctaaaagtagagttttaatagccctcagctaataatgacttggaagagttaaatgctggctagcactgacctcagcaccaggctcttttcctctaccttctgagatatgtcggctgtgtgtaacatccatgcctcaagtaagatcaaaagacagctggcagctttccagcccagaggaagggtagaagctagcccaggcagagatgtgagtaagggttcttctaaagttccccagctgccacaaggtcagagaggcagcacggctgcacagctgtacttaccaatattatgttcattaagtgggtcagaaaactcaggttagtgcatgttttcctaatgcgcacccacagggaagaaccagtctttgtgttccattggctgcaacacattcctaaacactccaaccagtctagacctgtgccatcaaatgatgagctctgtcatgagactaatgaacactgaggggacaaaggaatggataatacactgaaaattaccaccacgcttgtcatggtagaggctttagtttgaaacttgaatgcaggcctttggtctctaggtgttttgttgttgtagacctaattggaagtgagaaatgacaatttgtcctctagggccaactgccaagaggcagttaaggcaaatcctgccgagcatcctcctctgcctaaaagtaaatgtgtgaccccaagtgtatgcaagcagagctggtgagagtttgttagaatcagacagctgaagagcctaggtttgttgatgattattattacgcacattcgctctctcgcttgcgcgctctccctctctctccccctcccctccctctcgtgtgtgtgtgtgtgtgtgtgtgtgtgtgtgtgtgtgtgtgtgtgtacaagttggaggaaccagttctcttactccaccacataggatccaggaactaggacttggcagcagtctcagctgctgagtcatctctctgggcctctaagatgcctgtcatataatcaaagatctttacattccatgaagcaaaaactgtagacagagagggaagcagagcccacaaatacaattttaagaggcagtgtccttcattccataatggagcaaagcaagcagaaagaaaatgagcgttattacaatggacgtgactgatgtccttgtgtgcttatattgtatgtgcacctgcgtggacaagccagaggactgctgtcttcctaggtctgtatccagtgaacttgagatcctcaattgggctagattggctgacctaaatgctgtcctttccccaagtactgaagtacagacgtgtgccatcataccctgctcttggcatggtcgctagggatccaaactcagggttgcacagcactgttgactgagcgatcccaacaagccccacttaaccaatcctctatcagttcagcctgtcatttgtgaagtgcctcaacaacaaaacaggttctttatttaacatatgttaagatatttgctaatattggccatatcagagatatgaaacaagttggaatatataacacatgatctgtactctgttagctcggactaccatagcaaaatatgttgtagtatagatggcttagacaacagaaatttccttctccgaggctaaactcaaaaagcaagtgtgtggttgtgaaagacccagggaaggcgcacacacccagtaggactcagagactgaactcgctgtaagtacacgaggctttaatggcatacaaacacacaaacaacaaaggagcgctcaagccagcatgctggggttgaaactcatgcaccgtgcagggggcagaggagttcgaccccggcccaaactttttacaggcttataaaggcataaaccataaaccaaaaggggggagccgaaagaatttgcgcggttacacatgattggcttatttaaatgtcggcggggtgattacaaattaacagggcagtacgtgccagctaaggtatagggagacacaagggcttggacttctcgaggtcagcaggacacctggtcaatgtatgatttatggtgggctatagggaggcgccgcccgggaggcgccatcctgccagatggccatttggtccgtcctgatagccctggctagttcctgcactctcttttttatcttttatggcagacatttcttagctacagggtgggtttggctgtgcctggacccgcctgggtctattctttagccatgaatttcttgaacttagataccaaaatgctataagacccaaaattataagtttttgctcttcagttgaactgtttgctggactgaatgaccaactagtatcagcccctcagtgtgtgaggctcccagccttgtccatcccaaccctggactgttagccgacttgattttcactgttctgtacaatttctctctcaccagtcacatgatttgcaggtattttcttgcatctcatgagtggcctttgtttgttagtttgtaataacatttttgaagcacgagtgttttcacctgctttttgctgtgttttgagagaagccgtcccatgcacgtaaaagatgcaaagagggctggcaagatggctcagcgggtaagagcatggactgctcttccaaaaatcctgagttcaattccagcaaccacacggtggctcacaaccatccataatgagatctgatgccctcttctggagtgtctgaagacagctacagtgtacttatatataataataaataaatctttgggccagaatgagtggggttgaacggagtgagcagtcccaaccggagcaagcaaggtcctaaatataattcccaacaaccacgtgcaggctcacaaccatctgcacagctactgtgtactcacatagaaagaaagaaagagagagagagagagagagagagagagagagagagagagagagagaggaaggaaggaaggaaggaagaagagaaaagagaaagaaagaagcaagcaagcaagctagctctttccttttccttttcttttcttttcttttttttttcttttttttgagacagggtttctctgtgtagtcctggaactcactttgtagaccaggctggcctcgaactcagaaatcctcctgcctctgcctcccgagtgctgggattaaaggtgtgcgccaccacacccggctaaggaataaatcttttaaaaaaagaagttgcaaagattacttgttctttacccagcatttctctttgcagattttagtcctaagaaagtaattgagaatgtggcaggttgagctgcactggaatgctttattacagttggaaagctctggaactactggagggtcgtaggctgtgtcacatttgggaagaggccgtcctttccctcccaggagcagcacctgcagctgtctcaggactggctttgataattctctctcaagcagaactgattacctgttgattctttccacaggtctcttaatatggactttgaaaaccaagataaggagaaagacagcaacagttcttctggtctttcaatggcaacagcaccaataacagtaaggcgtnnnnnnnnnnnnnnnnnnnntggcaacagcaccaataacagtaaggcgtgttacacaggtcatttcttcccgtgtgcttctgatagccacaccccacccccacccctaccaccaccgcctcatccccttgtgctcacctcagctgacctccctgagcctccaggctcagggcttacatttgatagaacaatgcagtccgatctgtatgcttccatccctaagcttttatgttctaagtctaaagtcactgattgcttaagtccaagaagcttgagcctggtgcttgctgctgaggtcattccttacctgtaaagttcaggtagtgtccatccgcttgtgactgggtagctgtcccgtgaggttgctgattctgtcctgatgacagtttaattcggcatctgtgggagagcacatttgagtgcttggagagataagtgttaagagcatctcctgattgcaaaaatcaggagacactgagaattgaactcagcaacaaattgtcatttattcataaagtgagatttcatatttcataatgaagtacttggggccagggagatggcagagtcagaaaagtatcctgcaagcatggagtgctgcactcgctcaggtccccagcacccatgcagtatcctgggcgtagtggcagttgcctgtgaccccactgctggggacaggaatgaaagcccccaccccacccgttttgctggtaagttggaaagagactgtggaatgcagtctccttgttcttcgttcctatatcctttataaccatgttgcacttgcctaatatttaggtaggaagtggacacaacaaagacagtaaagtgggactcacttaaataggaagaatcggaggcaggcgggtctctgtgaggttgaggccagcctggtctaagagggagtttcaggctagtcagcactacatagaaagactgtctttaaaaaatgtctttccataaatgatatgatctttgtgtgaaataaagtctgcaccagtaatttgctaggagccacattaaagccagtgtgaatctgattttcagattggcgtgctacagaagttatcttctgttagtgtttcaagccaggccacacacgtgtgaactttatttctaaagccctgtattgtgcggcatgtttgcagatgacatgagtgaagtctgtggtacactgcatcacaaaatcaaagagaaacatgtagtgtgtctgaaatctcatggaagaaagtacctgctaatatcagttttatttcttgtaattcatcagggtcatacagggtcatacacctcttatgtcattttcttaagtcttcgtcctgtgtcagactatgcatccttcccataatgcactgagacacagataccaagaggactgacaggttacttaccctacagtacagttctctctgatgtagtctggaaaatactaagaataatgtgctgagataagagtcagcctacccatgagctcatggccctcacttgggggcgcttctgctttccctttattgtctgccaaactcaggactgcacctagggctagtatctgatcaggcataaattctccgtgaagagcacaagagctgccactgctgccatggttgggactggatgaaatttgggaggaaatgtcaccctgtaacacaaagctatcatctcagtatgtggaaaactaaagaaggaaaattacaactttgaggctggctatagagcagtttcctgggtaggcttggctacaaagtgatatttgtctcaaaatagtaataatgatattagtgggctggagagataattcagtgagtaagagctctggctgctttatcagagggcccaagttcagttctgagcatccacaagatggctaacagccgtctgtctgtagatctagaacagaccctctcattgaggatgatctgatgccctcttctggcctcggagtgcactgcatgaatgtgttggatagtgacacacactgagatatccaacaaagaattatttgtaatagggaaaaacttagaaaaaaactaaatgtcagtcatagaatggaaacatgtttcatacagtgaagttgtagaacagagaatagttcttataaagtagtgtcgagtgaaggaatccagacacacatttaatgtatgtaaagttccaaaaccaggcactgcaaaagcaccttacgtgtgggtgagagatgtgcagaggaaagcctataatcacagcaatagcgcctggctggctgagcaaggagagtgtccagctcaaagccagcctgcacgtacatagactccatccgtctataaagaaaagtcagaattcattcataaagaaaatggtgggaaaggaagttttaataggcggcatttcatccagatcatctctgactgcccaagtatatttctcattcctgtgacttcccaagcggcaggtagatctctctctctctctctctctctctnnnnnnnnnnnnnnnnnnnnnnnnnnnnnnnnnnnnnnnnnnnnnnnnnnnnnnnnnnnnnnnnnnnnnnnnnnnnnnnnnnnnnnnnccccatctcctcctcctccctctctctctctctccttgtcttcctctctccctctcctcccttccttccttctgacagggttccactgtacagccttgattggagctctagaactcactatgtagaccagtctggcctaaactcattgaaagccacctgcctttgttcttctcaggactgggactaatgtatgttccaccaggtccctcccaattcttcatttaaatagataaagaaagaaaaaaaaagtatgaatttcattgcctgattttagactttacactgcttccaggagcagacctgatggccagaaagcaaacaaagacagacagacacacacacatggaaacagaatcttgcagggtagactgaggtctctgctggggggaaggagggtcgactatagccccaccccaaagcttgtccatttattatatagatgttgagcagaggtggggttgttgtatacagatgaacaaatgaacaaggaggtgggatttctggcacagagccagatcagggaggcaggtttagctagtgtcagtgtattactggtcagttggggagcaggcttcacaccctaactattccttccaggtgagtactgcctgctcatacatgcccagggaaggaaggaaggctttgccatttcatagcctcagtgggggggtctcatgggcttgaagcactaggattcttgacatggccaacgcaaagcaaaaacagttctcagttttctttctttcttttttatttatttttttaagatttatttactttatatatgtgagtacactgtcactctcttgagacacacaccagaagagggcatcagatcccattacagatggttgtgagcctctatctggttgttgggaattgaactcaggacctctggaagagcattcagtgttcttaaccactgagccatctctccagcccccctcccctctttttttcccgctttgttggttttttttttgtttgtttgtttttggtttttcgagacagggtttctctgtgtagccctggctgttggaactcactctgtagtccaggctgacctcaaactcagaaatccacctgcctctgcctcccaaaggctgggactaatgatgtgcaccgccactgcctggccagaaaacatttctattcagggttttttccactccccgaaactgggcatcttgaagccttgaactatggtcattggtggatctacacatctttaattgccccatttacactgcagagaccataaaaactagaaatccctcctgttttcagtctgtgataatttggtggatatttgatcaaaagatacaaagtagtgtaacatgtcagtttattctgacagcatcagtgtaatttgcctatggctgcagtcactgagaatgatgtgagctggattgagaggaagaggtataggggtaaggagttaggtcatgcttgtgagttagaggccagcctggactatagcaggctgagttccaaagcaagcaaaaaaaaattaaaatgatgctattgtatataggtttagattccacagtgcctttttcttaggttaatgtgtaaggctgtgtaagcctttgtgattatgattgttatgtttaaaagtcttgttttgtttaagtttggttttaaatcattgaagcttgttcagaatatctaattggctagcccctcccttgtagaaccattgtctctggcgcccagaagtgcatcggcagcaactcaagagctccacttgcccactgatgtcttctcttgctttaaaattactgatttgagaagagaaactgtattttaatatcctcattgttccttgtattcatttgctttgtagtcaacatgctaagataaagcaagtttattataaatacatcttatagacttgctaatataatctttgttctaacaggtatcttaatttttgtgttcatgttttggtttgagtagacaggattttgtgtaggtcaggatgacctcaaagtcaccatatatcaagtgttcccttgttctgatacacttgtctcaactcacttgggtcatagataggcaggacatgtagatctcttacacatgccacccgccaataagaatgcttatagcctatgagctgagtcagaaaataggaggcgggacatccggcaggaatagagagaattctgggaaatagtctgaaacaggtgagattttcccagaaggctggacatacagagacaaggagatggacacaaggagacaaggcaagagaaccagccatgtcgctgaacccaggttaggacagaagggtaatagattaagagtgagttgaagaacaaaccgaagcttatgtatggcctaagcatttattaataaatagtctcagagtggtgattgctgggaattaaccacacccatagacaagctgactttatctgtagactatagcatgcttttacaggagaagaaagaatgtggacatggtttaggtttttaaaaggggttttgttcttacttaaaatcatttattttcaaaactattgttttcttttgtgaaatctgtgagctccagaagagttgagaactctttggggaagggatttcctacagctttgtcctctaggtgctcacagtagggctcctctgttcctgcagcgcagagcagagcttcctgagtcaggcctttttgtcaccttcttcagtcagtttccccagcatggctctaacagtcctaagtaaattactacacccttccacctcactgctaagaagcaattttggattaaaaaaacatttaatgttgtattacccctaaggtcctaaatacctcttgggataggcaaatttaaattcctatgagaagagcctttttgttttcatttttattttaaaacagtctcactatatagcttaatatagcttagaatgttcttgagccataatctttataggcttttgcctctgtgcctgtttctgtgtgtttgttcttttaaaatgtatgttactttcttcttgctcaatgtgcatgtgtgtggatatgggagtctccttccttccaccacacagctccaggacatcaggcttggcataagtgcctttgccaaacaataagctctgctgccagtccccaagcctagttttaaggtcagcagaggggtgtgtgtgtgtgtgtgtgagtgtaagatttattaactttaaagattatgtgtatattgtagggtatgggcacaagagtgtgagtgctcacaaaggccacaagagtgcatcagatcccctggagctacagatacacaggcagttgtgacctgcctggtgtggttactgtgaactgaactcaggtcctttgtaagaacagtgtgtgaaatcttaaccactgtcagctctccccagtgttaacaatagctttaaatgtccccttgtcattttccacccttgatgcctaagttccatctcgaaagggtcatttacttgcagccttaacacagatttctactttaaatattcgttataatcgcttgtgaggcagttttcatatgacatctcagcaggattaattaggtctatggcatacagaacacagggtggggtgcggggtccctcattcagccaccaccagattctgatactcccttctctgcagttactctgctcacaggtctcagctcctggtgcaaaattaacatttctgtgtagaattttagctagacctaacccctagagatttaattatctaagtagtataatgtttaagacgatctcttcagaactggcagggtggctcagctggtaatggcgtgggctcctgagcctgggaacccacatgggagaaggctacaaccccacacgctgtcctctgacctccacccacatacagacacagagaataaataataagtaagtaaataagtaactgtaattccaattaatgaaaacctctctcagtgattcctgtgggcagctaagaattaagagagaacactgagctgtgtcctgctctgtcccaggactttttaatctccttctgataccttaaaatttcaaagtcaaaccaccaccaccaccaccaccaccaccaccactccctcccaagaagctgggcaatgtcagtaggatccatgcctttaatctctgccctcaggaggcaggggctggagagggcaaacaggtgggtgtctgtgcgtttggtcactgtcagactgaaggcaccgaggacagcaagagcttagcctctcttgttgaaagccttagggcctggaagccacatataaatcccaggaaccccctaagttccataagttactgtaaaatgcacaggcacgttccttgaaggacaaggatggccactgtagaacatggagtctggataaagactgaggtcatggcaggcctagaaactgaggtccaatttcagttcaccaagcagctgggaggatggctcggcagttaagagcactggcttttcttccaacgtttgattctcagcacccgcatgctaacagctgttggtaagtttaggtctaggggatctggagccgtcttttgactttctgtgggtactgtgtgcacacacacctgcatgtgggcagtactccatacatagcaaataaagaagacagtttaaaaatgcacttcagtgcttaaaccctctggggtaaagtgaattcccttctggccacatattgagttatttctctgatgacctgttacctcaggctgtgagaacgtatatgacctctgatctcttaggtgacatcagtgcatcatgtcgtgcttagcctgtgcagtagtctatgaaggcggcggcggggggtgggggtgggtgttatgttgccattatgaagtaagggttaatgtgtcctgttttcctcttcaggcatccagaccattgattccacccaagcactgttcctcccgattggagcgtctgtctctctcctcgtcatgttcttcttctttgattcagttcaagtcgttttcacaatatgtacagcaggtaatttagctgcaagtttactaaaaggaatcaaaattgtaatgtatgtgccatgccatgtgagttctttatctgttgccagagtcttcaagaaagccagggattggaaaactcaggaactttagtgatgccaagtagttgtgacttgtttctggcagacaactcacaggtcttgttagtcacagtggctgttagcatcctctactaatgcgtctgcagatagaaatattgaaagccgggctgtggtggcgcacgcctttaatcccagcacttggaaggcagaggcagacggatttccgagtttgaggccaccctggtctaaagagtgagttccaggacagccagggctacacagagaaaccctgtctcaaaaaagaacaaaacaaaacaaaaagggagaaatattgacagctaatcacagctgccagctttgcagtatttccaggctaggcaaggatggacatacagggacaatattatccaaagataggtgactttaagagcgtgtcttctgcctgctgtgagttccttcttcctgagttacaggagaataagaacagcattcccgggctggtgagatggctcagtgagtaagagcacccgactgctcttcggaaggtccagagttcaaatcccagcaaccacatggtggctcaaaaccatccgcaacaagatctgactccctcttctggagtgtctgaagacagctacagtgtacttacatatattaataaataaatcttaaaaaaaaaaaaaaaaaagaacagcattccctgtccccatctatggcacactaggtgctaggtttttgtttttgtctttaatgtagctatccatgcactattgaaagacctctcctgggcacacagctcagtgctacgtacgtatgtacatacattcatacatacggcccctgggtcccagcttgagcacgagcagacaaataggggaaaaagatcatttaggtaacttttctacttgctaagaaaaatatattagaaaaccatcttctatgagttatgccatttttttcctgtaatgggtaaaggaaaaaaaattaatgaaacatattttcttttcctagttcttgcaacaatagcttttgcttttcttcttctcccgatgtgccagtatttaacaaggccctgctcacctcagaacaagtgagtactcggatctttccctctagggtatcagtaaagggtgttggccagagactggggagtgacgttcatatgtcctttttaaagttggagatagaatctcccttccctcctgtggcacaggaaatgcagacaccctcacatgtgggatcactgtcacctgctgtcgtctgctccctgtcagctagagtaggaaggaagtggggagagcagaacagtgcttgcgttcaagactctgtgggtctctggtggcctgcaggtactgctgccttggctcactgcattgttgacatcttcccccaggagccattgctccacagacatggatggaggtggccttggataataatcatttgtggcatctggtttttcaaaaattagtgacggccaagtacatttccccatcttacacatattatctcatcattgctaaatgaatggaatctgttcctttcttgattttatttttctcttaagaataagatttgccgggctggtgagatggctcagtgggtaagagcacccgactgctcttccagagttcaaatcccagcaaccacatggtggctcacaaccatccgtaacgagatctgatgccctcttctggagtgtctgaagacagctacagtgtacttacatataatgaataaataaatctttaaaaaaaaaaaaataagatttgccttatatttaactcccagagactgattcttttacattatacttttagacagcaatgttgataacttagtattaaaaaaaaaatagtcaggctggaggagagatggctcagtggttaagaacaccgactgctcttccgaaggtcctgagttcaaaccccagcaaccacatggtgcctcacaaccatacttaatgagatctgatgccctcttctggtgcatttgaagacagctacagtgtacttagatataataataaataaatctttaaaaatataatagtcttagtgcagtggttcagtgggcaaaagtgcttgtctacttaatcctctttgcctgagctcaattcttggactacccagtagaaggacagactgactttacaatgctctcacctgacctccactcataccccccccccccccacacacacacacagtgatagtaatgataaaatgtaaattaagaagatgaactgcattcccatgtgggagctaaaggataatccctgagtatttcatagatgacgccaacgaggcttgggtctcctaggatcctgggtcttaggtatcgccctgctctgacccagccagtgtgaacactgatcacggggtcactcagccactgagtgccgctcagtgcccctcagtccagccaatgtcttttccaggatttccttcggttgctgtgggcgtttcactgctgccgagctgctgtcgttctccctgtctgtcatgctcgtcctcatctgggttctcactggccactggcttctcatggatggtgagtgatgacgtacataggctgtggctgaacctcgtgtggttttatagctcacggcctcaactgtgggaccagtgcagatatgtaaatttcaaaaacagttgtgaacagcaaaagttagttcagaatcaaacacacagtgaaaccacagctttggcgaggtgcacgggtactgcagcaccatgtgccttcactgaaagcctcgttctgaagacacagcatgccctgactcaaagacctctgctcatactgatgcatatgtatgctatagttgcactgtttgtacttcaactccacatcttctctctcagagaaacacagtggtgtaatagaactcggtggcgcttcatattctgctgccatttttcagcatgcaaatattgaattagcatagctcgggttgggttgggttgggttgggttgggtggggttgggttgggtggggtgggnnnnnnnnnnnnnnnnnnnnnnnnnnnnnnnnnntgctatttgaagcagacatagtgacacatgtgtgtgtttgttccaaaacaaagtttctctatgtaggctggctatcctggaacccattctgtagaccatgctgacacaagctttttaggtccagcattgcagtagcaggaggacctctgtgagttcaagatcaacctgatctatgaagcaaattacaggcaccagggcaccagggccacacagtgaaaccctctcaaagaaaaaaaaaaagataattaaaaaaaaattgctgttttgagttgctggcctagtttttaatttaaaaaaaatacaacaaaacaatggaataaattttggcttcaaattaggatagaatacttaagtttccaaaatagtcataagcatacttctgacatttggtattgtatacatatggaaagccgcattcttggcagtgacagctatcatctctgtggaatagtgaaggtttttcctagacagcatcattcagccaagactagttcatgtaaaaatgtctagcatagtattagtatccagatttttttttgtctccagtagtaaaattatgtcttttaagtttataattaccactgaatgtttgcttcgcataccaattctatatgcctataatgattgagcagaaggaagctgagctgccagcaaaggaggtgcaagcctgctgtggacagttctcacagactcagctaggccttcccgcccctgtgcccaatgctacaccagcgcagtttctccgtggccctgggatgtgcccgtgagctttcctaaggcaggcagccataactactcacgagttcttccttagaagactgctctgtagccagtttatcactcattcatagttattgcccccatttttgcttaagacaagttttcaggtagctatttctttatataagtggaaataaatattacaaatataatagctaaaaacagatacttgggtagaattggctcagtgggtaggaacacttcctgctcttggcagaggatctgagttcagttctcggcacttctgtcaggaagctctcaacggcctgtaactgcagctctgaaggttcccaccccttctggttctgcaggcatctgcagaactcatggttttgttttgctttgctttgttttgttttttttgagacagggtttctctgtatagccctggctgtcctggaactcactttgtagaccaggctggcctcgaactcagaaatccgcctgcctctgccgcccaagtgctgggattaaaggcgagcgccaccacgcccagcagaacccatgtattgaatgatacgttgtggtgtgcttcttctttatagtcatagcatatgccactatcatcgtagaaagaaacatctgaaatagctctagagcattctgaagtacgtgtgtcatttaactgtttctgggtccttacattgtctttttaaacacctaaaataaacatgctaggtctactccttgggatagatgtggcatcactctgatccacctaggcaagtgcacttgctgtgtcacggcatacatgattttctaaagataaatttccaggcatgacgcctctccctagtaaaggttttctatatttactgtgtgtgttccaaacagggtttctctgtgtagagccctggctgtcctggaacttgctctgtaggccaggctggccttcagttcagagatccgcctgcttctgcctctgagcactgggattaaaggtgtgcacctcaccacttggctaattatattttatatctatagttatctctccttttagaatgagtaccgacacaagctaagattcactgaatgtggtaatgtggctcaaggagtaaagaagattaacccaagttcagtcctggggaccacattagccaaagagaactgactcccacgagttgtcctttaacctaaacatatgccctaagaaataaatgtaataaaagaattgtaaaatcactatacatgcttaaaaccctgaagcatcatacacacttaaaactctgcacagttaaaatgaaagaatgtatatcctagggctggagagatggctcagcagttaagagcactgactgctcttctgaaggtcctgagttcaattcccagcaaccacatggtggctcacaaccatctgtaatgggatccgatgccctcttctggtgtgtctgaagacagcaacagtgtactcatatacataaaataaatacatcttaaaaaaaaaaaagaaagaaagaaaaggaaaggaagaaagaaagaaattggccttagaggacatgtgtataaattaggtcagagaactgggaggcggatcgaaggaagattgttggcaaatacgtaagattaaaatgttgtagatattacattgatggactgatagggaaaatataatagagaaaacagtgaattgttggaatggtgtctgaatgaagggagaagactcaggaataagttagctttttttaagacaaagcctcactctatagaccatgctggccttgaactcagagatctgcctgcctctgccctcctgagtgctaggcttaatgtgtgcaccactcttgccagctaaattggctttttaatagggtaatatcctctgaccggaggaatagagtgtcaagacaggagtgcagaggatgacagaccccgggtgcagacctgcaggcagtccagccttgtatggcagaatgctgtgacctacctcacaccctagcaggtcctggtggatgggctgcccagtagaaacagttgtcagagcatctgggctggccagtcaagagcttatggaaagagacctccatccacacgctgatcccattcttcctgtacactctagctctggccatgggtctctgtgttgccatgatcgccttcgtccgcctgccaagcctcaaggtttcctgcctgcttctctcagggcttctcatctacgatgtcttctgggtgagtgtgaacttcctgttctcttctgaatttagttgaagtggatgttgctcaaagctgtctgagtccccaaagcctggcatgccgacagtctgaggtgattgattccctctggtgtggggcgcaggtcttagtcatgtatgggcatcctggcactgtttgttggtggccacttgatacagcaggcaatgtccgtgacgggtgaacaggcagcgtgctggcgagggctcttgcataggagtgagctctcctggattccactggtcagggagtggctgtgactgtggaaaaagactgcaggctgcaggctccaaaaacatgaagtcagagtctgatgctttagggttgagccgttagggcagagatgtctactggctactgtgggtggctggcagctcctggtacagcatctctttatcccggcaggtgttcttctcagcctacatcttcaacagtaatgtcatggtgaaagtggccacacagccagctgacaatcccctcgacgttctgtccaggaagctccacctgggacccaatgtggggcgtgatgttcctcgcctgtctttgcctggaaaattggtcttcccaaggtaggactggcctggggtcccctttctacatcatggaatacactgccttcttgtgtggatcgtctttcaccagcttccttgcactacactgggaagggccatcatctgcatacctgtgtaggtggagaatttaacgttagcatgtagtgttgtgaattcgtcacgtgcgcttgccctggcatttctgtttttttgagttttgttgttgtttttactttttcccttcgtagggtctcaaggtattaactctggtgagccagtaactcagggatctggcagctgagtgctgagggttaagctgaggtccaccacaccgtgcctctgttgtctccaaagggactactctgactggtggcatagaatcacactgcttttttattattatatttcctaaagatgatgactttcttcaagtgtttattagtcatttatacctctgaggactctgttcaatttagttcctattggttactttgtttcaagttttgagttctttaaatattgtagttattagtccctggtaacataaatacaagctgtctttcttcacttttgtttgcttcatttggttgtagccctaatgcaatcctgtgtgtcagttctcggtattacctatgctgttgaagccattaccaaaaatcttgcctgtctgtggctagagatgcatttctacccttaccagttttaaagtttctggtctcagggttttgttttttattttttaaaatacattttaatttgtgtgagtgcttttctgcatgcatctccatggaccacatgtttgcctggtgcccttggaaccagaagagggcagcagatcccctggaactggacagatgattgtgagctggcctgtgggtgctataaactaatcctgggtcctctacaagagcagccagcgctcgtaaccactcagcgatctggccctttaattcattttgagctggttttatgacagataagagattagattgtcttagttgttagtaaggtttttattgctgtgaagagacactgtgaccatgcagctcgtaagggaaagcattttactggggctggctttcagttcagcagttcagtccattgtcaccttggcaggaagccaggtggcacataggtaggtagacttgatgcccccagtggtaacttccttcaccaaggccacaccttctaatagtgtcattctctatgagcaagcattcaaatgcatgcgtctgtgggagcctattcccactcccatggcatccactttcattgtaatttacaggaatatccagctttcccagacatggtgtagaaaaagtgtcttcagtgcatgtgttgtatatggggcggttggggatataacgtaacagagctttcatagcctgattccatcactagcaccataaaaagaagagaggactgagagtgcattctgcagtctatctgttccattggctgtgtgctgagactctgacacagtttgaaatgaggtaatgcctgtccttcctggtggtgcttagacctgctttggctgtgcaggacctttggtaattactgtcttttctgtttctgctaagaatgttactggaggggctggtcagatggctcagaggttaagagcactgactgctcttccgaaggtcctgagttcaaatcccagcaaccacatggtggctcacaaccatctgtaatgagatctgatgccctcttctggagtgtctgaagacagctacaataaataaataaatctttaaaaaaaaaaaaaaagaatgttactggaattctgatgatggtcattatatctgcgagccacagtgctaactcatgagtaggtctgtgcattttgtagtgacttcaagtagatgtctcctcacctctctgctcgagttcccagggcttcactcgcctggcactttgggagtgggaggagagcatcatgactagggttttcttctcagaggaatcattgttggtctatagaaaaccatcactggccaggccagcctgctctacatggtgagatgggggtttttgttttggtttttcccttcccttatggctttaagaatttaaacaccatatccaaaaaaaaaaaaaagtaaggagcacatagcttgagttgagccttctcagagtgagtgagcctggctgtgggcgtggtctttagtgtgctgttgacttcagttgcaagaatttttattgacaagtcttctgcctgcagcaccagggaagatgggagtccttacctggactttgcctggtagcaaagttaaccctggctcagtgtagtgagtttgctagtgtcctttcctgtctgtgtggagtagtttgaccatgcagatcgtctcaggtctgcaggaatgtgtctgcacagtcgtgggttttcccttagtgctgacatcattgctcactctagatctgttggagttatcacagccttgatttcatttcagctgattgtatatatctagggatttatccatttcaccttgatcttccaatttggggaacataaaatttcaaagaatccattgattgtaaaacccctgctgcttcagtctgactcacccccccacacaccccaccccaccccaccccacccgctgatttcctttacttgtgctgagaggctttgatggcttaagtttagtgatgttttaaatggaaatagtaaaagttgtaaaggtaacattagagctgtgtctgttgtgtccagagagctctgaaatgttgtagtttttatttcttcattgaccactgttactcaagactgtattgttcagtgtttgtgtagtgtgttaccttcttgtccaagtaacaaaaatccccacagaagcacctataagaggcttatatcctgttcatgatttaaggggatacggtccatcccagcaagggaggtatgtgtgatgactgggccttgactctagtggtggaaacttgagacacggcttgctctgagcatcaggaaacagggtctttccgtacaccgccaccatcgccccagggggacccctccctccctgtaggcctcacctcctaatgccttcaaaatttggaaaacagagccaccagctgggggccaaatatttatacacacaagcctatggggcatttcttactcaaaccaagacacacaggctctgtagttcttactctctcatctctgcttctgttcccacaacctgataaagtgcatgacgttatctcagggatctttaagacttcctttatcacctgaaatgtgatgtggttgaattttcttaaaacttcacagactgctgagatgaatgtgtattctgtagctgttgggatattctgtgcacatgtacttttttagtctacatcacctaaatttagctgggttttgcacatctttaatcccagtactggggaggcagagacaggcagatttcttgagtatagccagggctatacagagaaaccctgtctcaaaaaatgtcgtctacgtttacttagatctgtggttctcagccccttgtgggcatgacactttcacaggggtcataagaccatcagaaaacaccaattatgttgtggtttttaacagtagcaaaattactgttatgaagtagcaataaaaataatctttttggttgagggtcaccaaaacaggaactgttttgaagtgtcacagcattaagaaggttgagaacacctgctttagagtctcccagtttgttccagtagagagaagtctctagtgtgctggaaaatgaggaaacagagtcctgggctaggtggtgagaaccaagctcaacactttgatgtcccactcgccctgggatgtggggctgcagaaatctagtgctctgttggaatatgggttatcctcaccagagcagcaggactgccatccactgtgtccctacctcaactcagcctgtctaaccagactccagacctacctcatacagcagtccccagactggggtgtggccattcctagtcaagccttcagagcaactacttctcacctagaaccacctctagttctgagcccttggagacacaagaggggcagggatgtctgttcctgctgctgccctatcatactcaagcaggcactgggatgccaggcccagcacttaaggcttgagagcgccttgttttcaccagaccacttgctgcatgggaggtggaacgaggttcccactgtcactgcttgtgccttccagctgtgctggcatcggtctgatctgagctgtgatgctgctccttatcgctctgactcttcctggtgagcatcagagagacattatgtaagctgctagctcaccgtccacaggtgtgccgagccaccgcagtgtggctgcagcttctgatttgtacacttggctgaaatgaacagaatctggtttggttgtttttcctctgagacagttgtaaaaatattttcatggtaacaatctcagtgaagtaattttagcaaagccagtgtgctcttcagtctaatgtagaagaaacacagagcgacagagttgacactgtaaaggatttcctagaagagttgctaaggagacattaggtcacaagtggggtttagccaaagcaatgttacctcccaaatactagaaggtaagtagtgtgaacgaggcctgctagagagaatttaggatgctgggatgtaaatgtctgttcaggattcatcctattagactccactcccataaccaaggagacatcctgacttagaaccagcagctagggccagtcctagaacacaagatataccttcaaggagcaacatccgtctagtccccgtgagcagggtgactctctctgggtgacaactgttgagaaaatacctgtgtgcttaaagtatgtgatatctcttctgtgtggaaccccccccccccatttgcctaagtggccagactggctgtctcctgtctgtataatttgttcagagtgtaccttaccttaggcccaggcacaagagagactgaagagtgagagcgtgcgtggactgaacaagtcttccctttgtgtatttagtgacatccgccacagtctgcctcgggctattttagtatttcagtaaagagctttcttcttgttttccccaagtgtggggagtgagtttgcactggggaagtagatttcttcaacatggtgatatgtgtcacagaggtgacaatgtgtggattgcttggcaaacactgagtgctcccaccttggagattctgggatcttttcacattgaaaagctcatgttgagcctaccatagtggctcgtgccaataatgccaggattcaggaggctaaggaagagtcttaactttgagaccatccttggccccatagcaagatcctatctcaaaacaacaaacaaaaagcaaatgggggcagggtgggggtggtatcatggtggcacacgcctttattcctgggatttgggagacagaagcaagtagctttttataggttcaagtggcctggtctgtatagttagtttcaggccagccagggctacagtgagaccctgtcttaaaccaaaagaaacaaaggagtcctttcattgtaaaatgatttttatgtaaggggaatcagtggattaatacagcagctatatttctttacctttgctagtccataatgtgtttatcagcatttattgacaaggcagagaataaatggtaagaattgtttacacaaagttgagacaggagatccttgccctaagcactacaatgctgtgtccagattgaaaccagatacgagagcagagaaatcagcatttaacaaacacaaaaataacctttgcacaaagacactatgcctgtattttatgtcttttttttaaagatttattatatgtaagtacactgttgctgtcctcagatactccagaagagtgcatcagatttcgttatggatggttgtgagccaccatgtggttgctaggattcgaactccggaccttcggaagagcagtcagtgctcttaaccactgagccatctcaccagccccgcattttatgtctttaaacaccttcagacagaaggcagagatggtatactgcaagtacccttaacgtgtgcccttgtgtttcagctccactggcagtcacttctctatgctgggcatcggggacattgtgatgcccggcctcctgttatgctttgttcttcgctatgacaactacaagaaacaagccagtggtgactcgtgtggggcccctggcccagccaatatctctgggcgcatgcagaaggtctcctacttccactgcaccctcatcgggtactttgtaggtaagaaaggccagcaggaaagcagctgggccatcactttcctccagcactcaccatcagttcatgtcttccagctgccaaccagaaaagcagtgactgcctgctgtttagatagccagaaggaatcctgaggggctcagtgcctatatctggaatgtgcagagcatggccagcacacgtgggaggctgagggtctagccactggataagctatcctttgtttgctgcctccatggctccaatgcatacatcacctgtgtcctcagacttttccatactaatgattctccagccaatccacaaacaggaagtcacagttggactagggcagacacagacatacagtgcacgcacacaccacacacacaggaagtatgagatagcagcttgccttcactaactaacctacatacacgacacgcgagttcctgccagtctgccacccagtgagggtcagcaagtgctgtcaccccaacatgcaggaaaggagggaggctaagaggcaggatgcgggctttcagagccccctcactggtctcttgattccttgatagtttatctgtgtcagagccactcatggattcctctctcctaggtctgctcactgcgactgtggcgtctcgcatccaccgagctgcccagccagctctcctctacttggtgccatttaccctattgccactcctcaccatggcctacctaaaggtgagagctcggctgcgaggggaagcactgacttgtgacgggaagggctcctagttacactgttgtggtcgtcctcagaccactgagggattaggagaagccaaggggggtgtgtgctgtgcttggatcacagcagtgccctagggccaagcccactcagggctggggcaggagaattttgagttcagggccagtgtgggcaacttaggaagctcctgtgtagaagcagaaacctaaagaactggcgctgaagcttgtgaggccctgggttcagtctccacctcccagatgccagacaaaagacaggccctggtgctgcctgatggctctttaataccatttgtttggaatgaactaagaagtgcttaatatcggggctgcaaatacagcccagtggttcaagcccttgctattgttggttcacagtacccgtgtggtattaactccagttcctggggacccagcactgcctttagacttccatgggcaccgagcacatgcatggtatacatacgtgcttgtaggcaggcaaaatactcatacattgaaatctaaatatatactattaaggcagtatatgactgctgtcccacaactcattatttttcttattgatttttgttctttttgaaacacggtttcacagtgtgattaatgtagccctggttagctggaagcagctctatggaccagattggtgctctcagggacacccactgcctctgcctccccagtgtgtgtccactgtacacatccttgaagtttgtgtgtacctgtgtcagcccacagagggacttcttgtttgccagggttttttggttttttttcctcagacagggtttctctgtgtaaccctggctgtcctggaactcactctgtagaccaggctggcctgaactcagaaatccccttgcctctgcctccccagtgctgggattacaggcgtgtgccaccactgccccgtgccaggttttttacaaacagagcaggccagaaagaacttccctcaggcctcagggcaggtgtagaggggccccacagacaggccagggcatctgcagtgagcaaggctgatgcgctggcatcctgataggaaggaaggaaaggaggacggaaagactactgcctcttgtttgaccctggacctctactgtgtccctcctgtcccagggtgacttacggaggatgtggtctgagcccttccactccaagtccagcagctcccggttcctggaagtatgatgacgcgggagaggtgaccagagcgctgtcctcaccttcctctctcaccgcgcggttttgttccctctacaagctggcctgactcaggcatgcctgctcacggaactgcagtgtgactggagtgtgtgtctgaggggagcgtttgcagagggcactggagccctgcacagcccttctcttctccgctctgggagagtggacccttccagaaggggcaggccggcccttcgcccggtgctcctccttcctcgtgtttttatggatctgcaccagactgttaacttgtggggagatggcgaagttgacttatttaaaaactacaaacagcaagttgttgttctagaactttgaacactaaatggaagaaaatccattagcagaccgaagtctcttcagtgaaccctccgaaactctgggaccagtttcctctgggggctccatacagagacccagggcagaacttctgccctattttttttcttttttcttttggatttattaaatattttctgtggtgtgaagtgacttattacatccacagacattgaatgacttcttacaacatacacataagaatttgttgtaatgactgtgtccagccgtgttggcagtgagcaggacgcggttggtttatacatacgtacatatatatatatatatacacacacgtgcacatagatatctgtgagtaaacagcgactaagcctgctaaggtcacgccatgcagctgccgggggcttgctgtcatgggagcatgtagaacagtttacctggcttcctcgcacacgctgctgtctcccttgagagtcgcgtgcggttgtaagctgtggatgcgctgaactgatagacttgtgggctgtggggactcctccttttgatcagtgtagcaaattagggatgaaaagtttgaactttttgacccttttctttttacaggcttttccctcgcagtttttagtaaccgcctcttgaaccagtgcatgtattatagcagccggtgtctttgtgctttctgatcatagttatgtactacctgtaaatacatttttctattttatatttttttgtattttttttgacatttcgtttcattggtgcgctgtattttccatgccctcagtcccttagaaaagacaaaacagaaaaaagcaacgcaactctgtccttgctgtgatgatcacagcctcagtttacctgtggtgacagcaggctgtggggacaaatgtcagttgcctctgcaaatggagctgaagtccaggagctggagacagagcaggctgctgctgtgacttcaaaacctggctccgtgctgttgctgtccgtgggctgcacagagcctggcatcaccatcacctcacacttggttagctgctgcctgggtgcgaggcggcaggccctagagtctgttccttcccggggccgctggcatcgtggcctgcctgtccctattcctgcagacattgtgcagagtacacagcccatcgtgtccatggagcagcgtgccaccaagttgttggttcctctgtcgtcttcagactctgttgaggggtttgaagggttggttttgtctctaataaatgactcctttttctagctttggtcctgacttcacttctggtggttggtgcagagctgagctcccgttagcctctccctgccagccactgttgggctactctgtccccagagctgtcacttgcagctctggctctgtcgtgtcttggactcatggtgtagaggctcctgcagagctctagctgcatgcggcactggcagagactggaaatgagctagctcctcgatcagtgctgaggggagcctcttcctcagccccagggatgctgtgtccaggaacaggtccacagagctgcagggatgctgagaggggaggtggggaggggagagcagcgctcagcctcagggatgctggggaggcgggggtgactccaagggctaggtgtgcttggaagttgtcatttcagttctgagcaaagttagtctgagtttgtgggagagaaatcctgcacagcacttggactcgagctcaggccactgcccgtcctcagagcccttgaagcacccccagcagcctcagctcgggccagaatgtgctcaagttctggaggccatcagaggcaccttctggtcactcagtggaaggttttgctgttttctcacaagtccattagggcagtcttcaaacaaaccgtgtgctggtatctcacctgttcatggctgagctgataatgaccatttcagccccaagtgtgctgtgttccattcagactgccatgatggggggcatcctctgaacaaaatggccacgtatcaccctgtgtgggacagcgggctgctagctgaagttcctctacagcaggccagcacaggcatccactacccaggtgagttactgaacccacaaaaaatggtggtggggaagggaatgtggccagtatatgtgttcagaatagagccttgtgagtctgtggagtgctctgcttataagctcaccaggcccagtgtggcaacgtgtggcagcactgctgtttgtcagatcgatctgggagttaatagggagtttccattcttctctgtgtgcgggggtgtttgtgtgtcttaagggtaccacgtgcatgtcaaatcctctggaactggagtcagagatgattgtgaactatcatgtaggtgccaggaaccaagtctgggtcccctggaagtgcccctttaaaaaaaaaaagttttttttttccctccatgtatatattcacaataaatctgtgtgcctagtgtccatggaggtcatccggttcccctggaactggaactaggggtgctttctagttgtcatgtaggtgctaaaattcaaacccggatcctacgcaagaacaactgctctcaaccagtgagccctcgccagcctcttgaaggagttttgagtgttcatgaaatatgaacaaacggcctttggccccgcttcccatgggagccagcagcgtgcacctccccctttcccctggcaggctcgaggctcagcacctcaccatgactgtgtctggcacactggtggtacccctggaagcctcagcctcagagcaggagagtaaagcagtcagctgtcatcgacagacaacagctacacaagctagctgccacaggagagtgggaacacaggaactgcctgggtttgtgttcagactcccatttccttccccctctcattccccaccccagcctctgagaatccaagatcctttctgccctagcagaacgtttagtgctgtggtacttaggttgacaggccctggctgtttgtgcaaactcaagttgaactcttgtagtccagtcggaagttaccctgaacactggatatggcagccaacactatacacaggtcacacagtgcaatagaggaggacccctggctcacacctgttcctctgtctcactgtaagggccaaagaacaggtgtaacatataaatggccacaaagaaaacgacactgctgcagcttgtgacacctcgacctttaaccacagcagggctcagaagtcttagggtcattcccctgccaagaggttgtgacagtcctgagcgtgtgtggcacttcgagctggttgcaccttgtgctattactgctttaggtatttgaatcatagctgtggagcctacgtaaagaagtgcctttaatctcagcgcttgggaggcggaggcagaggcaggcggatttctgaggttgaggctagcctggtctacagagtgagttccaggacagccagagctatacagagaaaccctgtctctgaagaaaaaaaaaaatagaaaaaaaaaatgtcacgagatcagaagaactatagcgttgaagcttggaacaaacacggtggcctttaagccgaagcagatctacaaggccagcctggtctccatgaaaagcttcatgccagcaaaggcaacataattagaccctgtcctaaaagtgagtgactgtgagtgtgtgtacacagtgcatgtaggaaacagtttggaaggaagtgtgagaaggttggtgcactttagacaaaaagatcattttaggccagcctgagctgcagactgagactgtctcaaaacaaaaacagtaaggtctggtctggtcctgcccaatcggccacttcccttttcagtagaccctgtgaagcccagtcctggtcacagcagcagaggcgttgtgcattccagtccatgagcctcagctttcctgagtccctcatggagaccaagagaagacaggaggaggctggtggacagtgccaaccagtgcacaggggctctgcgcccgtaagaaatgaaggaagtgggtgtccacagggcagagcaggatggttgcccgccagcagaccaagctgtgggtgccagtccctctgcccatgtggaaaactaagggtggctcaggaccacacggctagagagtgggcctggagctaggtctgccctgagaccctcaggacaaagggtgggagggaggaggttatgatcaagctggacaactcccagagtcctttgtagttgttgtacacagagcaccagccataccaccagggtcacaactggtgactggatgaataactgagtcagggcctgtgtcctccgccttcatacagcctgcccatcaccacattataaagccctctacccaccaagctatggagaagtctttaaacattcccacctcggtcatcacaactccagctccaggggatgccacgcctctggccttgcacctgcgtgcacacacgtacacacaccacaaagcttaatctctagttctggtgggatggctcagcagttaagaacactgactgttcttcctgagttcaattcctagcacccacctggttgctcacgaccttctataaagagatcagatgccctctaacattcaagtgtacatacagacagtgcactcctgtgtttcaaaaatacataaatacatttttttaaatctctaaaactgctatatggataaacacatagtggtttcccaatcatgagattgcagccttacataaaccaggagtccaaggaccaaggcagcatgcccccagccagccaggctcctagcagacctgggtgagaatcttggacacaaaacgtgaggatgtcccaagtcttgacataggcagggggagcccatccttacaacacccctgtaaagtcccaaccaaataaaagccaccccagattgaccggtggggttggagagacctgccatttgtctctggaaagacccactgtgatacatagttaaaacatcttgtttctggcttcaataaccaagggaggcagggagagactgcccagtggttaagaatacttgctgtgggctggagagatggctcagtggttaagagcactgactgatcttctgaaggtcccaagttcaaatcccaggaaccacatggtggctcacaaccatctgtaatgagatctgatgccctcttctggagtgtctgaagacagctacagtgtacttacatacattaaaaaaaaaaaaaagaatacttgctgctcttacagaggaccaagttcccacatgactgctcacaaatgcttgctatctccaggtccagtggctccactactctgtttccacagaccccggaacacacacacataaggtaatcggagaaagtaaacgtaacgagttcacaatgactttggaacctaaacttaaaagggggaaaatatcttagaaaggaagagaagaccaaccatagtgcgcatgcctttaatcctagcactcagcaagcggaggcaaggggatctctgtaaattcaaggccagcctggtctacagagtgggttccaggacagccagggctacacagagaaatcttgtcttgaaaaaggacggaccatctcacacttctggtatgcgagtgctgatcgaatccctacaatagtcagagaatcaagagcctagagagaaactgttgaatgttaactgctggccatcacagaggattaattttttttttttttttgaaagcagaacatttattttatgactgattgaaatccttaagaagaactggatgctgcgacagctgccctcttgggtttcggtgttgttccctcacggaatccatgtctgaatctgcggtagacaatctttaggtgcctcatccgaccagtcccggtagtgtttcgtctcttagccttggcactccagttatacttcctcttgcgcttggcagggtagccacacttgccacaagtcgacttctgaaggtggtaggccttggagccacagcggcggcacagcgtgtgcgtcttgttgcgacgcttaccaaaggatgacgttcccttcgtcatcttgcttctaccggcgaggccaaagagaccggaagagagggaggattaattttaagtcaaaccaagttaaatgttagtgtgtgtgtgcgcgcgcgtgcatctcagagcacacatggagatcaggggataactttttttttaagatttatttcatgtatgtgagtacactatagctgtcttctgacacaccagaagagggcatcagatcctgttacagatggttgtgagccaccatgtggttgctgggaattgaactcgagtcctctggaagagcactccgtgctcttaaccactaagccatctctccagttcaggggataaccttctcgagtttgttcctatccaccccttgctgaggcatggtctctggcttctgtgtgttagcctacctggcccatgagcttcaggagctctggctccgtgagctggggtaagaaaaggtgcatgtggccatatctggctgtcctgtgggatgcaggaattgaacttgagttagcagtgtttttacgctctgagccaccgcccaggcctaagtgcccacatttaaacaagaatccttggcaaaatttctgcaatgtgttaggatcagagcctgagatcagttttcaagtacagtctgtacaaagtgaagggattagaaccatggaggctcctagaagattgtcatttttaattacttatgtgtacatatgcatgtgtctgtgcatgtacaccactgtacatgaagctcagaagtgggtgctgtttctgaaacatatctatccgttgcccaggctgcccttctggacataactgatcctcctgtctccaaccccagagtagctaggacagcatacagaggccctcataaggtagaatcattcaaggcttttctttcttacacatggtatcactttgtagccctggctggcctcaaactcacaaagatccacatacctctgcctccagagtgttgggattaaaggtgtgcaccaccacccctggcaacattcaagacttttaaagcagctatcataactaagttaaaggattctgtcagaagccatctgggaaaagctatggcaagtgagcgaggtgtctggagatggccccaccattttgcatggctgcactaggagaggtgtaggattctcatagactccatcccagaatcgcttctcactgctggtaggccattcctgacactgttacccagcctaatgcttcctgggcatccgcccaccctactggtcagtgaacgtgtacactcatgataattttataaaactcctaaactgatacaaataacctcaagccctctatagaataaaagctgcagatagagatttgtaaacctgcacgtgtcaagggccaactgaactagaaaagcgaagcaggcttggagcagattacgatcaaggaaaacattccttctaagtcaggaaggaagccactatttggtaactgaaggacatgaactgggatcgggcaatgtatcataggtgcaaggacagaaaataaatgatgggctggtcttatctatacaagatgtcaaaactaataatacacaaggaagatgatttgtctcttgataaaaacatgctaacttgtgccataaaataaataaatatatatattactttagggctggagagatagctcagtggttaagatcaccaactgcgagctgggcgtagtgacgcacgcctttaatcccagcacttgggaggcagaggcaggcggatttctgagttcaaggccagcctggtctacaaagtgagttccaggacagccaagagctatacagagaaaccctgtctcgaaaaaaccaaaaaagaaaaaaaaaaatcaccgactgttcttccagaggtcctgagttcaattccctgcaaccacatggcggctcacaaccatctgtaatagggtctgatgcccccattctggtgtgtctgaagagagtgacactgtactcacatacaaataataaaatttaaaaatattgctttaaacttataatgaacttctagagctaaagatgtgtaaacaattccatggtaactccttaagtcacaaccatctgtaagttcagtgtcttctgacctctgtagacactgcatgcaaatcacacccagacaggctttcaggcaaaacacaataagcaaatccaagttggacaaggctgcacatgcatttaatcccagcacttgggagacagaggcagacagatctctggggcagcctagtctacagagtgagtttcaggatagccaggtctacatagagagatactatcttgaaaaaaaaaaaccaaaactccggggcctagcaaacacagaagtggatgatcacagtcagctattggatgggtcacacagcccccaatggaggagctagagaaattacccaaggagctaatgggacctgcaaccctataggtggaacaacattatgaactaaccagtaccccggagctcttgtctctagctgcatatgtatcaagatggcctagtcggccatcactgcaaagagaggcccactgaacttgcaaactttatatgccccagtacaggggaacgccagggccaaaaagggggagtgggtgggtaggggattggggggtgggtatgggggacttttgggatagcattgaaaatgtaaacaaggaaaatacctaataaaaaagaaaaaaaccaaaactaagtaactacagtcccaagagaatcaaattggccagtcctggtgtttaagtggtgcccagagcccatcaagagtttccaaaagggctggtgagatggctcagtgggtaagagcacccgactgctcttccaaaggttcagagttcaaatcccagcaaccacatggtggctcacaaccatccttaacaagatctgacgccctcttctggattgtctgaagacagctacagtgtacttacatataataaataaatgaatctttaaaaaaaaaaaaaaaagagtttccaaaaaccctgcacactaacatgactcagttcactcaagaggcagggtggtctgtacagtgagttctaatgcagtcttgactacacagcaagaccctgtcagaaattgttctcaaaagtttcaccttaaaaaaaaataaataaaaggaggctggagagatgtctcagcagttaagagcactgactgctcttccagaggtcctaagttcaattcccagcaaccacacggtggctcacaaccatctataatgggatctggtgccctcttctggtgtgtctgaagacagctacagtgtattcatatacataaaagaaaaaagaatgaagaatctctcaaactccccagagcacagaggatacagcacccccatttagaccccataaagagaacccaataccatgtgaccacagcccccttgacaacctggtgtatggagtgagcagtagccagaggtctcctaggcatcccaggggctgcagctctgctcgggtcccactgcccatgtggccagcttgaactgtcccactccatccatcacctggatccatcctgcacttctccaaatgccctccaccctgatgaagccttgccatgtcactcaaagtctctccagctgggtttgctggcatttcatcattatgacagtgactttaggaaaaagagacaagaagcccaagtccccgggagatgaggaaaaaaaatcatctcatacttggaaaatggtggcaggaggatcactgatggttcaagaccaatctgggttacagggtaagaccctgtctcaaaaagtgtgtgtgtgtgtgtgtgtgtgtgtgtgtgtaagataccatatatgaccagtatataatagactacgttatacataaacaattatatataaatatgtattccatttatatatatgtatatatgtatgtgtatatatggggaaaggaagaaaaccacacttaagtacttcataaatgtggaccccaaaaatagaaaacctgaaaagcagcagcagtcgggctgagcagatggctgagaacttgccacacgagggcctgagctgggagcccggcacccagagacagcgccaagcccggcactgggaaggaatggagataggaggatcttggtggcttcctagttccaggttcactaacagaccctatactcaagggactcacctacagccacctggttccacacaggtcctcaaaagtacactggatggggctggagagatggctcagtgttgaagaacatttgctggtcccagcacacccacattggtgactcacaaccacctgtaacctaactccagctcctgagtacccctctgcccccttctggcatccatgggtactgcatgcaggtgcctgtctacatacacataaccaaaacctaaaaataaataaataaataaaacgcacctttaaaaacagatgtgcgctgggcggtggtggtgcacacctttaatcccagcacctgggaggcagaggcaggcagatttctgaattcgaggccagccggtctacagagtgagttccaggacagcaagagctatacagagaaaccctgtctcgggaaagaaaaaaaaaaaaaaaacagatgtgcaaataaatcaataactacacaaaaaggcacatatcctcatccactgggggactgcagatacaacccacaatgggttcacacctcaccccagtcagagtggctcacagcaagaaaatcaacaacagctggacaaagtcggtcatgcctggctctttagaaagatgtaatcagtaaaacgagcagacaactcggaagatgaggcatctgaatcacggagctacacagcacaccggagctgactcacggcaaggccatcagactaattgagagattgagaggcagtccactaagccaccagcctgaactcttcaaaaaacatctctggcgcaaagtaaattgcaggctgatgtgctgttctgtatgactttcagccaaactcagtgcctaatccctggccaacagcaccatgtaacactgaggaaaccagcccaacagtggtggcgcacgcctttaatcccagcactcgggaggcagaggcagccagatttgagtttgaggccagcctggtctacagagtgagttccaggacagccagggctacacagagaaaaaccaaaaactaaaacactgaggaaaccagccaatttgaatggagttgcaggcacctggtggttgtttcccgatttagtcttcatcttgcacctatctttaggacgtgcacctgtcaaaggatccgaactgacgtc

SEQ ID NO: 250 - DNA, 2600 bp, Mus musculus
gccgctgccgccgccgccgccggccatgtcccccggccgccgccgccgccgcccgagcgcggcgctcccgcggaccggcgcgcactgagcgcgggcccgagccaccgtttcggggcccttgttctccgcgccgccgccgccgccatgttgggtttggagccgcagcggagccgccgccgccgccgcggctgacgaggccgagcgcggagcccggggcccgcgcccgctccggggctcagggagcggggcccgtcggagtctgtcggagcccgactgcctgtcctccgtgcgagcgagtgaaggagcgagccgccggggcccccggccgcgccctctgccgccggccgagcgagccgcggagcccccgagaggcagcaccatggcggaacagacctattcgtgggcctattccctggtggactccagtcaagtgtcgacatttctgatatccattcttcttatagtctatggtagtttcaggatttccttcggttgctgtgggcgtttcactgctgccgagctgctgtcgttctccctgtctgtcatgctcgtcctcatctgggttctcactggccactggcttctcatggatgctctggccatgggtctctgtgttgccatgatcgccttcgtccgcctgccaagcctcaaggtttcctgcctgcttctctcagggcttctcatctacgatgtcttctgggtgttcttctcagcctacatcttcaacagtaatgtcatggtgaaagtggccacacagccagctgacaatcccctcgacgttctgtccaggaagctccacctgggacccaatgtggggcgtgatgttcctcgcctgtctttgcctggaaaattggtcttcccaagctccactggcagtcacttctctatgctgggcatcggggacattgtgatgcccggcctcctgttatgctttgttcttcgctatgacaactacaagaaacaagccagtggtgactcgtgtggggcccctggcccagccaatatctctgggcgcatgcagaaggtctcctacttccactgcaccctcatcgggtactttgtaggtctgctcactgcgactgtggcgtctcgcatccaccgagctgcccagccagctctcctctacttggtgccatttaccctattgccactcctcaccatggcctacctaaagggtgacttacggaggatgtggtctgagcccttccactccaagtccagcagctcccggttcctggaagtatgatgacgcgggagaggtgaccagagcgctgtcctcaccttcctctctcaccgcgcggttttgttccctctacaagctggcctgactcaggcatgcctgctcacggaactgcagtgtgactggagtgtgtgtctgaggggagcgtttgcagagggcactggagccctgcacagcccttctcttctccgctctgggagagtggacccttccagaaggggcaggccggcccttcgcccggtgctcctccttcctcgtgtttttatggatctgcaccagactgttaacttgtggggagatggcgaagttgacttatttaaaaactacaaacagcaagttgttgttctagaactttgaacactaaatggaagaaaatccattagcagaccgaagtctcttcagtgaaccctccgaaactctgggaccagtttcctctgggggctccatacagagacccagggcagaacttctgccctattttttttcttttttcttttggatttattaaatattttctgtggtgtgaagtgacttattacatccacagacattgaatgacttcttacaacatacacataagaatttgttgtaatgactgtgtccagccgtgttggcagtgagcaggacgcggttggtttatacatacgtacatatatatatatatatacacacacgtgcacatagatatctgtgagtaaacagcgactaagcctgctaaggtcacgccatgcagctgccgggggcttgctgtcatgggagcatgtagaacagtttacctggcttcctcgcacacgctgctgtctcccttgagagtcgcgtgcggttgtaagctgtggatgcgctgaactgatagacttgtgggctgtggggactcctccttttgatcagtgtagcaaattagggatgaaaagtttgaactttttgacccttttctttttacaggcttttccctcgcagtttttagtaaccgcctcttgaaccagtgcatgtattatagcagccggtgtctttgtgctttctgatcatagttatgtactacctgtaaatacatttttctattttatatttttttgtattttttttgacatttcgtttcattggtgcgctgtattttccatgccctcagtcccttagaaaagacaaaacagaaaaaagcaacgcaactcttctgttccttcccggggccgctggcatcgtggcctgcctgtccctattcctgcagacattgtgcagagtacacagcccatcgtgtccatggagcagcgtgccaccaagttgttggttcctctgtcgtcttcagactctgttgaggggtttgaagggttggttttgtctctaataaatgactcctttttctagc

SEQ ID NO: 251 - protein, 381 aa, Mus musculus
ARARATVSGPLFSAPPPPPCWVWSRSGAAAAAAADEAERGRPRPLRGSGSGARRSLSEPDCLSSVRASEGASRRGPRPRPLPPAERAAEPPRGSTMAEQTYSWAYSLVDSSQVSTFLISILLIVYGSFRISFGCCGRFTAAELLSFSLSVMLVLIWVLTGHWLLMDAMGLCVAMIAFVRLPSLKVSCLLLSGLLIYDVFWVFFSAYIFNSNVMVKVATQPADNPLDVLSRKLHLGPNVGRDVPRLSLPGKLVFPSSTGSHFSMLGIGDIVMPGLLLCFVLRYDNYKKQASGDSCGAPGPANISGRMQKVSYFHCTLIGYFVGLLTATVASRIHRAAQPALLYLVPFTLLPLLTMAYLKGDLRRMWSEPFHSKSSSSRFLEV

SEQ ID NO: 252 - DNA, 161531 bp, Homo sapiens
  misc_feature (1)...(161531): n = A,T,C or G
nnnnnnnnnnnnnnnnnnnnnnnnnnnnnnnnnnnnnnnnnnnnnnnnnnnnnnnnnnnnnnnnnnnnnnnnnnnnnnnnnnnnnnnnnnnnnnnnnnnnnnnnnnnnnnnnnnnnnctggctatactaaaaatacaaaaaattagccaggggtggtggtgggcacctgtagtcccagctactcgggaagctgaggcaggagaatcgcttgaacctggaaggtggagcttgcagtgagccaagatcgtgccatggcactccagcctgggcgacagaggaagactctttctcaaaaaaaataaaataaaataaaataataataataataacaattttaagtagattgtgataagttaaagctcatgagattcacactcactacagcagccacttcgactacaatttaacgagggtacagctttaaaaaagccagtaaagccgggggcagtggctcacacctgtaatcccagcactttgggaggccaaggcaggtggactgcctgaactcaggagtttgagaccagcctgagcaacatggtgaaaacccatctctactaaaatacaaaagattagctgggtgtggcagcgtgtgcctgtaatcccagctactcagggggctgaggaaggagaacttctggaacccagcaggcagaggttacagagagccgagattgcaccactgcactccagcctgggcaacaagagcaagactctgtctcaaaaaagaaaaaagccagtagagatattaaaatataatcataaaaaattactcagttaactcaaaagaaggtaggaaaggagaaacagaggaacaacaacaaaaaagatggaatgagtagaaaacaaatagcaaaatggcagaaccaaacctaaacacatcaacaattacatcaaatgtaaatgaaataaatattctaattaaaacacagaaatggttaggcaggagccgggcactgtggcttatgcctgtaatctcagtactttgggaggctgaggctgaggctgaggaaggtggatcacctgaggtcagaagttcaagaccagcctggccaacatggagaaaccctgtctctactaaaagtacaaaaattacccgggcgtggtggcaggcgcctgtaattccagctactcatgtggctgaggcaggagagtggcttgaacccgggaggtagaaattggagtgagctgagattgcaccactgtactccagcctgggggacagagtgagactctgtcttgaaaaaaaaaaacgaaagaaagaaagaaagaaaaagaaatggtcaggcagagcaaagaagaatatataagcatatgctatctacgaggcacatactttttaaaaagttttatttatttattttttttagacagtctcactctgttgcccaggctggagtgcagtggcaccattttggctcactgcaacctccacttcctgcattcaagcgattctcctgcctccgccttcctagtagctgggattacaggtgcatgccactacccccggctaatttttgtatttttgtagagacagagtttcaccacattggccaggctggtctcgaactcctgacctcaggtgatctgcctccttggcctcccaaagtgctgggattacaggtatgagccatcgcgcctggcctaaggcacataaatttatttacttatttttgttttattttttcatagagtctcactctgttgcccaggctgagtgcagtggcgtgatctgggctcactgcaacctctgcctcccaggttcaagcaattctcctgcttcagcttcccgagtagctgggactacaggcatgcgccaccacacctggctaatttttttgtgtgttttagtagagacggggtttcaccgtgttgcccaggctggtcttgaactcctgagctcagacaatccgcccgcctcagcctcccaaactgctaggtttacaggcgtgagccaccacgcccagccggcacatactttattattattattatttttttttttttgagacggagtctcgctctgtctcccagggtggagtgcagtggcgcgatcttggctcactgcaagctccttctcccttgttcacaccattctcctgcctcagcctcctgagtaccggtgactacagtcaccggccacgcctggctaattttttttttgtatttttttagtagagaaggggtttcaccatgttagccagggtggtctccatctcctgacctcgtgatccacccgccttggcctcccaaagtgctgggattacaggcatgagccaccacgcccagctggcacatactttaaatacaaacccacactgaggttgacagtaaaaggttggaaaaatgatctaaaataaaaacacacatcataagaaagctatattaatatcagataaagtagacttcaaaactaagaacataagacaggtatttcataatgataaaaggggcacttcattaagaagatataacaattttaagtatcaacctaatcatagttccaaatacataaaggaaaaattgatataattaaatgaagaagtaaattcataattagaaatttacttatctctaaataattgagctgctagacaaaaaaatcagtaaggacatagaatatctgaacaacattatcagccaccttgaattagttgactattatagaacaccgcaccccgaaataatagaattcttctagagtgcacctggaatagtcactgcaataaaccatatgttggctataaacaagttccaataagcttcagaagactgaaatcttacagaatatattctctgaccacaacagaattcaattaacatcaacaacaaagaagatatccaggaaagccccaagtatttggaaattaaacaagattcttccaaaaaatacatagtatccatggtatacccaaataaattgaaaacatgtccacatgaaacctgcacacaaaccttgagagctgctttattcatacttgccaaaagttggaagcaaccaaagtgtccttcaataggtgaagggataaacgaactctggtacattcatacaatggaatattattcagcaataaaaagaaatgagctatcaagccacgaaaagacatggaaaaatatcaaaagtatactgctacgtgaaaagccagcctgaaaaggctacacgctgtatgattccaatgataggacattctggaataggcaaaactatgcagacagtaaaaagatccgtggttgccagaatttgatggggagggagggatgaataggcagagggtgggagatttctggggctgtgaaactattccgtatgacattataatggtggttacataccatagtgtatttgtcaaagcccgtagactgtacaacatgaagagtaaaacctaatctcattattggctcatcaactgtaacaaatgtacttacactaatataccatgtgattaataggggagatttactggagggagaggcctatatgggaactctctgtactttcccatcaatttttctgtaagcctgaaacttctctaaaaaacgttttctgaaaacccatgttcaaagaatgcaagtgaccctgtgtctgataagctcaccatataccttacttctgatctgtcttcccgtatctctctctccttaagaactctcactcttagtcaaggagggagttacagaggacagaagtggatgttgagtatgacatcaggcaaaacaagttgttctggatcctggcttgccttccccttcactcaaacattcattctacagacactgagcttctattctgggctaatctctctgctgggcacacaggatataactggcagccagttacaatcccttcccaagaagcattcacaagctaagggagaaactgacaagtaaacagtcgatgacagttcattatgccaagtgtcatgtgggtaaattcagaggacaatgagaatgcagagaagtatctaacccagcctaggttttggtcaagtgagatttcctggaggatgtgacattgcagtcaagccccgaaaactataagcagcagttaagaggcaatgggaggccgggcgctgtggcccacacctgtaattccagcgctttgggaggcaaagatgggtggatcacttgagatcaggagtttgagaccagcctggccaacatggccaaagtcgtctccactaaaaatacaaaaaaaaattagctgggcatggtagtggtgggcaactgtaatcccagctactcgggaggctgaagcaggagaatcacttgaacccaggaggcgaaagttgcagtgagctgagatggcgccactgcacaccagcctcggcgacagagtgatactttgtctaaaaaaaaaaaaaaaaagaaagacccaatgggaaacctcctggacttgatcagaggattggaagcaaaaaagaacacagcccgtggggaagctacaagcaggtcactatggaatataaacaaagtgcacatgcatgtgtgtgggggcgaggggtggatgacagaggggagaaatggcctggagggactggtagagccaggtcagacctaagccttgatgttctcagaaacaatgcttaagcagcccagacagaccttgtaatgccagcttcctggagtctgtgcctaaagcagaggacccatcctgggggagactccccaagtctcttttgaacacacttggtggaagaagctatcctataattactgtggtgataattagaggcacctgcatggcctctttctttctttttttttttttgagacggcgtttcggagtttcgctcttgttgctcaggctggagtgcagtggcacgatctcggctcaccgcaacctccgcctcccgggttcaagcgattctcctgcctcagcctcccgagtagctgggattgcaggcatgtgccactaccacccggctaatttttgtatttttagtagggatggggtttctccatgttggccaggctggtcttgaactcccgacctcaggtgatctgcccgcctaggcctcccagtgtgctgggattacaggcatgagccaccgcacccagcctccatggcttctttcagcaaatattgcacaagctgtagcgctctcacctgcagtggggtgcagagagacaaagcacccctcctgggggagcctaatgcctgagtctcttgtgaagcacacctgactccctggctgaggcccaaaggtgtcacagatacacctggggctgctatagcttggagctgagtgctgctggcagggagcctcaaagtcactcccagtcgggtgcggtggctgacgcctatatgctgagcatttgggggttccaaggggccaaaagaggggttttttaacccnnnnnnnnnnnnnnnnnnnntgctctcttgcccaggctggagtgcagtggtgcagtggctcactgcaacctctgcctcccagattcaagcgattctcctgcctcaggctcccaagtagttgggattataggcgtgagcaccatgcccagcctacactgattgcttttcaaatattaaaccagccctgcattcctgaaatcataacgtgttatgctttttctttctttcttttttttttttttttaagacggagtttcactcttgttgcccaggctggagtgcaatggcacgatctcggctcactgcaccctccacctcccaggttcaagcgattctcctgcctcagccccccgagtagctgagactccagggtgcctgcaccacacccagctaatttttgtatttttagtagggatggggtttctccatgttggccaggctggtcttgaactcccgacctcaggtgatctgcccgcctaggcctcccagtgtgctgggattacaggcatgagccaccgcacccagcctccatggcttctttcagcaaatattgcacaagctgtagcgctctcacctgcagtggggtgcagagagacaaagcacccctcctgggggagcctaatgcctgagtctcttgtgaagcacacctgactccctggctgaggcccaaaggtgtcacagatacacctggggctgctatagcttggagctgagtgctgctggcagggagactaaaagtcactcccagtcgggtgcggtggctgacgcctataatcctagcactttgggagaccaaggtgggcagattgcctgagctcaggagttcgagaccatcctggccaacatggtgaaaccccgtctctactaaaaatacgaaaaatagctgggcatggtggtgggtgcctgtaatccgagctgcttgggaggctgagtcagtagaatggcttgaacccaggaggtggaggtttcagtgagctgagattgcgccactgcactccagccgtgtgacagagcaagactctgtctcaaaataaaattaaaattaaaaagtcactccccagatgccacagtctgggcagctcccaggcaagccacaggcttcagatttattccaaccttgccctctggggagacttcaagcctgtagagatgttgactaggatctagaggtgctgtctacttctcggcaaccttagcctgagatgctcaagccattagtctctgggcccacacttcatcttcctgggaccaggtacacggtgtttccatggcctggacatcatcccagccctggcaagtgctgtgtagcttcttctagggtctgcagccacatttcctcaagaaacacttcggaggtctctggttcagatagagagaagaaaacctctcctcattcaccataccttcaccaaaccccttctccctcctttcttccaccagatttttcccactgaaaagaatggtccctttgcttctgggaaggccttgactttcctactctagcagctcccgtttcattcatccaacaccaactttccacttggctttgacttctatgactcactgggaaccaaagcccaagtgaatcgcccagaggctcagtgtggcattttcgtttcaaaagtgacatgtctggtctgttttgttcttagctctccaaagaaaaagcttctgcatcacccaaagccacttccaacggcttctggcctttcccatgggacctaaagcctcactctgtgcccctttgaaactcagaatgactgcgtcacgttcaaggacacagttggctttatgtaaaagcacttggcaaggttgtgagagctaaatgaatgtcaagaatttagcccctggccggacgcggtggctcatgcctgtaatcccagcactttgggaggccgaggtgggcagatcatttgaagccaggggtttgaggagtttagccaacatggtgaaaccccatctctactaaaaataaaaaattagctggatgtggtagcgcacgcctgtaatccccgctacttgggaggctgaggcagaattgcttgaacctgggaggcagaggttgcagtgagctgagatcacgccactgcactccagcctgagtgacagagcaagactctgtctcaaaaacaaacaaaaaaagtaattaaattaaaaaaattttttaaaaaagaatttagcccctttgccttctcatctccccttaatatccctgcatctggtgggtttatggctggacagatctttgcaggccagtgtcttcttgtgaatagtgagactaagggtccctggtgatttgatattttcttgttgccctgcctcaaaccctcccctggacctcgatcttttttttttttttttttttttgagacggagtctcactctgtcgccaggctggagtgcagtggcgtgatctaggtccactgcaacctccactccccggttcaagcgattctactgcctcaggcctcccaagtagctgggactataggcatgggtcaccacgtccagcgaatgtttgtatttttagtagagatggggtttcaccatgttggccaggatagtcacgacctcttgacctcatgatccacctgccttggcctcccaaagtgctgggattacaggcgtgagccatcgcgcccggcctggacctcaatctcatcagtgagccttttcccagggctctctgatagagctttggaggaaacacttggaacctaactggtcctggcacctggcagtgggggaataaggaaggagagctttgcttctgaagggaaagtgtacttggctttctctttaaagggtttcccttggggaacaggcaagcggcagatgtatgggcaatggccaactgatccatttggagatagattcagggtgtggtgttccctgtaagcctgggcaggccctgggaaactggagcagagctaaattctggcctaaagttgggcaagctgcagagaagcttgagtacgttggtttcaggtgtgtgagttttgccttctgcagagaaacaggggggtgaagggtgggggtggaggggtgtccaggagggttagtgtatctgttgcccaggcatgtttctaaattctgaagctgcactggttaatcatttttattcatgaacacagtaactggcagggaggcttagctgggccctcaaagtctggcctcagtgcaccttctcagtatattttctcaacactccagcacaaatcacccatcccactctcggattcaagctcaccaggaattgggccttacttcatgccattctttctttctagaatgccttttcttttttttttttctttttctttttctttttctttttttttttttgagacagagtctcgctgttgcccaggctggagtgcagtggcgcaatctcggctcactgcaagctctgcctccggggttcacgccattctcctgcctcaacctcctgagtagctgggattacaggcgtccaccaccacgcccggctaattttttgtatttttagtagagacagggtttcaccgtgttaaccaggatggtcccgatctcctgacctcatgatccacccacctcggcctcccaaagtgctgggactacaggcgtgagccaccgcgcccggccaaaagaatgacttttctttgataagcctctcaccctttcagacggcctcatccactcctggggaagcattccgcagtacctggggcctcaattaatctctctcttctctctccatctaagctccagattcactttgttggtctctggtctagctctaccgtgtttatttctgtgccggtttccagacctccaaatggacggtttcctgagccttctgcccttgctgttccctctgccaggaactcttttcctgtggatctttgcaaggccagctctctgtcatcattcaatatcagctcaaatgtcacctcctaagcgaggccttccttgaccaccctatctaaagtaacccacacctctgctcactctctgtcccctcaccttgtgttacaaaatgtgtttttgtaaaacttagcagcatctgaaattatcttatttgtgggcttggactatgtctcttcctttagaatgtaagctctaggaaggcagagtgagttgacacatggttggcacccaacaaatatctgttgattgattctgtgaaggcaagcgtggggtattcgacttggtgccgggcctgggcgcaataaaggttggctgcctggaatatttgctacctgaatgaatgaaccaaggaacatacgaacgaaggaatgcagccctctgcctgttgactgacaggttgactgacagttggggggcccgtggccagcagactgttgactgacggttgacagctgagtggcagccaacagacgcgcatcggggttcccgattggctggtgcagcagcccctcggagaggggcggaagagggtacccgaggcgacatctccgcgtggggaggggggcggcaccaggcagcgggaggcggcccaactgctctggctgtgcgagcagcagccgcctagaacccaggagccgacgtctctgcgcatgggcccggctcgaggggcggggcgcgcatcacgtgagcgtgttttgggcacgtgacccgcgcggggccaaggctcgcccccgcccccgcccctcctcccctcggcgggtgtgatcgagtggcctcgcctcatcgcctagcgcccccctcagtcgccgccgcctccgcccgccggccatgtcccccggccgccgccgccgccgcccgagcgcggcgctcccgcggccccgcgcgcagtgagcgcgggcccgtcttgccgttcgcccgccccagggcccccttgttctccgcgccgccgccgccgccatgttgggtttggagctgcagcggagccgccgccgccgccgcgggtgagggaggccgagagcggagcccgccccgccccggggcccagggagcggggccgcttcggagcccggcctctccccgccagccgccttcccggcccgccgtgcagccagcgagccagcgagcgagcaagcaagcaagcaccggaccccggccgcgccttcagctacggcccgagcgagcccgccgccgccgggcccggccacagcctgcagcggagcccacgagaggcagcgccatggcggagcagacctactcgtggtgagtgcggggctccgggaggccgggaggcggcaagggtgggggtcggggcgccggcgcggcccgccgaggggaagaggaggaagaacaggtgcgtgtcgtggggggggggcgcgggttggggtgcacgcccccctcttccccaccggagggggcggctggcgcgcacggagggcggtgagtggccggggacctggcgtccgagaaggggaatggaggaggaggcagcggcggatgtcatctggctatgggcggagcaggtgatggagaaggggagcatgaccccgggggtgggaatcccacggatgggaagttgaatccgacaggcaccccggaactgactcgtgggggtgtttcctgggcaggaggactcgaaggggtggagagaggcaggccagggcaaaggtgggccgctgggctgagaggaagctctagtgagaacaggtgatagaggcagaacttctaagttgggagagtggagcagccgccgcagctgcggggccgccgcttggctctgggacagggagcgcagggagagttggtgaggtgggcagaggcccgggagtgaggggaggaaaactgcgggggggagagtccacgaaccttggaggggagtcactggtgaagaggttggaagaggagcctgaagaacctgtttccttttccttctggaaaaggaattcgttggtgacagtggggcatgggcagagtctttgtaagggttggtactattattttcagaggaatggcgcccagggccaagtgtggaggtggaggacctgcaagttaagttcatttctgtggggcttttaaagttagtaagtagctcgttaagggccgagaagcgagaagctactgtgtagtttgtggggtgacaacctacatatccggagaagggagtgccagggtttgggggaaggaacatgaggggtctccctttagcatgtagaggtgggatatttgcaggacgggttgaaggaatgatggcagtatccatgaagagtggaaatcgggtagtgagaaggaagtcatagctggagagtgaggaagcaagaaatggcatgattgtaggagtgggggacctgattgcaatttagagaaatggtttgaagatggtttactcttgaagcaaatgtggtttgggacagaactgtagacattcccttcttagaaaagagcataatagaatgggacgagcatgccgtgtggagttggaagacctatttcggaggtccggtttgccaccaacttgctttgttgatacgacatggtagtgagttcttcggtcctttttccttacctgtaaaatagagggaattaccttttccacagcctgtaaggattaagtgagtacatttagaaagcacttggcaaactgtgaagtgccacagatcttactacattaattataattatcctagagaaacatctaagaaatgggtaatatcagaaaataaggaatggttttaggtagaagactttgagtggattatttatagtgttagaggttataagtcagtaactcattgagtcttcacataagagaaagggagttggggattgaagatgataattcttaagagaacttcattgatgtatgtgcaatctcaagaagaaggtaactgagagacaaagtaaccctaaaggaagaattaaaatcttggtgaacacgtgctctaaaaagaggtttaagctaatttcatagttttgcgtgacagctgcctttcagtagcaggtcgtagggaacacaagattacaatttcagcttccttctggacagagtaagaaatgaaggtaaaggtgtttctgtcatgccttgtggttactcatcttgagcttctcatactctggccctaatggctgtggccctgagagtcctaatggctgctttgctgtttttactgtgctgtacagaggccctggatggttgaaagaatagaaaactcagtggtcaagaaatggggaaaatgaaaatgttttactaggtaggttggacacacacgacctctctctgacattagttggctctattaaggagggattactttgtgaagtttgacaatttacaaatttattctactaaaatacttccttcaatgtcagctctgtttgctttacaggcaaagaaactccttgaaatcggggagcttagcccctcaacctttggcaggttttgagatgaagaaaatttttacattatctggagagagggtggcatataaggggagactggggaaagcgggcagtttccttttttttttttttttttttttaggacggagtctcgctctgtcacccaggctgcagtgcagtggcgccatctcggctcactgcagcctccgcttcccgggtgcaagcaattcttatgcctcagcctcccgagtagctgggactacagccacatgccaccatgcccggcttttttttgtatttttagtagagatggggtttcaccatgttggccaggctggtctcaaactcctgacccagtgatctgcccacctcggcttcccaaagtgctgggattgcaggcatgaaccaccgtgcccggccacagcttcctatttaatagttgttcctgattcaactgactaataatataataaaataaggaactatacacatggcattaaatatacacatttaattctcacaagtttctgaggtaggtgatatttccctgtttcacagaggaagaaacaggcttgggaggccaagtgatatgtttaaagtacttcacttgtgatgctttattttgtttgacatgaattctcccatcattttactcattcttattgaaatataaatatggaaaaggtattccagtagtctatgtagactgatttttggattatctgtcattttgcagttatctttgtcactcttcccttggcttgtgcaaacaatcaagagttgattactttttttttttttttttttgtgagacagggtctcactctttcgcccaggctggaatgcagtggcccgatctaagctcactgcagcgtctgcctcccaggttcagacaattctcctgcctcagccctgcaggtggctgggaccacagacgtgcacaaccacgtctgctagtttatttatttatttattttgtatttttactagagacagggttttgccatgttgcccaggctggtcttgaactcctgacctcaagcagtctgcctgggattggcctcccaaagtgctgggattacaggcgtgagccaccacacccggcaattgatctctcttttttttttttttttccttgagacagggtctcactttatcatgcaggctggagtgcagtggcaagatcacagcagcgcctccagggcttaagcgatcctcccacctcagcctcctgagtagctggaactacaggtgtgccccaccacgcccggctgattattgcattttttgtattgtgtttcgccatgttgccggtgctggtcttgaactcagcccaagtgatctgcctgctttggcctcccgaagtgctgggattataggcgtgagcaacagtgcctggtcctgctgtttttttttttaaacagatttgcactttgtttgtatgtgacctttggaaaaaccaaactgtggagactgttgtgccactaaagatttgtctgaggatggactcggtgaagaatataaaggcatatgcagatgggctcccttaggattttcgtataataagatgtaaattattggcaatgagttgatcattactggagctgggtgatgagtacatggaggtttattattctgttgacttttacatgtttaaatttttcagaataaaaagttttttcaacaaggccctttatatgtaagttcacgtgtgcttgctctcttcctagcaaattctatcaaaatcctgtactcaagggttcaactcaaattctgcttagctgtgaagcattttctgaccaccccatatgaaaatgatcttttttttttttttttttttttgagacagggtcttgctctgtcgcccaagagtgcaatggcatgatctccgctcacagcaacctccgcctcctgggttcaagcgattcttgtgcctcagcctcccgagtagctgggattacaggcgtgtaccaccatgcccggctaatttttttgtatttttagtagagatgggatttcaccatgttagccaggatggtcttgatctcctgacctcaggtgatcctcccgcctcagcctcccaaagtgctgggattataggtgtgagccactgtgcccggcgatctttttatttttaatacttacagttctgtctgcataattccttccttatctcatgtaaatgcctaatctaactatattgtaaactccttgagagtaaggaccatatgacactaaccttggttctcccatagtgcctagcacattgtagtacacatagaccctactgagtaaataccaagtggtaaatatgacactgaatttcaggatggttcatcctttgttgaaagaatattaaacataaggaggatgctactgagtgaaaaataagtgtttataacccaagtacttatcaaagagggctttttgtaacttggtttcctgatgtaccagtgctgcaagaatgaggaatgccatcctttattaaagttctaaataaaagctattaacagaataaattgaaataattggtagtaacatcagaatctttatcacaatttaactacaagattctccttatagccttttttctcacatacactgaggaagtaaaagaatgcatgtgaaaacacagattgaatgtgctaactagacttttattaatttgagaaaaacacctttcttcctgtatatttatgagcagttttagtgtaagttctgtgagaaacgggaactcgtctcttgatgaagcaaaatgtggtacttatatataactggtattgaacccctgctcaacattactaatgttggtgtgagggaaaaggaagtcaatttatttgaactccttcaagtgaattttgttaccaaaatactatcataataacttgtgtattttctatgtgatagagttttacgagcattgctaagtaaggaaattgaggctcaaagcatgtaagtaacttgcccaaggatgtaaatggtaaagggctcaaagggaagattatctgacacaaattctgacactgaatctgtccacttaatgtttccacagtgttgactgtaagccagccctcttttgcttgagttcctgtattagcctctttgctgggtttcttccattatctacctgttggtaccttcttggccttctaacaacctaagtcagatcttggcagttctctgcttaaaagtatgggttttggccacacttagaataaaacccagattccttagtgtggttcttcatggtttgatcttgtgtgtgtctctctgagggatgacagacgataaacaaaataagctacataaggataaaaccctttctgtttttggtactctctccagtgcctggcatttaatagatataaataggtggctgctctgtgctacccatctttttttttttttttttttttaaaaaaaaaaaaaaaaaacagagtcttgctctgtccaggctggagtgtggtggcacgatctcgactcactgcaacctccgcttcccaggctcgagcaattctcgtgtctcagtctcctgagtagatgggactacaggcaggctccaccatgcccagctaattttttgtagacatgaggttttgccatattggccaggttggtctcgaactcctgacttcaagcaatccacccacctcggcctcccaaagtgctggtattataggcatgagccactgcgcctggcccgtgctactcattttaaggctttctaatctcagggctgtattatattgaggtgatgtattgttgtgataatggtcattacatgtcaggtatttgcaaatattattaaacctgagaatggcaaataacacaggtctccatatctagtggaagtcagttctacttttggattactgttgtgtattgttgtatctggtatgatcatatccaattgtagctgatggaagtttttcagagagaaagtagttgaaaatttgtgtctagcattatagactttagaagatttgctcattattattattattttttgagacggagtctcgctgtgtagcccaggctggagtgcagtggtgcgatctcggctcactgcaacctccgcctcccgggttcacgccattctcctgcctcagcctcccaagtagctgggactacaggcacccgccaccacgcccagctaattttttgtaattttagtagagacggggtttcaccgtgttagctaggatggtcttgatctcctgacctcatgatccacccgcctcagcctcccaaagtgcttggattacaggtgtgagccaccgctcccggcccttgctcattattttaaaaacatattttgcctatagttaaagtactatgataatgttgtttgggtgatgtgtgatttaaactaaaattagccaaagttaaccccatgaatttatatttaaatcattttcctcaaggttttttataaagccttcgggggtaaagaaagctggagagtgtaccatatcagcctgtaagtatcaggtagtactatcaatttaaatgcttaatgatcatgcatttctcaaaaagatttctacgtgatcatttattttagagatgacaaatgccattggattgtgatgtgtcattctatataattgtattttatttcaacattaataacattaataaattagttctcatcattcatatctgttttatcaaaccatctcgtgaaaatttagagatgtcctaaaaagagaaagagagtgttgataaccaagtgctgttttatttagttggctgtttttggcatctgaaactgtgtgtgactgctgtcatggcagttcgccataagtataatttgatttttaaaattctataatctatttttgatgtttctagagtttaatggttccttcttaggaattaaaatactgattgtatgtgatgtatgtataaattaagaagtgtttgcaactttcactttcttttttttttttgaaacggagtctcaccctgtcacccagtctagagtgtagtggtgcgatctcagctcactgctacctccacctcccaggttcaagcaattctcttgcctcagcctcccaagtatctgggattacaggtgcacaccaccatgcccggctaatttgttttctgtatctttagtagagacaggatttcaccatgttggtcaggctggtctcaaactcctgaccttgtgatccacctgcctcagcctcctaaaatgttgggattacaggcatgaggcaccatgcctggccaactttcactttctatcatgtattttcttatccttacttaaagagttagaggcagaatacttgtcttctggaattttaacgtctgaggtgctcagaggggctctaaatgatcaaattcagttttacagggaaaaatctagttagtcccaatgatcctctcaatgaattgttacccctcagattttattaataagtcaaactagggccacagcttgaaatgaaacagctccacctcattgttgtggaacgactaggttgagctcctaagaaaaagtttttgtaggtatctttaaggtattagactaaggagtatgccttagcctaatagagaccttatggaaaatcccatttcttggtttgtagggtattccctaacctggtaggaaaacttagttatctctcttttggagttccagcatggatagtgaagaaccaccaaaggatttttttttttaagtgctctgaagtggagatgtatcctagttgtttctacatattttgaattgtatcgaatataagtgattattcaaaaagtattcagttgtgttatgccactcattaaattttcatttgaaatcttgagatatgagcacctcattctgttacggtttcttcgaatcaggaaatctttagcgtgagggtggttttcatctctagttgactgtgacctagccatgtcttagtcctagtgttgtatttggtacaatagttatgcctgttgtactccacagggtcgttgtgaggatttagtgagataatgcacataaaaatgcttcatgcattgcaaagtgctccgtgaaagcacgctgtttgttctgtacattatttgttagagccagataggttccagatagagttcctcactatagaaatgacttctcttgtttcacaatttagccagcgcttaaactttgagatgtcctttatattgaggatgccacataatgctatataaaaagaaataatagtctccaaattgtcactgatttctaagtttcatagtccatggctacattccacaagaagaaagatgatgaataaagctatgtttctttttttttttttttgagatggagtttcgctcttgtcacccaggctggagtacagtggcgcgatcttggctcactgcaacctctacctcctgggttcaagcgattctcctgcctcagcctccaaagtagctgggtttatagctgcgcgccaatacacgcggctaattttgtattttttgtagagacggagtttcaccgagttggccaggctgatctccaactcctgatctcaggtgatccacccacctctgcctcccaaagtgctgggattacaggcgtgagccaccatgcccgacctgttttttcatgttagttttatcttgattttgaagacagtttccttcatgatctacttaaatgaagaaagaacagtagagtggatgatcctcatctttccctgcttttccttggaatgcatggtacggttttctacccttctaaaaatgcctgaggaggagctgttagcaggtttgtttgtttgtttgtttgtttgtttgagacggactctcactctgttgcccgggctggagtgcggtggcacgatctcagctcactgcagcctccacctcccgggttcaagggatcctcctgcctcagccccactagtagctggtattacaggcatgcgccaccgcacccagctaattttttgtatttttagtagagacggggtttctccatattgctcaggctggtcttgaactcccgacctcaggtgatccacccgcctcggcctcccaaagtgctgggattacaggcatgagccactgcgcctggccagtagtttatctgtttccttatcccacaccatgcctgacaggcacacccacttcccttcatctgaggcctcaggcttgggcttcactcttgacctagatagggcaggtgtagcaaagaaagttttgttcatttcttcttcaagctagttatacagtcattgtgacctacgtacagtgcctgactttgttttgttgtttaagttttgtctagaccttgtttagcttgaccttccaaacttgactaaatcttcaagctttgcctgatagcctttgactgtatactctgactttataaacttatgaaatttacactcatttcttttttgtttgtttgtttttgagatggagtttcggtcttgttgcccaggctggagtgcagtggcaccatcttggctcaccgcaacctctgcctcccgggttcaagtgattctcctgcctcagcttcccgagtagctgggataacgggcatgcgccaccacgcccagctaattttgtatttttagtagagacggggtttctccatgttggtcaggccggttgtgaactcctgacctcagggtcatctgcctgcctcagcctcgccaagtgctgggattacaggcgtgacccactgcacccggccccctacactcatttcttataaccgcttgcaaaaatactacttttagaagtaaagattagttgtgaaaaacaaatacctttgccactgattagtgcaaatgtttctagaaatgccatctgggactatggctaggctggctggaactagttgaagatttgaggtaagaacaattaaccaaaaggtaagagtatggagaggaaaaaatggaagaccagaaattgaggcttgggaaactcacaattaagaaatgtcaggaagaagaggaatcagaagaggctccatcagaggtaggataattaggaaagtgcagtggcgatgaaaaggcataagagaatttttaggggcaggagtgtaaaaagctacaaggattcagagagaatgaagaaaaagcaggctattgaatttgtaaaggaagtcattactgagagtgcactgctaagatcagagtagtgggggtggaagcccaatcaggggtaggtcataaagaaataaaggcatcttctgggtactggccatttgtttgagatgtgaaagacttgaggaaagagaatggttggtacagacagcagggtcataaaggtcttctttttgttttttataaataagggagataattgtatatttgcaggcagggagagaaaattgatctcggaaaaaaatatatatttttttcacgccattctcctgcctcagcctcccaagtagctgggactacaggcgcccgccgccacgcctggataattttttgtatttttagtagagacagggtttcactgtgttagccaggatggtctcgatctcctgacctcatgatccgcccacctcggcctcccaaagtgctgggattacaggcgtgagccactgcacctgacccagtatttttttttactgtagtttcagtttagagatttctaccttttaaagaattattaagggtttcagttaggggttgtaaagagaatttcagaggagtccttagtgtgtacgtttagtttttgtctctcttggtttgtatattgtccactaaattttgggttgtattttttttttttttttttcccgagacagagtcttgctctgtcacccaggctggagtgcagtggcaccatctcggctcactgcaacctctgcctaccgggttcacgccattctcctgcctcagcctcccgagtagctgggactacaggcgcctgccaccatgcccggctaattttttgtatttttagtagagacggggtttcaccgtgttagccaggatggtctcgatctcctgaccttgtgatgcacccgccttggtctcccaaagtgctgggattacaggcgtgagccaccgcgcctggcctctaattttgggttgtatcgtattttaatagcctttgtgttttttattgttggaatataaaatctaccctctacaatctgactttcaaaacaatctggtcttataaccctgcttccctatatttcctttaaatattacgtgttacttcagccacactgggttacttctgtttcctcttttatgtacggtgactcttctgcctcgtttgcccttcttccaagtctctaaacatgttgactcctacccatttttcaaggtctgactgcaatgttttccccttgctgtggagccttctttctgattggcgcaggagaaatgttcttctgatgtctacagctctttatctgttcctgtcatgtgggcagcactcaggattttctgaccttgtattgaatgtatttaatatgaccatcttcccgttttgacaatgcactttgtaagggtaggttcaaagccattaatttcatggtgcaaggacctacagatagtaggtgctcagattttctttgtaaaagaatgaatattttaggggtgaaatttgttagatgctggattttagaatagaatgtctccctaaaaatatggtgacaaggcacatggaagagaggagagaacatcttactgctctttgaaggaagtacagaaataaaatggttactgttaagttggttcaagtgttatgtccaaatttgcctaactttctaatatcctgacaacacctagagaaagaaagggactcagctgagggagacatttacaaagggccacaagccctttagagcgctcttcttcattcagcttagtcttcttgaacatgaccactgactcacttataaaagtataagtaaaatacaagtttatttatactttatatttcccaaacagccatttattaaatatgtggcatatattacttgtttcctaaagtggagacactcagctgcttttttttttttttttttagaatttgcaaaacagtcttagggaaaaaaatttcagtaacatgctcatgtgaaaatattttgcaggaaacatctcgagatatgagtataagctgtatgtaaactagcttttgaacaatgtaatatttctctctcactactatttcaggaattcatagtctttgtattacgcttttgtttaaaaagctaaaaaaatttttttaatagaaacttattttgccgtttttttctcctttttctaaaagtctgttttctttttcagctcatttcttgtcctttgttttataattattcagaaagggcaattgaaaaaaatctcgtggcctgatgtgtgcttattttaaagttaatagatatagcagtgcctcaatcttaggtcagaattaaataacacccgtcatctggaataggcataaaccagacatttgggagattaggagttagttttgtttttgaacctttgtatctttgcagtggtgaaaactcacaggcctaaggatgatgtattaggctggattcctgggtagcaaaggttataaaaccatgggcagatgttatcaaccagcttaggaaaaagggaataacaagtagaagtagggaagaaatgtgaatggcaaatgtgattgagcaatagaagcagaggcgaaggttagagatgaagtggaaaaaggaggcagctaccagaaagtagacagctaaaccagagtcattgtgtagcaaaggtgcagatggcccaagacatctctggaaatccacctttgtgttcaggttagatttaccaagttgataatgagtcaacctttagtgataggatagatagtcttagcttgtcctgttagctgttgagagcatcgggtttcggcttcacagctagatacctcggagacattcttgattctcatcaaataataaggcctgttgacttttcgctccgtgtttgtgtgtatatgtagaatattatttaatatattttaaatttgcttcctctcccttttcctaaatttttgttccaagatgacccttcccttttttcccttaaagttttgaggacatgaataatgttcatgtgtttatcctcagtggtctggcccatagtttattaaaagtgaagattattctggatttgattttttttttttttttttttttgagacggagtctggctctgtcgcccaggctggagtacaatggcgcgatctctgcttactgcagcctccgccttccggattcaagcgattctcctgcctcagcctcccgagtagctgggactataggcgcctgccaccacgcccagctaattttttgtatttttagtagggatggggttttatcattttggccaggatggtttcgatctcttgacctcgtgatctgcccgcctcagcctcccaaagtgctgggattacaggtgtgagccaccgtgccccgccctggatttgatattttgaaaataccctgaaaaagtaaaactttttattttatttttttgggatggaatttcgcttttgttgtccaggctggagtgctatggcgcaatctcggctcaccacaacctctgcctcccaggttcaagtaactctcctgcctcagctttccccaatagttgggattacaggcatgcaccaccacgtccagctaatttttttgtattttcagtagagacagggtttctccatgttggtcagtctggtctcgaactcccgacctcaggtgatccacccacgttggcctcccaaagtgctgggattacaggcgtgagccaccgcccccagcaaaattattttttttttcaaagtaaggtggaagaatatgggatgtcttaaattgctatcagtcctcagttaagagcctaaagggacaagcattaaacatcgtttatggttgtcttatgttaagtgaaaaactattattcaaggtgttaggctggacctaccttcataacaatcactatttaatttgtaggacctcttcataacacagtgggagaattggtgactatatcagttagctattgccacaataacactgcatgacaaattataccaaaactcagtggattaaaataacaataaaatatacttatgaatctacagattggctggtgcaactctgcttcttccgatctgtaagttgattgagatgactccgcttcaagtgtgttcattttaggcccagagtgaatgggcagcagccacataggggaagctcttctctaggcagtgccaggggcacaagagggcaaggtgagacctcttaaggtttaggcttagaactggcacactgccatttctgctccattcttttggccaaagcaagtcatatggttgaagccaaagtcaaggagccacaaaaataaatcttacgcccattagtgggaagaactgcaaaatcatatggctaaggaatagatcctggaaaggatgaggaattaatgcctctaatgcaatctaccacagttaaagttccctcttctgtttcaatagggctacttatcgctttttcatgctcttctaaaatgaagcatttcatataggcacatttcatagaagtccctttctgtggcattgtgtttttcattctgatgtttatattttataaatagcttttgaaagatataattcacgggccgggtgtggtggctcatgcctgtaatctcagcatttcgggaggctgaggtgggcagttcacccgaggtcaggggttcaagaccagcctcgccaacatgacgaaaccccatctctactaaaaatgcaaaaattagccaggtgtggtggcatgaacctgtaatcccagctatttactcgggaggctgaggcaggagaatcgcctgagcccgggaggtggaggttgcagtgagctgagattgcacccattgtactccgccctgggtgacaaagcaagacccggtctcaaaaaataaaatataagatataattcacatactgtacaattcagtcatttaaagtgtacaattaagtagtttttattatatctacagagttgggcagtcgtcaccacaatcatttttataacattttcttcatcccaaaagaaactgtacatattagcagttactgctcattacccttctccccagcccttggcagccactagtctgcttttggcctctacggatttgttctttttctgttaatcgaatgatacatagcttttgttttgtttctggctgcttgcacttagcacagtgtttttaaggctcatccatgttgtagcatgtgtcaatgcttcattctctttattgccaaataattttccttttttataccacattcagcttatgcactcattagttgacaggcatttgggtagtttccgcattttggctgctatgaataatgtggggccaggtgtggtggctcatgcctgtaatcccagcactttgaaaggctgaggcaggtggatcacctgagattaggagttcgagaccagcctggccaacgtggtgaaaccctgtctctactaaaaatacgaaaattagctgggcgtggtggtggacgcctgtaatcccagctactcaggaggctgaggtaggagaatcacttgaacgcaagaggcagaggttgcagtgagcagagatggtgccactgcactccagcctgggcaacagagcaagactctgtctaagaaaaccaaaaatagtaatagttatgcgatgaacatttgtatacaagtttttgtgcagatgtatgtttttatttctcttgggtgaatactttggagtaaagttgctggctcatagtttctgtttttaacattttgataaactgccaaacagctttccaaaacggctgcaccattttacattaccaccagcaatgtgtgagattctaatttctccacgtcttcaccaacacttgttattgtcttttaaattatagctatcctagtgagtgtaaagtcatatctcattgtggttttatttgtgtagtgtttatatttaattaagggtttgtagaggaaaaaagcagtagtttaaaatgttaggtctgattgtttttagaagtgtactaccaaagttgaacctctgttttagtcaactaaaaatcttgtgtcaagaacaaaaatttagtacacctttggttcacagatttttcttcaggctacttcttatttcttttgcgtgctggaataatttagaaagaaattagcctcagataattgttaaactagtttcttccctttggttaagtgattaaccaaattactctggcaacctgctgcatcatcagtaagcttgggactaggagtggtttcatgactgaaggtttggtgggtggaagtggcggtgaggggtgccttgatgtgtcagttctttgccaggaggataatcactggaggagttagttgtaaaatactaccttttctagagctgcactgcccaatagaagtataatatatggtatatatgtaatgtaaagttttctggtagccacattaaaaagtttttttaaaaaggtgatactaatttacataaaaatatttatttcatgcctgtaatcccagcactttgagaggccgagatgggtggatcatgaggtcaggagttcgagaccggcctggccagtatggtgaaaccccatctctactaaaaatacaaaaattagccgggcgtgatggtgggaggctgaggcacaagaattgcttgaacctgggaggcagaggttgcagtgagccgagatcgtgccactgcattccagcctgggtgacagggtaattctgtctcaaaaaaaaaaaaattattatatcactgatggtatgtaatcaatatacaaattaatgagacattttaactttttttagtacaagatcttctcaattcagactagccacatttcaagtgctcagtagctacatgtggctagcagctcccatattgaacagtgcggttccagaggtggtaaatacttatgatctagatttttgctcacatgtatgatctgtgtgtctttaggaaaaacagatgagtgtgtgatcagtctgtatttctagttctttagttttatattgttactgccgggttttctttcagtggggaagagggtgtttagagggtttcagagaggaagctcctcatagctcagatttttggttgcgagcagttaaattcacaggaggaagaaaattgcctccctcctcattagagatgtaccagattctatagttctcagcaagtaaatctgttggaactgttatcgtttggtccttgttctgatggttataggtgttcaaggtctgctttggcctgttgtgtatcagttatataccacttgtactgcctaaccacacagctcacttggttagacagagtaaggttgtgaatttgatctctgtgtttaatgaatgactttatgccttttggggctctgctatagtaactaaaatagaataaaccacatcctttttcatcagaagtttatagtgttagagactgggtgtcaaatgccagcagatgtaattaagacaatttagagacaaggagatttcagagtgggctgttgtatagattgtgtctcctagtcagtcagttgattactggaaggactgaatttggaaaaaaaaaatttttttttttttggccgggcgtggtggctcacgcctgtaatcccagcacttggggaggctgagacaggcagatcacctgaggtcatgagttcgagaccagcctgaccaacatggacaggttaaaaatacaaaattagctgggcatggtggcacatgcctgtaatcccagctactcaggagtgtgaggcaggagaattgcttgaacccaggaggtggaggttgcggtgagctgaaatcgcgccattgcactccagcctgggcaacaagagcaaaactctgtctcaaaaaaaaaaaaaaaaaaagttttaatgtttgaatgactttactcacagcttacattttctaatttggctgagtccccatcactttctgtttactgtacactgaatctctacctcactcatttatgctgtttacctagctcctggaggcaattgagttgtgatcccttagtaaccatagttgtaggtcattgcctcaaggatggttgaagatagggatagctgatcagtgctccagtgacagaggattaaaaaaacaactttttatgggcacttgcatgtttagatacaaatactttaacaggatttgaccattgcattattactgactattagatgccttaaggacatgtagttattctaagtggtactcacatgcttttgagttggagtccataaatggtattctgaccaagagaacaacgatcatgacttaatttacatactataccctggcatttgtgataatatggacccagggcccatttgtgagttcactgatttgtttgaatttgaaggccatgtgaaatacttatgtgttgtaggtcccgtgcacaattatggaattaaagaacaccgtaagtggtactatctttttaatcagtttatttggtggttctgttgagtttttgtatacattattattttgataatttccaaatattttatactttgacacttgttcattagcttcatttttgaaatgtgtctgaaagccttagccttactaagaaagaaatgtcttttagttgagtttgaaatgctttgatttgttggtattacaaagtattaatataagggtttttttgtttgttcccaactgagtgcagtctgcagtgattaagctccaaattagttggaccagtaggggcggaattggaagccttacttacactaaataatgccattcctttaggggataaaatctggtttagacctctttggtaacaaaacaagaccttaactgaagttatttctagtatctatttattgaataggtgtgacttgtcacccacttcacacaccattgttacctttctgaaagccaaaaaaaaaaaaaaaaacccccaaaaaaaaaacccaaaaaaactctagccataattttgaaacatctccagccataagggtgtcagataaggaattatgaaactgtaataccatattttattggtgaaaatattgaaaagtgtagataaacacaaaaagaatagaaaaactacccacaattctaccaacacagagagatctttcattaaatttgttgcatatctttcaggtttaaaaaaaatccatatattgtgacagttggtttttttttttttttaaattatacaagttgttgaaacccagaaatcccaaatagaagtaaaaaaagaaaaatcctaattacctaatatttaacttacttagaaaatttatggtaacatttcatgttacccttttgggcattacatataggaactgtagatcattttttacacaaaagcaggaacaggtttatactgtgctttcatttttatgtgatatttaatgtctacagaagaatatatgatttgtatgtgtagcataatgaacgctcatgaacttcaccagttaaagaaactataggattaccaatgttctggaagccccctttgtactctcctttgtccttcctcatgcctctgtcccctgtccccgtttaggtgtaaccactgtcgtgaattttgtttaccatccctttgctttttaaaaaaactagatttacatctgcattttttttttttttttttgagacatagtttcgctgttgttgcccacgctggagtgcagtagcgtgatctcagctcaccacaacctccgcctcctgggttcaagcgattcgcctgcctcagcctcctgagtagctgggattagaggcatgcgccaccacgcccggctaattttgtatttttaatagagacagggtttctccatgttgatcaggctggtcttgaactcccaacctcaggtgatccacccaccttggcctcccaaagtgttggtattacaggcatgagccaccacgcccggcttacgtctacattttaatgttttactgtacaacatgttttgttttgcttttttaaataagtttataaagatgacatatattgtcttttataatttgtttttttcagtcaatattttttctaagatttgtcccagttgttgcattcctttccagtgctgtataatgttccatcctgtgaatatataatcacattatttatctgttctgataaatatttagtttccagtttgaggctatttcagaggagtcttgtgaacattcttgtatattttcctggtatttatgtttcagagttttcttagggtttatatacctgggagtagaatctaccattatcttttatggtgagtgctttttgtgtcctaagaaattcttctctagcctgaagtcttgaagatagtctcctatatgttcctctaaataggaataggttagagttcaagctttgcctttcacatagaagtttttaatccatctagaattaagtttgttttttgtttgtttgtttgttttttgagacgggagtcttgctctgtcgcccaggctggagtgcagtggtgcgatctcggctcactgcaagctctgcctgccaggttcatgccattctcctgcctcagcttcctgaatagctgggattacaggtgcccgccaccacgcctggctaatttttttgtatttttagtagagacggggtttcgccgtgttagccaggatggtcttgatctcctgacctcgtgatctgcctgcctcagcctcccaaagtgctgggattacagttgtgagccaccacgcccggcctctagaattaagttttatatatctgtgtatggattagttaggaatccaattgtcccagaactatatgttgataaaatagtccctgctttcctcaacgatctctagcattacctctgtgattggttttaaaaagccagggtctagctctgttgcccaggctggagtgcagtggtgccatcatagttaactgtaaccttgaactcctagcctcaagcaatccttcgccttggcttcccacagcactgggtttacagatataagccactgtgcccaggtggagattgtttttgtatgtgtgtttatgaaagtaatgttaaaatggtaaatagtgttttgttatatgctttttaaaattaaatatatcttgaatgtcttttgataccatttaatatataatcagtttttgtggatacataggagaccactgtattcaatctctctagtttttattatatcacttttattcctgatcttccagttgccctgtctcaagaaagcttataaccagttttctttctatctttctagaaatgtgtgcatgaaaacacatgtgtatacaaagtcctatgcagtacccctgttatattgcagtaaaatacacatagcataaaattgaccattttaagtgtcactgaactcagtggcattaagtacatgcacattattgtgcaaccttcaccaccatccatttccagaactttttaatcttcccagattgacactgtatacagtagtcccctcttatccacatcccaagactcccagtggataccttgaaaccgccgatagtactgaaccctgtatatactgtttattcaatctgataaccaagatggttatcaaatgtcaaactggtgggtaggggtagtgtatgtatatagcatgaagatggtagacagagggatgagtgacatcccaggcaggagggagcaggatggcatgagacttcatcatactactcagaatggtccacactttaaaacttacgacttttttctggaaatttccatttaatattttcagaccacggttgactgcatggaaggtgaaaccatagataagtttaatcggaactactgtacccattaaacttttaactcctcattcccctctctccccacaccctggcaacctttgttctcctttctgtctctgtgaatttgactatgctaggtacctcatataaatggaatctaacaatattttgtttcttttttttttttgttattggctttttcacttagagtaatgccccccgagcttcatctatatttagcgtgtgtcagaattttcttccttttaaaggctggataatacttgactgtatgggtaagaccacattttgtgtatctattcatttgttgatgggcagtagttgcttccaccttttagttactatgagtaatacaatgaatattggtgtacaaatatctgttcgagaccctgctttcagttcttttggatataaacctagaagtgggattgctcaatctcgtatggcaattcaacatttaatttttttccttctcttctcttctctttttttttttttttttttgaggcagtctcactcttttgcccaggctggagttctgtggcgctgtcttggctcactgcaacctctgcctcctggttcaagtgattctcctgcctcagcctcccaagtagctgggattacaggcacacaccaacacgcccagctaatttttgtatttttagtagcaacagggtttcaccatgttggttaggctagtcttgaattcctgacctcagatgatcctcccgcctcggcctcccaaagtgctgggattacaggcgggagccaccgcacctgggcaacattttaattttttgaggatccaccattaccattttccatagtgactgccaaattttacattcccaccagcaatgtataagggtttcagtttttccacatccttgccaacactagttgaattttgtgtgtgtgtgtgttttctttcaatagccatcctaatgggtatgaagtggtatctcattgtgattttgatttatatttctctagtgattagtgatgctgagcatctgttcacgtttattgaccatttgtgtatctttggagtagtgtttattcacgtcctttgtccatttttttttttggctgggttgattgttgttgagctgtagttattagtatattctggatatcaatcccttatcagttatatgatttgcaaataatttttttttcccccgagacggagtctctctctgtcgcccaggctagagtgcagtggtgtgatctcggctcactgcaacctctgccttccgggttcaagcgattctcctgcctcagcctcccgagtagctgggactggaggcacgtgccaccatgctcagctaattttttgtatttttagtagagatgggtttcaccgtgttagccaggatggtctccatctcctgacctcatgatctgcacacttcagcctcccaaagtgctgggattacaggtatgagctaccacacccggccgatttgcaaataatttctcccattatgtaggttgtcttttgattttgttaatagtggcctttggtgcacaagtttttacttttgataaggttcaatttttctgtcttttgttgtgtgttctctggtgtcacatccatgaaatctgccaaatccaatgtcatgaagcccttctcttttttcttctaagggtttttagttttagctcttatttgtatgtttttgatccatttttgagactatttttgtataatagtaaaggtccaacttcattcttttgtgtaattcatttttaataggatagtagtgtaccatatacgctgagattcgttatctggcttttttcactcaataatgtgtctcagccccagtgtttttttttcatcctgtcctccagtagcctgttgagtggtgtgagtcaatatgtaggaaagcttttgaacatggctcccttcactaacagttaaaattaaaagaaaatcaagtaggattgttaaaccgaggaatgaaaagtgaaaaaaaaaaaaagataaaagcagggaacagaggtggagtatgggaattccaagtatcaccaacttctgcttttagggcagattgcaactttattgaaaatttgtgaggcacattgttaaactctgtatatatatgtaagttttttaaatccacatttgactgcatgtgtatatatataacttttacctttaaatcagtcccctgaaatgtaggtggtgtttttcccattttacagatgaaaaactgattacttacccaagattttatagttaatgagtggcacatgtagcatttgaacacaggtatttttgactctgcaattaatggttctctgtgataatgagaacctttaatcaagtaagcttgaaaaaggctgcatattaaatccctctcttggaaatttggtctgaattagcatattatgagctatgagaagttgggcggtaaaaatctctgtttaattttgctttaaatattaagacgcttacttgcttaagggaagagtttgctcagcgtgttaacaatacctggaacagttctcctttaacattattttgggaagtaccactcacagttgcattctattttcttgtttcaaatcaaaggacagtaagttaaatcctaactaggtgaagaagagaatcagtccgtagaattctctaacacagaccaggtgtgcagcttttggagcgggggagatgaggaatgtcagtttatacttcaaagtctgctgtgatgatgtaactcaaaagtaatgtgcttttccagaggtgaattgcatgtgactgcagcttcccctgtctacatgacaggtattaaactgtagctttattttattttagttttattatcttattcttttttttttttttttttttttgagacagagttttgctcttgttgcccaggctggagtgcaatggcgcgatctcggctcaccacaacctccgcctcccaggttcaagtgattttcctgcctcaacctcccaagtagctgggattacaggcgcccgccaccacacccagctaattttgtattttatgtagagacggggtttctccatgttggtcgagctagtcttaaactcgcgacctcaggtgatccacccgcctcagcctcccaaagtgctgggattacgggtatgagccactgcgcccggccttatcgtcttattcttaaccctacaaggaatgcaaggctgtagctttatttcagtgtgtatgatatggtaagataacacaacagaaggatttaaggcatagataatttaagaaaaaataatttttgaccagcaatacttcttacatatgggctttgagtttaaggattttatcttggtcctgaattgttcattttagctctgccactgataaacataagctgtgatataggaaatgaaagattgtctctattatgggcgtattatttaaatattgaacagaaactcgtgtcagagatggtcagcaaatgaatgaatcagcagcccattagcgtttagcttgtaagagaaagtcatttatcagctgaattgagacccaatcccttgattaggcattgcttttagtattcagtagggctaatcctatctttatgtttttacagagtgttctttgatatttttgcccacttatttttccaagttttcccaagttccgtaaagtatcttgttaatgatttcattggaagtatgttacagctgttacttaactgggacaaaatcttcatgatattctggtatattccttctctgcaactgaccaagtttttgttttttgttttttgttttttaaatactacattaattaccaaatattttatactttttgttgttttaattaagatatttcatttttttcctagctggtcattactggtatgtagaaatacattttattttggcctttacaattcctttcttatttctcactctgatatttttattttcctgtttaattaatttttttttcttttttaagacaagagtcttgctctcttgcccaggctggagtgcagtggtgcagtggctcactgcaacctctgcctcccagattcaagcgattctcctgcctcaggctcccaagtagttgggattataggcgtgagccaccatgcccagcctacactgattgcttttcaaatattaaaccagccctgcattcctgaaatcataacgtgttatgctttttctttctttcttttttttttttttttaagacggagtttcactcttgttgcccaggctggagtgcaatggcacgatctcggctcactgcaccctccacctcccaggttcaagcgattctcctgcctcagccccccgagtagctgagactccaggtgcctgccaccacacccagctaatttttatatttttactagagacagggtctcgtcatgttggccaggctggtcttgaactcctgaccttgggtgatccacccgcctcggcctcccaaagtgctgggattacaggcgcgagccaccactcctggccgggttatgctttttctgtatggcagggtttgatttgctaacattttgttacagattttcatgtctctattcatgagacacactggtctgtgatttttttaggtctttggttttggtatcagggtaatgctggccttatagaatgagttgggaagtgttttctgtcctcttctggaagatggtgtagaattgataattctttcttcaaatggttggtagatcactagtgaagtcatctggacttggagttttctttgtgggaggattttaagctacaatttcaattttgttaccagatattggcctgtttaggctatatattgatttagggtttgtatgtatctttatcccaatttatgttgaaattggtagtttgtctctttccatttcatctacgtagtctaatttgttgtttgtataagtttataggtttttttttctaccttttaaatgtttgtaacgtctgttgtgatgttccttctttcattcctagtgttagtaatttgtacttctccctttctcctgatcagtttagctagatgattttatcttttcaaagaattgcttttagtttcattgctttttctctagtgtttttccatttttttgatgtctgcactcatgtttatcacgtccttctttctttgcatttaatttgtgtgtgtgtgtgtgtgtgtgtgtgtgtgtgtgtatgtgtttctcaaggtagaagcttagatcattaatttgaaaactttctttttttccagtataggtattgaaaattatacgtttccctctaagcactttttagctgcatgctgtacatactgtacattttggtctgcttgattttcattcaagtcaaaatattttctttcttctttttttttttttttttttttttttttgagacagagtctcgctctgtcacacaggctggagtgcagtggcgcgatctcggctcactgcaagctctgcctcccaggttcacgccattctcctgcctcaccctcccaagtagctgggactacaggtgcccgccaccacgcccagctaattttttgtatttttttttagtagagacggggtttcaccgtgttagtcaggatggtctcgagctcctgacctcatgatctgcccgcctcagcctcccaaagtgctgagattacaggcgtgagccactgtgcctggcccattcaagtcaaaatattttctaatttcccttattatttcctttgacccatgagttatttagaagtgttttttcttctattaatttctagtttaattctcctgtagttagagaatatgctttgtattatttcagtctttttaaattgagggatggaggttgtgtgtttttggtggtctagaatatgatccatgttggtgaatgttttaagtacacttgaaaataatgtatattctgctgttactgggtgaaatattgtataagtatctgtgaagtcaagttggtcagtagtccttggtgatttgggtgggggggggtctgtttgttttgccaatcactaatcattttgtaatatccctcctaatattccttgttccaaagtctactttgttgatattgacaccactccagcttagtgcctgtatggtgtatgtattttctttatctttttaatctgtgtatttatatttaaactatgtttcttatacatagcatgtggccggatcttacttttttgtccagtttgacaatctgccttttagactaggtgtatcatttacatttgatgtaattattgatatgcttatgttaaaattttttccttcttggaatttatttttcatcttttttctccttttccatgttttcctgcctttttaaaacatgaagtatttttgtgattccattttatctcttttttttttttttgaaatggagtctctgtcgcccaggctagagggcagtggcacagtctcggctgactgcaaccttcacctcaggggttcaaacaattctcctgcctcagcctctggagtagttgggattacgggcgtccgccaccatgcttggctaattttttgcatttttagtagagatggggtttcaccatgttggccaggctggtctgttcttgatttactagcttcacatctttgttttatatttttagtggttgatacagggtgtatagtatgcatcttcatcaccatctatgttgaaataatgttatactatttcacctgtaacttaagcataattttaaaaattttaaattttttctattttaatttttttctgttttagttattttcatggcataaaaggccaccagtaattagtgccttaaaacaacactattgccaatttagtctgtgggttaggcatttggatggggcacagcagagatgttctgtctttgcttcatgatgcctgtgtcctctgctgaggcagctcaaagctgggggctgggagtatctgaaggtttacccacttgcatgttaagcagttgatgctggctcagaccttagcttagtctgttggccggaacccgtgcacatgacctttttatgtggcctaaattttcttacaatctggtagttgggttccaaaggcaaatgtcctaagagaagagagccaaatagaagctatattggcttttgtgacccagccttgactagtgtcacttctgctatattttttaggtggaggcagttacggaggtttgtctgaattcaaggagaaggtgcataaccacctcctaccccaccagcacacacacacacactcacactcacacatcctctcctatcccaaactctcccccacatcacacacaccctctcgtatcccagcccacatgctctgcttccagtgtgacatcgacaggaatattgatgccatattggaagcaaggcatgtgggctgggaaaggaggcagtctttggaaaatatagtctaccacactgctgcctttgtgctgctgttatcaggcattttaattctttgtatgttatgttacacaatacattattatttttgttttaaacatgtcttttacatttactcacttatttcttttattcttttttttttttttttttgcgacagggtctcgctctgtcatctaggctggagtgcagtggcgcaatctcagctcactgcaacctctgcctcccaggttcaatcaattctcctgcctcagcctcctgagtatctgggactacaggcacccatctccacgcccagctaatttttatatttttagtagagatggggtttcaccatgttggccaggttggtctcgatctcctggcctcaggtgattcgccttcctcggtcttcctaagtgctgggattacaggcgtgagccaccacgcctggccatatttaccatttctttcactcttcatttctttttgtagatgcacatttccatctggtatttttcttctgtgtggagaaattcctttaacattagttgtagtagggttctgctgataatgaattatctcagcttttattggtctaaagtattttgtctccatatttgaaaactatgtatcactgggtgaagaagtttatattgactttttttccttcagtactttaaagatctcccattttcttcttgctgcatgatttctaatttcattttttaattaattaattaattaatttttttgagatggagtctagctgtgttgcccaggctggagtgcagtggcatgatcttggctcactgcaacctccgcctcccggtttcaagtgattgtcctgcctcagcctcctgagtagctgggattacaggcacgtgccaccacacccagctaatttttgtatttttattagagacggggtttcacatgttggtcaggctggtctggaactcctgacctcatgatccacccacctcagcctcccaaagtgctgggattgcaggtgtaagccactgtgcgcggactcatttttatttttgtttctctgaataatacggccttttccttctggacacttgaagtttttctttttaccactgatttttagcactttggttatgatgtgccttgatgtggttttatgtatgtttcttttgtttggggctttttgagtttcttagatctgtgagtttatggttttcattatattatgaaatttgcagccgttatttcttcaaattttttttctgctttcccttttgcccttcctgtattctagttcagctgtgttagaccacttgatcgtgttccacaggttacttaggctttgttaatattttttcagtcttcactgtgggtactttttactgctgtgtcttcaagttaaaccatctttccttctgcagggggtctcatctgctgttactctcagccaatgtgtttttcatttgagatactgtacttttaaaatctttacagtttccatttgggtcagaaaaactatttgtctcctttccacatcacattcatatgaactgtatattgtttgttttaacgtccttgtgttctaattccattatttctatcatttgtagatttatttcaattaatttttcatctggatatgggtctttttcacttcttcgtatgcctggacattgtgaattttatattgctgaacactggatttgctgtattcctctaaagactgtcagattgtatttggtcacacagataagtaatgtttggatcagtttgatccttgtgaagcttacttttaaggtttttgtggctagtaatagcggcctttaatccttggactaacttggcccccctactaaggtgttgatccttctaaggccccgtgcttttttcatggtcagagtgaccagccctgtgggagctctgggaagtgttggccctattgctttccagtagattgttccctgaccttggggagacttcctctcaagcacttggagatccgagactgaaaggaacccttctgccagacctccggagccctctgcatgcagcccccgcttctccagtactgggtcctgcaaattctggctgcctcagcttcccccagctctgttggctcctcagtgcattgagacccttggatttggtttcagtgttctgtccctgaagtatgaagcctgggagttgtctccaggctttaagtttggttagtcataaaatttaccttcttttttcctttccctggagggggatcacagtcttgtgctactttttgcccagtgtctaaaacttgttatttcatgtgtattgtctggttttctagctgtttatagtgggaggacagttactgtagcagttacaacttcatgttccgaattgagagtcctcctgtttaaattttgttaatatagtcagccctctgtatctgtgggttctgcattattggattcaaccaaccatggatcagaatttttggaaaagaaaataataacaatacaatgataaaacaacacacattctttaaaaatacagcataacaacaggttgagtatccctaatccagaaatctgaagtgctctaaattctgaaactttttgagtgccatgatgctcaaaggacatactcatttgagcatttcagatttttaaattagggatgttgaaccagtaaatatgtaatgcaaatattccaaaatcggaaaaatcccagatccaaacacttctggtctcaagcatttcagataaggaatattcaactgtatttatatagcatttacattgtattagctattataagtaatgtagagacgatttaaagtatatggaaggatatgtgcaggttatatgcaaatactgtgccctttttttttatccctccctgagacggagtttcattcttgtcacccaggctggagtgcagtggcacaatctcggctcgctgcaacctccgccttgcaggttcaagtgattctcctgccttagccgcccgagtaggtgggattacaggcgtgcaccaccacacccagctaatttttgtatttttagtagagacagggtttcaccacgttggccgggctggtctcgaactcctgacctcaaatgatccactcatctcagcctcccaaaatgctggaattacagctgtgagccactgcacctggccattttatataaaggactttagcatatgtgaattttgttatccaagggggatcctggaatcaatcccccgtggataccaggataccaagggatgattgtactttcagtgatttatcactttcatttgtcaacagattttatgtcaattctgctttctactttgccagctttttttctttttactttttaaaaaactgtggtaaaatgtatatataacataaaatttaccattttaatcgtttttaaatgtactgtcatgtggtattatgtgtattcacattgttgtgcagtcatcatcactgtttacctccagaactttttctttttttttttttttttttggagacggagtctcactctgtcgcccaggctggagtgcagtggcatgatctcagctcactgcaacttctgcctcctgggttcaagcgattctcctgtctcagcctcccgaataactgggactataggtgcctggcgccatgcccggctgtttttttttgtgttttagtagagacaaggtttcaccatgttgcctaggctggtcttgaactcctgagctgaggcaatctgcccgcctccgcctcccaaagttcatcttcttaaactgaaactctgtacttattaaacagcaaccttcattttcctctcactgagcccctggcagccaccattccactgtctatgaatttgactgctctagctaggtcacataaatggaatcctttatttgtccttttgtgactggcatacttcacttatcatgtcttcagggttcatccctgttgtagcatgtatcagaatttaagaattaacttttttttttaaagctgagtaatatttgaatgtatagataggccacatttttcttacccattctttcatcactgggcatgggttgcttccaccctttggctattgtgaataatgctgctgtgaacattgctgtacagacatctctcaagactctgctttctgttcttcccagtttgatttttgcatttatctttgtatcttttttctttctttttttctgagaccgagtttcacccttgttgcccaggctggagtgctcaatctctgcttaccgtgacctctgcctcccgggttcaagtgattctcctgcctcagcctcccgagtagctgggattacaggcatgcgccaccacgaccagctaattttgtatttttagtagagatggggtttctccatgttggtcaggctggtctcaaactcctgacctcaggtgatccacccgcctcagcctcccaaagtgctgggattacaggcatgagccactgcacttggcccttttttttctttattactttgcttttattctgaatctgaagatgtgttcttttttccatgttgacaatataatttaaaactgaacgtttcttttacggtctgcatcctttacagtaagctaaacatttttggttacatttgttgaaaacagtatgaaagattcaatggctttatgtcactgacaaattttcattttggacaacatgctagtgtgagtagtttctggtccagtgaaatccagttttcagatattcctatttttggattctcagctgtgtatttgaaatcatcacatttgaaatttgtttgttccagaacatatatgttctcattcttgtttgtacttgagtcatgtttaatcacatatatttgtagtatgcttagatgtagtagtttccattttcataactacttttctgttgatccattatggtgaattgcagctacaaagtcatactgtgtagtagcgaaaatgctaacataagaagtaaatagtagcaagcaaaggatttttaaaatatccaacctagtcatatatacccgtttagctcagtagttctcagctgtggtaataccattctctggtgtgcatttttgaaattcatgagaacatttttgtttggcaccatagtagaggtcgttacaggcatttaatggacagggtttaggtctgctagatgtcttgcagtgtgcaggaaagtgctacagcgaataactattctgtctcatatggtgtttgaagctcctttaattaagtctaaaatattttacatataaacacaaatcattttttacatgataaactacattttctatgaatggcactgttgtgtaaatcaaggagtgagtaatgttttttcatttaaggctttaccaagagtttgccattttggtagaatgcatcacctacagcagtactcctcatggtatcgtagtcaccattcgacacacctgattcagtctgcatttgttgctgtcacattcatggtgatgtttcaaattgatgcaagcattttattatatcatgttatttcctagtgtattggtgctcgagttttaatatattaaatagtgttttattatgaatcagcttccttttctttattccccatattatagttaggacattgtaattttttaagttatgtagactattaatataatttcaatataatgaagagacttaaaatttttcattatgaacagatgttaggtgtggtaaacttgggagccagtgaattgactgaattatagcagtcgctatggcacctccacagcctttaagattacttcagtatttctgtgaaaagttattaatattacacttcagatgtatatgaaaatattattttattgattttccttagaaattaccacaccattggccgggcatggtggcttacccctgtaatctcagcactttgggaggccgaggtgggtggatgacgaggtcaagagattgagaccatcctagccaacttggtgaaaccccgtctctactaaaaatacaaaaattagctgggcatggtggcatgcgcctgtagtcccagctacttgggaggctgaggcaggagaatcgcttgaacccaggaggtggaggtttcagtgagtcaagattgtgccactgcactctagtgacagagtgagaatccgtctcaaaataaataaatacaaataaaacaaaaacaaaaaaagaaaaagaaaaaagaaattactacaccatctatctgttgaccacttgacaagtgattgggtgatactggtggtccgtggactacactttgaaaagcagtgccacatatcctgtattgcttttgtattaaccttgttgtcctcaattactgaatttgctctgtactccactttatcagataccattttttccctaacattttttttttttattttgcagtgacagggtcttgctccgtcacccaggctggagtgcagtggcatgatcatggctcactgcacccatgacctcccaggcttaagggatccttctgcctcatcctcctgaatggctgggattataggtacacaccaccatgcttaatttattttttgtaaagatgaggtctcactgtgttgcctgggctgaactataatttttatacataggctgggtgccgtggcccatgcctgtaatcccagcattttgggaggccaaggcatgcggttcacttgaggttaggagttcgagaccagcctggccaacatggtgaaaccccgtctctacaaaagatacaaatttagctgggtgtggtggcaggtgcctgtaatcccagctactcgggaggctgaggcaggagaatcacttgaacccgggaggtggaggttgcggtgagccgagatcatgcctctctgcactttagcctggacaacagagcgagactctgtctcaaaaaaaatttttttttaatacatgaattgtctaataccatagttgttcaactctaagataaacttcttctcagcaccattaagtatgtatatatatatatatttttaagacagagtctcgctctgtagccaggctggagtgatcttggctccctgcaacctccgcctcccgggttcaagcgattcctctgcctcagcctctcaagtagctgggactacaggcacgtaccatcacacccagctagttttttgtattttagtggagacaaagtttcaccatgttagccaggatggtctcgatctcctgaccttgtgatccacccacctcggccttccaaagtgctgggattacaggcgtgagccaccgcgcccagctacaccattaaatatttttgatggtcctttgtagttcttaatgtcaaaagaaattcaccaagtgctgtcgcagatgtcattgcctgcatatatataaactttgccatgcatggaggtgtcttttcaaccatttatcatcagattaaagttatttgcactgacaacattacacatggctgaattttaagttacatttagatatgtaattattttctgtatctttctcaaaaagagtgtgctacaaggattattttatatgtaggaaatagcctgttccaagataaataatacagttaaaagcaatagaaattgctaaatcttaggagtacattgtagagtttgagagataatggaggttacctatgactgactcatgacttaggatggattatcactcaagcactaatgttttaaaaaacgttccttatttttaagagaaactgcttaatttctagggacatctatttgaggaaagatgaaactgagtttaaagacaaaattcagaggattctcagatgttcttttatttgcctcagaattatgctgtcagtcccaaagatgtcaaaaagaacagaattctgactttgagaagtgacatgtttgatactattgcataactggagatggccaaaagttcagaaaaatcactagactttgaatgttaagaaagtttcagttcaaacttttatcagattctgaaaaggaaagtggtatgtaactgttttgagaaatgtatgctattattttacaatccattgtgtcttagaatagaagaaatacattatttctccgttttaaattctttcctttttttgaacatgcctttttcaggataaactttgccatgtgtggaggtgtcttttcaaggtaaattatgccttactatttcagttaattcagaaaatgacttttgatgttgactatcttttaatagttctaaattcctcaaatataatgttctctctagaggtatatgtcccaaccttgcgtaataggaatttcctaatgtgttgttacacggattcccaggctctttcccttaagtttatgatgtatagtctagggtggaacccaggaatctagatttggcggaggtaccttaggtcacaggcctccaacgtttttggcaccagggactggttttgtggaagacagtttttctatggatggggaggagggggaggatgttttggggatgattcaagcacattactttatgttgcattttatttctgttattacactgtaatatataatgaaatataattatacaactcaccataatggagaatcagtgggagccctgagcttgttttcctgcaactaggcagtcccacctgagtgtgatgggaatcagtgacagatcatcgggcattagattctcataaggagcacacaacctagatccctcgcatgcacagttcacaatagggttctcactcctatgagaatctaatgccactgctgatctgacaggaggtagaactcaggcgttaatgtgagcgatggggagcagctgtaagtacagatgattttgctcacttgcctgcctgtctcctcctacagtacggcccagtttctaacaggccactaactggtggcagtctgtggcctgggggttggagacccctgccttaggtgattcttccaggctagcttgggaaacactgctgtagagcgtaggctcctccctggggatcctgcctagtcttgactactgtataaaatttcattgctacaacttagaatgcatctactatcccaggattatagtagtataatatatactaataaatacagtaatatttagaatattggtaacaggttgtgagcacttaactgtgtgtaaggacccatgccaaacactgaataggttgttgaatcctcacagctttcatagatagatactattgtactcattttgcaaataaggataaataatctgtacaaggccttacagccagtaagtggtagacccaggattggaacccaagcaaactgactttagagcctgtgctcttaaaccacactgtactggccgttgtagatcagatgctgagctgtgctgattgtgcagtgcattgtagagcagtgtacagttcgctatgagcgtgaggtaacagatatggtaagacatgaaacagtggcattttcatgtgggagggtgtcagagcagtcagcagttatattaaaacagtaaccaatcttgaagggccacaaagtgatcaactgggtaactgttgatgtttctctagattagcacttctcaaagtgtggcccctatttccctggaaatccctgaaaatctctcatgggatcctcaaggtcaaacctttatatagtatttctgagaagttatctttctctctgtgttaacatttgtattgatggtactgctggtgcctaagcgtgaatcaaggcagtggcaccaaagtgtgctcatagacattgtattccacacactctacagttttgttttgttatttttttaacccagtttcacttaagaatgcgtaaaaaaatactcctttggttaactcttgacactagattgcacatctttttaatgctttgtgtgatgtaatgggaaggtcacacaaggcacttctgctgcgtgttgaagtactgtggttgttttaaggaaaagcacctgtagggttgagttacatgctgacctaaccatcttttttcatggacatttttacttttaagaataactaataaactatggttattcagctttgagtatttggcagattttgtaaaaaatgaaaggactgataatatttgttgccagtgataagatttttgggcttgatgacttcccaggttttgtttttgtttttgttttttgagatggggtttcgttcttgtctgggctggagtgcaatggcatgatctcggctcgctgcagcctccgactcccaggttcaagcagttctcctgcctcagcctcccaagtagctgggattacaggcatgtgccaccacacccggctgatttttatatttttagtagagatggagtttcaccatgttggccaggctggtcttgaactcctgacctcaggtgatccacctagctcggcctcccaaagtgctgggatcacaggcatgagccactgggcctggcctacaacttcccagtatttaaagacttctgtgatgagatcagtggtaatagatggaatttttagtattggataatgaaatacataagcattttgaagagctcacaactgaggaaacaaatattaacttaccaatgcatgatgtacagaattatgcatgggtaaggatccattcagagtgaaggcagacatggattttaatgtaacagagtacagaaagttcattgatagggttttagattttacattggagctaacctttaggaaactaccatctaggctgggtgtggtagctcatgcccgggatctcagcaccttgggaggccaaggtgggaggattgctggaggccaggatttcaaaaccagcctgggcagcaagcaaggctccatctctgcaagaaaaaaagaaaagaaaagaaaaagaaagctacaagaaaaaaaaaaaaaaagctaaatgtggtgacttgaccctgtgggcctagctacttgggaggttgaggcaggaggatagcttcagcccaggagttcgaggctacagtcagctgtgatcactccagcctgagcaataaaacgagaatacatttcaaaaagaattaaaaaacctaccatctgtagaatttcatttcagtattgaagaataatatctacgattacctgaaaggctcttaaaataccactcacattttaaactatagatatgcatgcagttgaattttcttcatgtacttgaaccaaactatatatcatagtacagattaaatgccgaagcagatacgagaatactgctgacttcgattaagccagacattaaagatatttgcagaaatgtaaaacggtaccattcctctcactaatttttactttcaaaagagttatttttcattaaaacttttttttttttcttttgagatggagtctcgctctgtcacccaggctggggtgcagtggtgtgatctcagctcactgcaacctctgcctcctgggttcaagtgattcttctggcttagcctctggagtagccgggattataggcatgcaccaccacacccagctaatttttgtatttttggtaaagatagggtttcaccatgttggccaggctggtctcaaactcctgacctcaggtgatccacccacctcagcctcccagagtgctgggattacaggtgtgtgccaccatgcctggcctagatgttgtgataaatatatatttggtctttatcccaggttcctggcataatagcttttataataaagcccttagaatttcgtgatagaggagagaggagcatcttttgttattcatgagaagtccctttcaaccctacctgagtttatgctaatgagctgagtcttagtgggctcctaaatagcttctggatgatgactggttgctagaagaaccaatagagggttggaaatataaccccttccctcaacctctgcagaggggagaggggttggagattgagcccagccaggaaaggccagtgatttaatcaatcatgcctgtgtaatggaacctccaaaaaatccttaaaaattgagttctgagagcttctggacttgtgaactggtgctgggaggacagtgcacccaccgaaggcatggaaactttgcatactcctctcagccctccattccttgccctgtgcatgtcttttatttttctgctcctgagttgtatcctttataataaaccaacaatagtaagtaaattgttttcctgagttcagtgagccatcctagcaaatggtcaaacctgagaaagggattgtggaaacccctaactttgtagctgatgagtcagaagtacgggtgacctggacttgataccggcacctgaaatagaggcaatctcatgagacctagcccttaacatgcagggcctgtgacacctttgggtaatagtgtcagaattgaattgatgaacatctaattattattggaaaattggttattgacatggaaaaaacccacacatttggtgtcagaagtgttaagagtagaaacagatcatagaaatatgtgtaatttatgttaatgtataatgagtttattttaaaatgaataaatatttttcatattcacagtttcaatgtctaatatggtaaatatcaggaagtataatctatataaacaaatgccctttggggtcctcaacaagagtcctgaactaaaaagtttgaaaactacttctctggacactgtggacattattttctgtagtactgcctacattgtaattcatgttcacttatttactattgttttggaatcttaataccttcaagtatgttgctcaaaattctagaattgaagacatgaagatgttgagcactacagcccaaagtgatattcccaatcctttgagttcccagtccctctcttacccctaactccctcacagcccttctgttctctccttttggtatctcagaaatcttgggtatcagaaatcatttcataatacaagtaacaaggaataagataacctgttagaagattggattggtttttatatgttacaatttcaggcatatgatttttaaatctgccagagaggtgattgtatactgagtaatatcagtcagcgtactcccctgccagataaaccaggactcagtccgctgctaggatgcgtttcaatgaagacatctgacctgtgtggtatgtcttcagggcattgtagttgacagtagtaatgcaaggatctaccacagcctgtttaaaatatgaccagaaatgtggctgctggagtagctagatgaaatatagaccacactgataaaaaaaaatcttactctttttcccttcctgttatttattgccaacacccttttcaaggatctgtccttttggagaatttttgtactttgtctccttcctttttctgtttttctagcatgttctcatttaagaataagcaaactatggcctgcaagccaaatctgacctacaacctgtttttgtaaataaagctttattgtaacacagccatgcccatttgtttacatatcatctatggctgctttcatgctagaatggcagagttgatttgagaacagttggccctgtctctgtgggttccacattcatgatttagtcaacctcagataaaaaatatttgagggagaaaaaacaaaagtaatacaaatgaaaacaatatggtaaaacaggtatttatatagcgttttcattgtactatgtattgtaagtaatatagcgatgatttaaagtatatgagagtcctgtggagccctgaaatgggaggaggaaaaaagtatacaggtggatgtgtgtaggttgtatgtaaatactacactgttttataagggactggagcatccaaggattttagtatctagaaggggagtagggggttgtcctggaaccagtcccccaaagatagggaggactgtagttgtcacagagaccatattacttacagtgcctaaaatatttactcttttacataaaaagtttgccgccttctacttctcttactatttctagcaaagtaccagactaatttctccttcctctctccctccaatttgtcacgaacaaacttttgtgcgtgtgtataaaatacaatatacacaaattaccagaaaaaagaaacaaaaacttaacaaaatacatgcccagatttttcattattagagtcaacagatggaaaattaccaaattgctataatgaggtttaaacattctcagtttttgcacttaccttgacatggatccgttgctaacagttcatgaagcaataccagtgctaaacccacactttaaacagtcttgttcttgtagtctgttactggacaacttttatatttatacaacttatttacttctttcctgtaagtatttttattgattgagtatattatacataaatttctggttgagtatgctgtataggcgatgatgcacactgaaagtgatgtagatggacctccattggtgagccaggccctttctggataatgtgatataatctttattgccttaaagaccctactcagtgactgagtagactttatttttgaggcagggtcttgctgtgtcacccaggctggaagtgcactggcatgatcatggctcactgcagcccagatttcctgggctcaagtgatcctcccacccagctaattttttattttttattatttttagagatgggggtctcactatgttgcctaagctcttcttgaactgttagcctcaagcagtccctgcgccttggcctcccaaagtgctgggattacaggaatgagccactgcacccagctagacttttttttgtttgagttggagtcttgctctgttgctcaggctgtggtgcagtggcgcgatcttggctcactgcaacctctgcctcccgggttcaagcagttctcctgcctcagcctcccgagtagctgggagtacaggtgcgcaccaccatccccagctaattttgtatttttagtagagacagggtttcaccatgttggccaggctggcttcgaactcctgacctcaggtgatccacccgcctcgacctcccagagtgctgggagccactgcacccggccccagctagactttttgagtctgtatgttttctgttgtgtttaggtgtagtgtagcttcctttttaattgggataataatggctgtagagataagtttcaaaaagaattatttgatatcagtggttcccacaggatttgtgtttcaagtactgtttgaaaaaacaaaaacttttttgtcaaagtaataatgcacactgctgtatactgtcacaattcttaacttcagttattgcttgaaaagacgatttacatagattcagtcatctttgtcttataaggaaggtatgtaagcatttttaattttttctctcatagcacagtacaggttgagcatctgatatcacaaaatccaaaattatccaaaatgcagaactttttgagctccaacatgatgctgaaaggaaaagctcattgtagcattttggattttggatttttggatttgcagtgttcaaccagtaagtataatacaaatattctgaaacccccacgccccccaccccaaaaaagagggagatctgaaacacttctggtctcaagcattttggatgaagaacacttaatctgtatgttttctttatagaaaaaaaattaaaagttacccatagagagattttcttactatgccttcaagaaatgcaatgaggcagaacaaaattgaaaacataaccatctcttataaggaccctagagtgactaaataagtaaatactgatagattataaaaagaaactgattcgtaaaaagttaaacaaatttaccatgtgaccctgcagtttcacttcatagtttggctgcttataaattctcggctcacatttcgttttctctattatgttcttccatagagcgttgctgtcagagactagtgatattctctttagttattgtttttagtttttgttatgcttccttgctttgattttcttctttggggactcctattgtatacattttggatcttctttgcctgtttttctatagattgccgctctctaatctttttatccctttcttaacttttccatcctatttactttctagtttctttaaggcattatctgttacccgttggttgttcattcttgtgtttcttttagtttagtgttcatttctgaaatttctgagttttatcaccccttttgagttgttctaattcagatttatgttgcctcgtcatatgatgtcattttctttgtttttttttttgttttcttgagatggagtcttgtttttgttacccaggctggagtgcaatgttgcgatcttggctcactgcaacctccgcttcccgggttcaagcgtcctgcctcagcctcttgagtagctgggattacaggcgcccgccatcacacctggctaagttttgtatttttaaagatagggtttcaccatgttggccaggctgatcttgaacttctgaccacctcggcctcccaaagtactggaattacaggcgtgagccacagtgcccagccatgatgtcattttcttaaaaaatttaaaatttcaaaataatattgtgttacagtttttacctgttttaaaggcatgttttttttctggtatgtttttattgtttttacagatgctctctgcctccctttctctctttttaaaataatgactttgagataaaaccacagtgctttcctgttgttcatttttaatgaaaattaattttctttctttttaaatatatattaagttccaggatacatgtgcaggacgtgcaggtttgctacataggcaaagatgtgccatggtagtttgctgcacctgtcaacccatcaccgaggtattaagccccgcatgcattagctgtttatcctgatgctctccttccacccacccctgtgacaggctctggtgtgtgttgttcccctccctgtgtccatgtgttctcattgttcagttcccgcttatgagtgagaacatgtgatatttggttttctgttcctgtgttagtttgctgaggatgatggcttccagctccatccatgtccctgaaaaggacatgatctaatttctttttatggctgcatagtagtgtatatgtaccacattttctttatccagtctagcattgatgggcattcgggttgattccatgtctttgctattatgaatagtgctgcaataaacaaacacatgcatgtgtctttataatagaatgatttatattcctttggatatgtacccagtaatgggattgctgggtcaaatggtatttctgcttctagattcttgaggaatcgccacagtgtcttccacaatggttgaactaatttacattcccaccaacagtgtaaaagcattcctgtttctccacagcctcgccagcatctgttgtttcttgactgtttaataatcgccattctgactggtgtgagatggtatcacattgtggttttgatttgcaggaaattaattttcataaactgagagagagaagtgggcaggaagactttagctttctggctctagagctccctcttttgacttttctggtggaggggaagagggaatcctagcactttcagacatctggtcattactcttcctggttctttatttgggccaccttcttccttttcttctcctgtctctgttctgctggattctgttcccagtagtttctcctcagtacaagactttgtcctgaaagagagcttcagatggttagcttttagtttagagggtccctatcactccatccccttgtacaggccgtaagttggaatgtacagagctcctttaaagttcaactgctattcctagttcagctcaccttgcttgccagtacctgttgtctcatttggggttttcctaatttcagattcatcaaataccctgttgcttccctttgctgcttctcacacagatggcaattgcacaccagtctttagcagtcagtagtttgtccccatctgcttgtcttttgggttttgtgaggctacctgatcacttagctttgttgtaggtgcagattttcagttttgcatccagattgctcaatctgtttttatgggaaaattcaggaggattcaaaccaactatgccctgaatgctgccgtcgttccagaatcttgtcccatagttaaatttttattttcgttttttgagacggagtctcgctctgtctcaaaaaaaaaaaaaaaaaaaaaaaagatgaaaattgttcatctccacaccagtggccagggggctcagtgagtagcaagggttcatgttctgtgtattcttctgctctgccctccagcatgttaacctcacctctaggcttgctgcgctgctgtttgcaggacaactgcaacatttccgagacatcacatcctcaagaccacaaaaaaagaaccttctcttctttgtgtttcttttttttttttctttcagattaagggaaatcttttccttctgtctcattggccagaattgcatcataagcctaagccacaaggggactggaatctgcatttaggtttgtgctgtccagcaaggtagccactggccacatggggctatttaaatttaagttcattaaaattaagtacaactacagattaagttccttagttgcactcactgcatttcaagtgctcagtagtcccatgtggctagtggctacctgattggacagtgctgtaatattactagaatgttttcatgatcacagagttctgttgaacagtgctggcttacattaatcacgattcactccctgggccttttcagaattgcatttagtcttgagattttctcaggtgcattccagaaagcatgttcatggtgaacagccacagaatctgacaatgagaccaccccatgtggctctggggcttcaagtacacccccattcatttgcatgagtgaaataatttctctgtgtaggagaaacaaaaaggttgttttactgccagaaaaagtactgaacacatttctgaagtactgtttttcttttcttttcttttttttttttgagatggagtcttgctcagctgcccaggctggagtgcagtggtgcagtggcacgatctcagctcactgtaaccaccatctcccgggttcaagcgattctcccgtctcagcctcccaagtagctgggattacaggcaactgccgtcatgcctggccagtttttgtattttagtagatacggggtttcaccatgttggccaggctggtcttgaactcgtgacctcatgtgacctgcctgcctcggcctcccaaagtgctaggattacaggcgtgagccacagcgcctggcctgtttttcttgagaccagtcattttatttgaaaattaagctttgaggtcatagtgctaaatagccagggcctatgatttacttgacaaaaattgttttttatacatttgtcagtttctaattgggtagttggaaaatgccaggaaactattatttctgttcattttttgtgctatatggaatctgttatactgaggggatgtactttataagttattagtacaaggattaatcactgatagtccccttctctcgtcattcttgcactctgtggggtctagtgatccatccatacaaggagaagaaacggtggctggagggataatgagttccctctcctctttcctacacactagaagtagggtcaggaaagccctgcatgcttcttccttccctgtcccttccctgccccttgtggagggtcatcatgaaacagttacatgcaggtgctataaaaatcctggcgtgttctttggtccaaatagtgatcttgaatgtcataaatataagaatattttcattgcactgtttttcctcagttgagcaggttttgattataacaaaacaaatgccccgctttggaaacacttggtaatgactgttatttaaaaggagtaggaataataggaagttagcttcttcttgttgacctttggaaaggtttgtaacttcatgatgcttccttagactttggggcattcaggctgactgaattttagacccaattgacagtcatttttgcttgagtctttttgaaaatctttttagtattattaaaatggtttcttgccttaataaaatatacagaatatataatttaacatgtatttggctttgatagcacctcaggctcttgttcatcaattattgttttagtgatttataggtgtagctgttgcaaaaggaaggtggtcacacagcacatagctgccatgacttaaaaagaaaaaagacctgtgctgttggcttgcttacttctccattgtatgttggcaagactagatttacttagcatcagactactagagtatgtatatagatacatataattcaacacttatcaccaaaacagtttcttgagcattctaaaattgttttaggggtggaccatgtttacctcccactgaatgtggagaattttttaggtgcttcatggtaaacccttggcttttctgatttccttgggtcagtttcctctgcccacctcacaggaggctgccacatgtgttcttacatttactccttgaagagccgtcagtaaagggtacattgataacttgcacagtcatgagtaattcagtttgagtagctaggtttatcctgtttggggaactgactgtcactgtggggttttcttctccctctggccttttttttccccgtgtgtgtgtgtgtgtgtgtgtgtgtgtgtgtgtgtgtatgtgtgcgtgtgtgtggtggtggtggtgtttgttttcatgtggttttgggtttgggttttgttgttgttttttgctattccaaatacaaattcatctcacttgctttcataatatattcagtagtttttctgaattgctatgaaaatgtgaattttatctaaaactgatttttaaggtatggtctttggactagtagtagcatctgtattgcctgggaactttttagaaatttatgaatgcttggctctgccccagatctgctgaaccagaaactctggggtaggtacagcgatctgtgttttaacaagtcctccaggtgatttggatacaccatcagctttgagaatcactggtctagaagatccatgaatttaatcattttgaacaaatgctgaaacttcctttccatgtgctttggtgtgcatcatatcttcttcttagtctaaaatttatatcaaaagaattaggaatactatggtttgttacagcttcttgttttgctactattgtgtacatttttagaagttactaaggaaaaaattttacgtttggtgtcagatgtttgtccatgtgacatttgaatgagtaagtgcaattcctttgggcagataaaaatgtcagtgtactttatttgtctaacaggaattctctgcttgtagatgtaatataatatagttctgtagacttagaaatcaaatatttaccatatacattttccttcatttgcttgccttaggaaaaaaagtggatgagcagataagatgatggtaaagaatatatctttaggccgggcgtagtggctcatgcctgtaatcccagcactttgggaggctgaggcgggcggatcacctgaggtcaggagttcaagaccagcctggccaacacagtcaaaccctgtctccactaaaaatacaaaaaaattagccaggcatggtggcgggtgcctgtaatcccagctactcgggaggctgaggcaggagaatcgcttgaacccaagaggtggaggttgcagtaagccgagaatgcaccactgcactccagcctgggcgacaagagtgaaaatccatcttaaaaaaaatatatatatatatgaaatatatatgatatgtatatattatatgaaatatatatttcatatataatatgtatatattatatgaaatatgtatttcatatatcatatgtatatattatatgaaatatatatttcatatatgtatatattatatgaaatatatatttcatatatgtatatatgatatatgaaatatattttatatataatatacatatataatatatgaaatatattatatgtatattatatatgcatatatttcatatatgtaaaatatgtatattatatatgcatatatttcatatatgtaaaatatgtatattatatatgcatatatttcatatatgtaaaatatgtatattatatatgcatatatttcatatatgtaaaatatgtatattatatatgcatatatttcatatatgtaaaatatgtatattatatatacatatatttcatatatgtaaaatatgtatatataaattaatatatatgattatataaatataataaagatatatatctttaatagaaaatgtcaaattggcatgtaactatgtgcgatgacaaactgggagtttcctaaattatttgtctgagcccattatatggagcttcagctatgcactttgcataacagagagcacactttcgtcagagcaggagtgtacaagcagtaatgtgaggagcgcaggcctgcaggttcaaactcatgtgggtatcacagagtatttttaaccttcagtgaaacacaatgacatctgttagatatcatacaaactaatagcttaaggtagttcacaattcagcattaaatcactaaattccttttgatgatgccatatctttgcaaagctgggattttggccattgctgtgaaataaaagcagtactgtttgaaaatcagtgtgaaacgggccaggtacggtggctcacacctgtaatcccagcactttgggaggctgaggcgggcagatcgcttgagcccaggagttcaagtccagcctaggcaatgtggtgaaaccctgtctctacaaaaaatgcaaaaattagccaggtgtggtagcgctcacctgtagtcccagctactcaggaggatgagctgggagtatcacctgacccggggaggtcaaggctccagtcagtcgtgtttgcgccactgcactcctgcctgggtgacagagtgaaaccctgtctcaaaaaaacaaaaaagaatgtgaaacaggaaacgagagtggcagtgtcccatctgattctaagatttgagaagtggtggagtgcccagaagctcctgagctattaggacacaaatactgcttcgactgaacagagctattaggcatttcttttggcctcaggtatgccacaaaaaaaaaatgactgagattttaagggagccatgacctgagaacatttgaggaatctctgatgtgggctactttttttggtagattgcagtttggactatgagtatgattttaaaaaaaaactgtatgagaaaatgagaggccaaaggccagtgatttacaggcagcctggtggaggagaagtggtatgtgctgctgctacatggtctctagggccatatgctctagtttgagttctagttttttgactatatcactgtggctaagcaatgaagtttctagactcgcgttctcattcattaggaatgataacacctggtaagtatctaaatgagatactgtaggtaagtatacttcatagaattttaaatctggtaattgtgtggtaggctgaataatgacccctaaaacatgtccatgtcctaatctctagaacctatgaatataggaaaggagactttgcagatggcatcaaattaatatttttgagatgagattatcctggattatctgtgttggcccaatataatcacacaggtccttggaagaggtgggcacaccagagtgagtggtagcagatttgacgatggaaacaagaggttgtagtgatcgatgaagggaatgtgagccaaggaatgcaggtggtcctctagaagatgaaaaaggcaaggacacattcttccctcagagccctcacagggaaccagccctataaaaccgatgtcagattcatgacctccgcaactatgagaataagcttgtgtaaagtcagtatttgtggtaatttctacagcagcagtaggaaactaatataggatgttactcacatttaaaaagggaaagtgtttgaaaaaccctaacgtccactgtcaaaaaacctaacattctttcattctttttcacagtatgaaatccagaatagcagcatttggcttttgtttttttttttttttttttttaaaggctggtctcactatgttgtccaggctggtcttgaactcttgggctcaagcagtcctcccacctcagcctcccaagtagctgtgcattcatttggccttttagacttccttacaatgcggcataaacttctgtggtgtagacatgttgagatttactttggccttaacagatggctctagagactttgaggaagtatttagatttgaaaggggcaacagagaggactcataaacctctggaacatctaagatgtgtgtctctggaaagcctaattttatgggaagggtttttggaactgagttcccttggcagcccctagagttaccttttaccaaccatccattatatttctaaatctagctggtccaacaagttgctttagaacagtttctccaagcctaatgtgttttatatttgcactccagagggtagtatttcagagcctctcaggtgcaaacttggggttttccatggccgggtgactcagctgaggaaaacttctgaccagtgactgcctgtttgtatctacacactctgttaggaatggttatttttactgagtccttgtcaacatcctgtcaatcccagattttccagtagaaatacttcacgctagaattatgtctttataaagcagcagctgtcacaaagaagtggtaaggcctgaggacatgagaattgtagggggagggtatgtgtgagaagatccagaacctgtaacccagagtggtttttaggagtctcggataaataggattttcctggtcccaaaaggtaaagactacatgtattgtgcactagtcaagcttcctcatagctaactagcatgcctgatagaagctagaaattttcttggacatattttcagatgccacgtgcaaaaatcacttcgtacagagtatatattgatctgttttttagagctgtttggattttctaagtaaaattcaaaggaaatcttctcaacatgtctacattttacctgtatttgctatatcttggtaaccttaggccattgctagtatagatagatcatcctgtttcacttgcctctgtggtggctcattaatctattcgtatctacttaaacaatagaatgtcttcagaaattgtgttgccagttggctacaactttgtagaagttggtattgattacctgaaattattttttacctttagagtactgatttagatgcttgttagagttgagcccatctctaataactttgttagagggaaagagagtatcaggtaaagtttaggtttagttttactttttattattattgttttcttttgttttttgttttcttcctctggttttagagggaggatctctgttgctcaggctggaatgcaggggcgttgattatagctcactgcagccttaaattcctgggctcacgcaatcctcccatctcagcctccatgagcatgtctaagaatatagacatgtgccaccatgcccagctaatttttaaattttttgtagagatggatatttacatagtaatcaagtttgtattacatcctgggccttgaaagatggccaaaaaaaaaaccaaaattgagtgttacacaaatcacctgtagcttgctcattgatcattagtgttattacactaaagtgataaaaagtaatttatgcacaaatttttaaggcatttttgtccttactattttcttacacattaggtataatgagctatggtaaaagagcagtaatttaaagcatctgtgagaaatctaacctttccttttgtaaccttttggatttaattgtgatttttgagaaatggaacaatcagtagtagttatgaaaattgtcaatttggcttatgttaaatatatagattaatttataagtccatcgaaaatatgcagatgactaaaataatacagcaattctaaaataatacttgttagatagactagcactttctggggtgtggcgggggcaagtaagttaaagtaaatccttgccattctgttaatgataccactattctcagtcattagattggacaagaaatagcagttttggtattccacccttcttgggctccctgccatgttcaagcactttaacttgaggtcttagttctgtgattgtgagaataactctagacccatggtgtccctgtagtcctcagtgcgatcttatggctgtggtttggcctttcttctgactccttgagatatatcctgatcctgtacattagaaagtggctgttggagaacaacactgcaaatacaactttgcttatagttgtatttagttgcttatagagcaaccttgagattctgtcagggcagtgctagtgaatttcctctccctttaatagattcggctgctgagttcatcagaagctggtaagtagtgcaggtcagaatctgctcttacttgtgcacatgcaccaccaccaccttatctcacaccagtgtgatgaacaagactagattttgttttaagttttacataatgccttacttccctttttctgtcaccagacattcagccacttataaaaatcactctctccccaaacttgtgattatctcctttctctcggtagttaaaatgagcacggttcagattcaatgtggcattttgaaagccaggggacacacccagggtgattatggtactcaggtacaggagaacagaaagacagttctctgctatggaatattaattataaatattagctccctttttactagattcaaaggcagttcagtggttactttaaaccaaggccaggtgtggtggctcacacctgtaatcctagcactttcggaagccaaggtgggagggtcacttgagctcaggagtttcaaaccgtcctgggcaagagagtgagacctgcctctacttaaaaaaataaaaaataaggccagacttggtgactcacgcctgtaatcccagcacctcgggaggccaaggcaggcagattgctttgagctcaggagttctagaccagcctgggcaacatgttgaaaccttgtctctacaaaggatacaaaaattagccaggtgtggtggcacacacctgtggtcccagctacttgggaggctgaggctggagaattgcttgaacccaggaggcagaggttgcagtaagccaagatcacaccactgcactccagcctgggtgacagagtgagaccctgtcttaaaaaataaataaataaataaataaaaataaactgaattcatgtttccaccttccccaaagagacgctaaattcttctttttccctctctaattagtgttgaaattgatgttacatctccctttcttctggtttattttgtttgaatttattttttctcttttccttacgtttggttttatgcataatgaagtttgaggctattggtgcaggtattcagtaacataaaacttcatttatctgggtttataagtcagaatcctatttcacttctccctgagcctgaggggaaatcttagaaaagtctattgagatttagttataataaacatactacttaattactgcacaagcttaaccacagagtttgctgtcacaatataaacacccagatgagggcctgaaagaaacctccacactcccacccacatgaactctgttgggtgttttcttcctgccctctatctggcaaacaaaaatatggaatctgttccaagaatttctgtgaaaccagtttagaactttataaatggctcaactaaatgctcaaaacatgactacttctattccattttgccagctttccacaagccatttttttttattttaaaaaagtgatttttcttgagagctttgttattcttaaaaaattttatctaatttgttgcaagtttttaaaactccaattttgagacttctctttccactcttaaatagcatacactaagtaagcagatcaaccgtagcttactgttttactctccatagcttttatagaataaaacatgctcaggctctaaaattctaaggtaactattttaaatggaaatactagcagctatgcaagtaaaccagacactgtcgattatttcgtcaatttaaaacaataaaattccctgcttttaatataattgaaaatctatttaaagagcccagcatatatctttgataaaattgccatgctaaacaaatatgtcattactgtgcatgtgttggaaatgaatttatgaagttagaaaattattttattgttactcttggaatgtccctacttttcaattattcagtcacttaaaatatttactgagctcttgttatgtatgtgccaggcactgttgtaacagtgaatgaagcatcaaggcccctgctctcacagagctaaccctaaaaaaaatatcagtaatgacaggactttgagaccagcctggccaacatagcaaaatcccatccctactaaaaatacaaaaatcagctgggcgtggtggcatgcacctgtggtcccagctacttgggggctaaggtataagaatcgcttgaacccgggaggcggaggcttgcagtgagcaagattgcaccaccgcactctagcctaggcatcggagcaagactgtgcctcaaaaaaatagatagatagatagatagatagatagatagatagatagatagataatggattctaagcaattaaaatagtaattggggtggctctgaaattaggtaggcagaaaatgcctgtctgagaaggtgacatttaagttgctgtctgaagaacaagaaagagccagccctggtgggagcaaaaccagtacctggctcggagcagcagccactgaggtacccttcccagcgtccttccacctgtccacaagcatggggaacataacatctttgccaacgtcttcaagggcctttttgacagaaaagaaatgtgcatcctcatggtgggcctggatgctgcagggaagaccacagtccagtacaagcttaagctgggggagatggtgaccaccattcccaccataggcttcaacgtggaaaccatggagtacaagaatattagcttcactgtgtggggcgtgggcggctcggacaagatccggcctctgtggtgccactacttccagaacacacaggcctgatttttgtagtggacagcactgacagagggcgtatgattgaggcctgcgaggagttcatgaggatgctggccgaggacgagctctgggatactgtcctcctggggtttgccaacaagcaggacctctccaatgccgtgaatgcagcagggaccacagacaagctgggactgcactccctttgccacatgaactggtacattcaggccacctgtgccaccagtggcgacgggctctatcaaggactgggctggctgtctagtccgctccggaaccagaagtgaatgcgacacccctccctctcactcctcttgccctctgctttactctcgtggcaaacacttggctccagtgtgagtgcagaagctgcctccatggttcggtcacagtgtgcatcacactgtgctgtaaatgtggcacatgcagcctgcagccaggctttttattcaatgtaaatagtttctgtttccaattaggcagtttctgttactcctgtgcaatattagtcagctttttttttttttaattgtaaaaaggaaagtcaactttctgttcagtgctgagaggggatgtaggcccgtgggcccttggcctccgggagtcgctgtgttgggagagctgggcatgcccttggctttagagctctgttgagatccattttggtggttggtttttgtcttttgcttaaaaaaaaaacaaaagccagccataaaaagatcataggaagcacattctaagcagagggaatagtcctacggtgggaatgagttgggtattaaaaagcagaaagaagaccagtgaaactgacatagtgtttgtattgagaaatcaaagggcactcagccatgtgtgtggggtgtggggggcaggcagtcgggaaagaagggtaagattgagatcagataggtagacaggagcttgggttttatcagcacgatgggaggctgttagaggattttaaacaggcacggtaatgcacttcaggcataaagaattggttgtgtgtgggttgagcgaaggagaatgggagtaagactagttaggagactattgcagtagtgtagttggtagtgacttgaattagggtgctaataacggggaaacagaagtggaagggtttaggctatgttttggaggtatggttcatttacttgtgctgtagattttgccattaatgctagggtggatggtgcctttacagaaacagtgaaaactggggggaaagcaggtttttgagaaaaatcgagagttctattttgtccattttaagtttaagatacctattagccaattggagatatcaaatttgcaatcaaatatatgactggcattccaggaagaagacagggctacaggtgtaggtttatgattaagcagcagagaacaaatgttttgttttgttttgttttatgttatgttatgttatatttatttttgggaggaatctcgctctgttgcccagactggagtgcagtggcgcgaccctggctcgctgcaacctccgcctcccgggttcaagcgattctcctgcttcagcctcccaggtagctggggttataggcgcgtgccaccatgcctggctaatttttgtatgtttggtagtgacgggacagggtttcaacttgttggccaggctggtctcgaactcctgacctcaagcgatccacccacctcagccacccagagtgctggaattacaggcatcagccaccccgcctggcctgagaacaaatgttttgaaaccattggactttctaagataactggggaaattgtgtacactgggaagaggagtacacctagtgccctgggaactctaggagaaaggatctggcagatgtgactgagcaggaacagccagtgaggtgggaggaaaccagtagatggtgatgttggagaaaccaaaagctgaaaatttcaagaaggagggagtgtcagatgctacagagaggttaagttgaataacagcaggaatattggctttgagcatcagtcataatcttgacacgcacattctcagtagagtagatatgaatgggtcaaggagagaatagaagtgaaggagacggtgattataggcaagtcttaaatcacaaaagattgtatcaagaatagatgtaacaggtaattgtgttttctaagacagaatggggatagcaaacgtactttttatctaatgtgaatctatagaaatgtcactctatgttataacttgtatatgtatacctcctacctgtgaacccagacatgtagccctactgtgatccgttcactgtgaacactgttgaatgaagcataggcacagaggtcctcttgtatctgcattcctggggatatactaactaactgagtctactagtttgaggctgtaatttaatacatttcaacctagaaatagtgcaaaatgtatagttgaagttgttttgtatgtgtactgcctcctccagtttctaagtcactaatcagcaggtccttctgcattttaaaaatggcatttttttctattaactatgcatgtttgttaaggcctctgttttcaatactgtgtgctgtggtctgaatgtgtcccctccctccacccacccaattcctatgttgaaacctaatctccagtgtggtggtgtaagagatgggggccttttggtaagtgattaagtgatgaaggcacagccctcgttaatgggattagtgcccttataaaagaggcccaaaagtgcttgttagcctattctaccatgtgaggatgcaccgagaacctgccatcgatgaagcagagtgagtcctcaccagacagaatctactggcacctgaatcttggacttccctgtctctagagctggaagaaacacatttctgttgtttacaattacctagtctaaggtattttgttatagcagcccaaatggactaatttttccttttctactattattgaaaaataatttcttcaggaccatgtttttggggaacattttataacctatgagtaaactcttctcctccattttctgtagcctcttagtgtatagtgtaatgttctgcccttatcttaggtcaaggaacaagtttctaataattgtctgtagatgtctttaactttgtggtgctcgttgccattattacttttatgaatcaagtacaccttcaggggatgtttataactgtgttccctcttcttatctacctaaaaaatgccaactttctatgcatgattctgggccacaatttcaaattttgagcacttcttgccatcacaattttaaaccatttattttctatctggaatactgtacacagtctgtattggtgatctaaaataattcagcctgcagatcctcaaatttactattccagatttcaacaaatattggggcatgatggaagttttagatgtaatagtttatttagtgtcaaattttgccttaaatgcctaatagtacaggtgcacacttaaatatacaagccaataatcctgtgactcgggctattgattagtggtaaaagcagaaagctatgttatattgatgcttattttgctttgaagaaagaagtaattgctagcttgtcagatattgagcctctctgaccaaaggaaactcagttaccactctgtgtttgacctttcactttccaaactcagaaactgaatagatttggataacaagggatacttgtttttgtaacattgggctaattgtataaagcacagactgggacttggccaattaatacgttttgtttcatattccagaacttctgacttacacagtcaagtaatttaatgtaattcagatgaatgaacaaactgaggcaatttctctttccacccttttacaaaaaataattataacttggcctttcgtttatcatacttccataacatgaaggtttcaggactctataatgaaaaactgagttgagatggggagacaatccagatgttttgtgcatatatatatatataactatttttttaacttaaaagtacactagcaaagaaaactgatgaataataaagattttaatagttcaaagtattgtatatctcattgtttctttttttttctgagatggagtttcgctcttgttgcccaggctggagttcagtgccatgaccatggctcaccacagcctccgcctcccgggttcaaccgattctcctgcctcagcctctggagtagcaggggttacaggcatgcaccaccacacctggctaattttgtatttttagtagagatggggtttctccatgttggtcaggctggtctcgaactgctgacctcaggtgatccacctgtctcagcttcccaaagtgctgggattataggtatgagccactgcacccagcctgtttctttttttagtaagtttttcacggaccgtaaaattcatcccttcataatatagaattctatggttatttatttattaatgaatgaatgaatgaatgaatgaaatggagtctcactctgttgcccaagctggagtgcagtggcacaatcttggctcactgcaaccccctgggttcaagcgatgtttttatttttattttattttttcagaccgggtctcactctgttgcccaggctggggtgtgtaatggcacaatcttgtctcactgtaacctccgcctcccaagctcaagccatccttccgcctcagccccccaaatagcttgggactacaggcgcacaccaccacacccagctatttttgtattttttgtagagatagggtttttccatattgcccaggctggtcttgaactcctgagctcaatcgatctacctgcctcgggctcccaaagtgctgccaccgcatctggccacaattctggtttttagttgtgcaatcatcatcactaatttttatccccgtcaaagagaaacccatacacatgaacattcattttccattcctttattttcctaccccagccctaagtaactgttaatctactcgcctattctggacatttcatataaatggaatcatccaatatatatggccttttgtgtctgacttctttcacttagctttcatgtttttagggttcatccatgtcaagcaagtattagtattttactgcttttttttttttttttttttttttttgagacagagtctcactctgtcgctcaggctggagtacagtggtgcaatctcagctcactgcagcctccacccgccgggttcaagcatttctcctgcttcagcctcctgagtagctgggattacaggcgctgccacccagcccagataatttttgtatttttagtagagacggggttccaccatcttggccaggctggtcttgaactcctgacctcgtgatccacccgcctcggcctcccaaagtgtctggtttacaggcatgagccaccactctaggccatattttactcctttttatggcccaaaatattccattgcatggatatagcacaatttgtttatttctcagtggtggacattgggttatttctgcctttgggttatcgtgagtactgctgctttgaacatttgtgttcattttttttttatatatgtgtacatgtgttttcaattctcttgactatacctaggagtgggattgctgggtcatatggtaactctgtgtttaacaatttgaggagctgaactgttttccaaagtgactgcactgttttacagtctgtatcttattgtttcctaatatagttgttgactagtccagtgaaagaatgtgttgtcacatgtacatacatactgaaaaaatcatttagctgcagagttaggaattttagtatgctatttcctacctttggttatttaaagaaaaagaattaaatttaagatgagttcaggaaagctcatgaggtttttgtttttgtttttgtttattattatactttaagttttagggtacatgtgcacaatgtacaggttagttacatatgtatacatgtgccatgctggtgtcctgcacccattaactcgtcatttagcattaggtatatctcctaatgctatccctcccccctccccccaccccacaacaggccccagagtgtgatgttccccttcctgtgtccatgtgttctcattgttcaattcccatctatgagtgagaacatgcggtgtttggttttttgtccttgcagtagttcactgagaatgatgatttccaatttcatccatgtccctacaaaggacatgaactcatcattttttatggctgcatagtattccatggtgtatatgtgccacattttcttaatccagtctatcattgttggacatttgggttggttccaagtctttgctattgtgaagagtgccacaataaacatacgtgtgcatgtgtctttatagcagcgtgatttatagtcctttggatatatacccagtaatgggatggctgggtcaaatggtatttctagttctagatccctgaggaatcgccacactgacttccacaatggttgaactagtttacagtcccaccaacagtgtaaaagtgttcctgtttctccatattctctccagcacctgttgtttcctgactttttaatgattgccattctaactggtgtgagatgatatctcattgtggttttgatttgcatctctctgatggccagtgatgatgaagctcatgaggttttttgagtctgaccactctcttggaatggtaactattagataccaataggtaccttggcaatacctctaattctgacttcacatatggtccttgattactctaaaaattttatctgttgaatgtttggacacaaagaacagagagcccaaatggcttaagtgataaagaagtttttccaatagagtagctgaaaaatccaggtaaatctggcttcagccaagacttgatcctccacactgactaggacagcgttcccaggaggcttaaatggaagtccccgaatcaaatcttcttggcccctgattgatctgccttggctgtgtgcttgtttttggtcgcagtttgggataagctggagccgggagtgagtacagtccaaatcagggttctcctaggagaggaaggaagaaagtatgctggagaagtatccaacaagggtctactacagagtcacacctctcctgtagagctgataaggaaaaaataaatatgcattcactgcactcgagcctgtatctgataacctaccaaattcagatagcccatctctcaggagaccatttctttttctagcctttcgtgtctatgtccttttattcttccttgttttggtaaagcattttatagctttaagacagttcctttgttttaagtagtaagtatgggctgtgtttataatcactgtgtctgagttttatttattttttattttttgagacgaagtcttgctcagtcgcctaggctggagtgcagtggtgtgatcttggctcactgcaacctccgcctcctgggttcaagtgactctcctgcctcagcctcccagtagctgggattacagtcgcccaccaacacacctggatagtagagactataccattttgatattgtcagaatttaggcactagtcatgtgtgtgtgtgtgtatatgtaacagctgcaggaaaggttggaaatgcattattttaaaaatcaggattattttaccaaaaagggagagaataaatgttggaaggaaatttgcagtctctgccatattgtagttttttatttttcctttttaggtgggtatttttaattgcctagtaaattgtggtagttgaagttatctgtttgacttacaggaatcgcattcccttctgataataaatggaaggttgttgtatgatataaagagtaagtacaaatacagtgctaaaaagcattatagaaaattcaaaaatgtttaatgccttcaaatgcagctaaataccaatttggattcaggaagaactaagattttaatatcacgtatttcagctaattgaagactattgatttaacattatttttgtgccaccaataaaaaaatgctgccagttataaaatgcgctccaatttcagagttgttaaaatatgaggaaagtacctctttgacaatattaacctttttcatatctgccttttttctcttcacatttctctctagccagttgaagggacaattattgcttgtgattgagaactggtcaaatgcagataaactaggcaaaaataaaaccatattaataatatagctagtacttattaacatcagatatacagccagttagtcttacaaatcttagctaacaagttacattaaaatgttactgctctgtatcagttatctattatctattgctgtaaaacagactaccgcaaaacctagtagcttaatgtcaccattttgaaatttttattgacataattatagattcacatgcagttacaaaaaaaaaatgcagagagctcatgtgctctttgcctggtttctcccaatgggcagcgttttgtaaaactcttaacaacacaatcaggatattggcattgatacaacccatttatcttattcagatacccctggttacttgcactcgtatatgcacgtatgcacacacacatgtgcatgttaaggcgtgtacagttttaccacctgcctgtgtttctgtatgcaccaccacagtcaggatagtgaatggaactaacactgaaagtatcccttgggttgcccttttgtaagcatatcccacaccttcccggtgctaaccctccattctcactccggtccctaactcctggcagccactaatctgtttgccattttaaagttttgtccttccagaaatgctatatttgctcatgattcttcagatctgcatttgggcggggctcagttgggatggttttgtctttgtcccgtgtggtgtctgccggactctaccagcactgaaggatcaggatggtctcattcacatgcatagagccttggtactggctttttgttgaggtgtctaagtgctcctccccacaacctttctcatgtagttgtcttctgctaggcttctttctctgtgtggcctctttccaacaggagagcctggacttccttgcatgccagcttcaggtgccaagaaagcaaaagtggagcctgctagatctcttttcaatctaggcctaaaactggcacagcctgctttctgtagccgtcttttggttggagaaagttgcaaggatagcccagattcaaggggaggggaaatagactccccttcttggtgggaagagtagcagatatatgcagagatgagaggcattcttggtggccagctttacagacaatgtggtgcacactccaaagttacagaaatgatggcacatgggtctgcttggatttgttgtaaatgctaccttacttcaattttgaaatgtgaactcatttgaatttcataaaaagtacaaaggagaatgtgatatggttacatagttttctgttgctaatgcccatttcagatagaacagttctgttgcaagggaagttgccagaatttaagttaccaaccaaatctaaggattctcaaggggcctgtggtatttgcagaacaagtggttgcttgaagtggctgttaagatgttaggaatggttcacctctctctcattttcccaggctagctgtttcttgtgatcctaaaatagcaggggcttgtatatgtagtgccagaattctgtaataccgacttggagagaccacacagatttctgtctttacattaagctttttacatgaaggcataaggatattgtttttcaagatactatcaacatagaagagatcttttaagagggagaagagtttttcaatcaaggaaatgaaaccagtaaaacattttctcaagatttttctgactataaaatgttaagcttccttcgttttgttgtaagagtgacagcacagtgggtcagaggatagatcttagacttcatcgtcagaattcttgatcatctataactgtatgtataacatctatgactaacgaacaagcttgcctagatttcttgaaggagagataacgaaagaactactgtttagcaagggctacatgcttagacagtatttcataaatcatgaggatggttaagggtaggtgtggtttcaaaaataaaatgaatttttcactctgagtttagaattatatgttatttggctaagagcttccttctgccttcctttctgagtgataactgattttacagacatttagtatgcactgtcgatctgtggagcatattgttagacatcattaaaaggaagttggaacagggtccctgttttccaggagactgtggtctaacaggacaaataagatgtatgcagagaggtaatataataccaaggtgattaacatagaagagtttcaaaatgaggcaagaatgttacaacaaactaagctgcctgaacctcatttttcacccctataaaatagatttgtactgtttttcttccatctctaaagtattaatagttcagaaatgtgtgtttcagttattagttggagggttagtttttataagatgttatcagattccatgtgatgatttaaaagattaattattgtatagttttggcacattttacctactgtgtgcacacagttatgaacacttgttttattgttaatgaaaagagtacagaaagggaaacacaaaaggttatttttagctctggttaaactagagtagtataggaccttcatttactggttttcatactaatggtgaaaatagcacagctgatctctgttcactgtgaaagaaaaggagaatgagtgtaagattgcagaaggagtatggcgacgggagaggaaatgccttcatttgttttagcaaagatttctaacatctccttggttggcaacatccatggttctcctctgcttcccacctcccgattatgaaggtgtttacggggaagctgttcatggcctatctctcttctgggcagtctctcaaagggtacttcagagggcagagtccccaccaaccacccctactcagagcccactccaacccctgttggagacaaccaaaaagacttcatggaccaccgatcacatttcaccactccattgcccatttgttaaccaggggcatagttggcttggaactggttagcacatgattgtgttgaagggtcaggcagctacaaggagtaaaaatgaactgaaacattctcattctctctcgattgtctgttataaactgaagacttaaaattccatctgtagtggtttccttttttctgtattcagcagatgtggttaacgtaaaactggttctaactgtgaactcgttggctaggaagaacttacaggccaaatactataatttcaggacatcataatatttctctcacaaggttgcttcataaggattaaagtagagcacatgtgaaaatgtgtcaccctgtatgcatgcttattctcaaaggtcagtactgtgcagactcacagtcagcttcgtgtgtatgtgtcaagatgagatctcagttttcagctgtagccccgcatttagagcccacttcagttatataaattaaaaatggatctcaccacttaaatattcctctgtcacttgaaactcaacacacacacacacacacacacacacacacacactttaaaactcaacaactcttttttctccctagttgtatgcatctgtttttcctcctttttttctctttttcctttttttttttttggagagatggagtctcactatattgcccaggctggtctcccaactcctggcctcaagtgatcctcccacttcagcttcccagagggctggaattataggcatgagccactgcgcctggcttgtttcatgtttttattaacctactaccatcctctcatttacccagcttcattcctacatgtctcttgctcctcatactaagtcattcccaaatgctctccatcctatttgttaaaatgtttctggtatctgccttgattcagacgttcttcctagaatattatattagtttcctatcgaggctgtctcctttttaaggcctgccacagtcacatttaacctctttggccaaccctgttttcctctgttccctttctggtacccatgctccaagtaagctccaagtacttaacacatgccccacacttctttgtcattatgccatcgttcttattgtaccctttgcttttgaatcttattctccctaatggatctcacattttcagatcctacttattcttcaagaataattcgaattttacctcttcagaaggggctaatttgaccttctccgatggaagcaatctcttcttcctctgaactcctatagtgcttatgttcctttattgaaatgtagatttctttgtagtgcatttaaagttattttatgcacatcttattacttagattgtaatcttgactcagaagcagtgagttatcaccagatccccatagtgctgatgtggtgcctaaaatagtctcttatgctttggaagtgctcagtaaaacatttgtctaacacactggttgtttgtaaagagtcttcctgtgcaactcaaatctctaatattaaactacagtatggaaacaggcctcctatatggtatggtgagctttggacctgctgtgagggcaatcttgggtttcttccttggatataaggatttccaagtaaaataaaaagaatttcactttcatttccaaatagcttttttttttttgagacggagtttcgttcttgttccccaggctggagtgcaatggtgtgatctcagctcactgcaacctccgggttcaagtgattctcctgcctcagcctcccgagtagctgggattacaggcatgcgccactacacctggctaattttttgcatttttagtagagatggggtttcttcatgttggtctggctggtcttgaactcccgacctcaggtgatccgcccaccttggcctcccaaagtgctgggattacaggtgtgagccaccgtgcctggccccaaatagctcattttctttaagaggtggcacacctgtatttttctttctcttttttaatattagagtcagaaaataataatataaggcaaaaccaatctcataattcttgggggattaattaaatgtcctactctgtggtacacagtctaaatgttgcttcttgcttatctccaaggtgtcctgtttttatgagtaataataatgaaaatgttgtcacagggttattttgagtattaaatgagctgattcagttaaagcacttatttagcacagtaccccacacataggaaaagctcgataaaactaagcagatacaattgctattatgaatttacagtttgagatttcagattggtgataaagaggcaagagctgtagctggttttttatattttgaactgtgctgagtagttcttaggaattagattagtcctgaaatgttatgtcagctgagaattttggtttctaggtgacagtactgcagtaggaacaggactggctctccctttagaacaaaaggctttcagtgggaattcgtagtggcttctttggtggtagtggtgtgagggggtggcagttatcagattctttctctcaactcccagattaaaatgacagtgtaaaggagaaaatggagagcctctgcaaaaaggataaggaactacagaactacaggggaacagatggcttaaagagatgggagaagagaagcaattcatgttttgtttttattaagcacacacctattagtggaaatgataaactccacagtaggaagggaaagctgtatcagagatacaagtggctgagacatgaattcccaaggtatcctaacctctgcttcacataaacagtggcataaacagtgagcatgcaaagtgaaatatagaaatagaattttggagaaatttattttagaggagtttgaatgggacctgattaaaggacttatgaagagtggacatttctaccttttgtaaaaggaaacatgcttaatttggggtgagtgctggaggacccattgtattagggttctccagagaaatagaaccaatagggtatatatgatgtgtatgtaagaagagatttatataggaattggctcgggcagagatggaggctgtgaagcaccaccatctgcaagctaaagaaccaggaaagccagtggtgaaactgagtccaagtccaaaggcctgagagccaggagagccgatggtgtaactcctgatctgagtctgaaggtccaggaatcaagagtgggaatgtctaaggaccgaagttgaatgtttcacctcaaggagagagagagagagagagaatttgcccttcctccgcctttttgttctgttcaggcccttggtggattagatgatgccctcccacactggggaggatcatctgctgaactcagttcccacttcagtgctgatcccctccagaaacactctcacacacagaaataggcagcaaacagaaataatgtataaccacgtagctgggcatcctttagctcagtcaaattgatacataaaattaaccatcacatccatcaagctacagtaagcaaaactaagtgatggctgggcttccttctagggtcacaaaaaagtcagcctgataggacttctaagtgaaatgaaggaatgcagtgatgtttacccaaagtgaaacaacaaaactatgagataagtaatgggattatctctgttttataccagactggaagcttagaactgaattcctcaccacccttgctctccccaacatatgcatgtacaccttctctctctctctctctctctctctctccttccccccctcccctctcccttattccatctcgtttcagctgatggtgtttcattctcccagttgcttggtcgtagtcatctttggcttctttttcactcatgctctgtgttcactctgtcaggaaatcctgtagatacatcttccaaatattaatgtatctaagaccagataacttctcacagctaccatgagtttcaccccagtaccagccaccatcttaactgtcttttcactgggatactaaagtcagatttttaaaggtgtagtttgtgaacagtgaaatttactcttctttttttttttttttgagatggagttttgctcttgtcacccagcctggagtgcaatggtgcgatctcagctcactgcgacctctatctcgcgcattcaagtgattctcctgtctcagcctcccaagaagctgagattacagatgcctgccaccacagctggctcatttttatatttttagtagaaacagggttttaccatggtggccaggctggctcaaactcccgtccacaggtgatccgcccacctcggcctcccaaagtactgggattgcaggtgtgagccaccacacccagcctcagttctttatttgatatgtattttgcagaattttctcctggtctatgtcttgtgttttcattttcttgaccagtgtctttcaaagagcagttttgttttgttttttttcttttttgaggcagagtctccctctgtcacccaggctggagtacagtggtgcaatctcagctcactgcaacccctgccccctaggtccaagcgattcccctgcctcagtctccagagtagctgggactgcaggtatataccatcatgccgggctaatttttgtatttttagtagagacggggtttcaccacgtctgccaggctggtctcaaactcctgacctcaagtgatccgcctgccgtggcctcccaaagtgctgggattacaggcgtgagctaccgtacccagccaaagagcagcttttattttgataaggtctgacctatcaaattttcttttatgatctgttctgtgttttaagaaatttttaacctaacccaatgtcacaaagatttttctgttttcttctagaagctttatggatttcagtttcacatttaagcttatgatctgtttttgcatacagtgtgaggctttttgtttgttttgcatatttacatccagttgttcaaacactgtttgttgaaaagactattcctagtctgggcccaataactcatgcctctaatcccagaactttggaaggcttgaggcaggaggatcacttgagcccaggagctcatgaccagcctgggcaacatagagagacccccatctctacaagaaataaaaataaaaaacttagccggaagtggtagcacacacctgtagtcccagcaactcgggaggctgaggcagaggatctcttgagcccaggagttcgaagctgtagtgagctgtgatcacgccactgcaccccagcctaggcaacagagcaagactccatctctaacacaaacaaaaaagactttctttcctcttggaacttttgttagaaattcattggttataaatttgtgaatttctggaatctatgttccattgaacagtacgtgtattcctcaccaattcacactataaatactgtagttttatagtaagtgtttaaatcagttaatgtgaatcctccaactttttttccccaagattgttttagctattctacttcctttgctttcatacaaattttggaactagccgatggatttctgcagaaaggaattttgtagttttcagtctcattgatttctgctctgtattacttccttccttctatttgatttgagtttaatttgctcttttttttctagtttttttttaaggcaaaaactttgatttttgaacctttttttattttccagtataatcacttaatgctgtagatttgcctgtataaacattgctttagctgccttccacatattttgatatgttttgttttcatcctcattcagttcaagatattttctaattttccatgtgatctcttatttgacccatgggttatttaggagtgtgtttaatttccacatatttggggattttcacagattttcctttgggtgatttctaatttaaattgtagttggagagcatatttcgtataatatcagttcttttaaattatttgagacttaggccagacgtggtggctcatgcctgtaatcccaacactttgggaggctgaggcaggcagatcacctgaggtcaggagttggagaccagcctggccaacatggcaaaaccccatctctactaaaaatacaaaaattagctaggtgtggtggtgtgcacctgtagtcccagctcctcgggaggctgaggcaggagaatcacttgaacctgggaggcggaggatgcagtgagccaagatggcaccactgcactccagcctgggcaacagagtgagacttgtctcaaaaaaaaaaaaaattatttgagacttgtttttatgggccagtctggaaaatggtccatgtgtggtgtttaccattagctcttggagggtgcgttttgattcatgatacaacttaatgatcccagctgaggctggggggcacaagccaggttgagctagggagtgttgtaaaatggtttaaagcatgacctctggatctagaaccaggctgcctggatgggaatgctagttcttcttccttgaagctgtgcagctgtttgaccttggacaaactagttcatctctctgcttcagtatcctcatctctaaagctgatagtggaagtatgttcctcagggagaagttgaaaagatgaaatgaggaaaatgtaaacagcttgtatgaagtctagcaactcagtaagagcccccaaagtattattattattattgttattattattatattattatattattattattattattattattgttcctgttattatagcagcagttatatttcttggtctcataggcctttcaaataagttttgtctggcttcttggatagtttttaaagaactacttccctgttaagggtatttctcatgtttattatataaagaagttcagataacttttgtttggctgtttgtggcccccctatatagaggaaaacatagtttggaaaaatctttaaaacccacactttcaaaatactgtgatttaaactctaaccaagaatttgactcctgctaagtcaagtttcctctgaaaacattctcggggttggtagaaatcaccaactggagaacagagtccagcaccctttacagctaccaaataaaaataacctcttccagtatatgacttttaaattttgacactcattttatgaatgtctcaattttgtcaggattaattagaaaattcataaataaaatcacccagggcatctcattgttattttagtttcaaacagtagattgtattggtgttttctcccctcctggagtcctggacagcaggactccaggtataaacttaggtgaaaactccaagacattatttaatgtgaatctttttagagaagctaaagatcaaagaccttagtcattgatcctttgtatatacttctgaaaaacgagggtattaaatattcttcttattgctaaggccagagacagctgagtgtctgctttatggagcgattttgcagagactcttatcacttactaggctgtgtaacactgaacaggtttcccctggcactgtttggtggtgctgtttgggcttgctgttaggtaagctttaggccaggtggaggtgatccgtgtcaagggttctgccttaagttgtgacctctaactgtctctgccacatacatgagtgcctaaattgggatttcgatgcccagtcaggtatccagcactgttagagggcaaggcaggtaggtctaggtttgagtttgtcataacccatggaaattttgactcttgccctgctttcttttttttttttttttttggagacagtttcaatcttgttgcccaggctggagtgcaatggtgcaatctcagctcaccgccacctctgcctcccaggttcaagcgattctccttcctcagcctcctgagtagcggggattacagacatgtgccaccatgcccggctaattttgtatttttagtagagacagggtttctccatgttggtcaggctggtctcgaactcccaacctcaggtaatcctcctgtctcagcctcccaaagtgctgggattacaggcgtgagccactgcgcccgtcctaactcttgccctgctttcattctctggagtgtgtctccagagacactcattctctcactggagtgtgtcaccagagatagacaccctggacaaagagaggtcccattagttcttctttcaaaatatagtttgtgactatagcacctcctctttccacttcgtactaacctagacttgatcacctcatgcttagattatcataagaatcttacttggtctccttgattctagtctcttctgcccaatttatctacactgaatatttctgcctgactgattttccaaaaatattatagactcttatgatttttactctactagttgaataaaagcaatgttttcaggtgacgttaaaactccagcagctaaaatcctgctaacaaaccttgacttcaagtacaccataatttaacccctctgtaaacagaagctgatcttgcagtgagtctctctggaattccattcttccgtaagacaagcgatatttgctcctgttgatattcctgtgtacatgtgccctgttactagagagttaagatcatgacctttattcttttgggatttgttttctcacctccactctcttttctctctaccaagccaaactcctttcaggtgctcaataaacagatgctctttagtgtttcctaactcacagaaaaatttttctctgaatacatcaggtctgtttgataacaaattcagttaactgaattggggctgcttttgccataatttcctttttagtgtgtcaggcttgttttttcaaactaaataattggctggattatatagtttttcaattattaatttagtaaaactttattattttggatttaatgaattaaaatttgtgaacattgttctggatcaaactgacattatgtaagtttggatctgtcctttttttttaaatgagtttaaggtgttagtaattaagattccatttgtgttataaatataatgactatccagtagacttaaggtagtgtcatataaggaagggcacactatgagaaagggactgggggtggggggcatgtttaccctttaacatttgttccattccatctgcagttaagctttctagaaatatgttgttacagtagctacttaagtgtttttaaattgtcttttcaaatgaatagggcatggaagtttgttactcttttctgtgtgaaaaacagtgtcaaaagtttaagaaggccaggcagcttcacgcttgtaatcccagcaagttgggaggccaatgctgaaggatcacttgagtctaggagttcaagaccagcttgggtaatatggcaaaaccccatctctacaaaaattgcaaacaaaaaaaattagcctgatgtggtggcatgcgcctgtctccccagctacttaggaggctgacatgagaggatcacctgagcccaaggaggtcaaggctgcagtgagccgtgatcatgccactacactccagcctgggtgacagagtgagaccttgtctcagaaaaaataaaagtttaagaaaaccattgtatttaaattgggctctttgaaaattaaattctgctatagaacttactctgtagtattacttgttaaattctatatccgactgaagaacacaagcttttagtatttagtataagtgaaaaatatagccaaatcagacatcactaacacttttttgtcttttttgctaacgtttccaccagaatcctgtgttccattaaaaaaaaattttagtgttattttaaaaactcaaataatacagaaatgtgaaatagtcccatttttaataaaagtggttttatgtgatacgtaggtcttcagcttgcttcttcctaacaattcttcgtgccattcttttaaatttctttgtgggctgggtgcagtggctcacgcctgtaatcctagcactttgggaggctgaggcgggcaaatcacaaggtcaggagatcgagaccatcctggctaacaccgtgaaaccccatctctactaaaaatagaaaaaattagctgggcttggtggcgggcgcctgtagtcccagctacttgggaggctgaggcaggagaatggtgtgaacccgggaggcggagcttgcagtgagctgagattgcgccactgcactccagcctgggcgacagagtgagactccgtctcaaaaaaaaaaaaatgtctttgtgatagagtgaattatataaaacacaatgactatagtaaaacaaataggttaattcaccccactatgtttctgttttttcatctgtacaaaatggggatcataatgggaagctcttaggacagtgctgggcacatgactcagtaaaagattgctgttacaacttggaaaagggaatcatcagcctatatagatgataaccaaaggcatgagagtagacagtatcacccagagatgagatgtggagtaagaagtaaagagaactgatgacagagccctgatgggcagaggagaaggagaaaatacggagccagagagcagggaagaaatccagtaggatgtcgtgggagctgggataaaattgtttcaagaaaaggaagtggctactgttgtcagatcctgcaaggggagcggggatatcaagtaagatattgactgaagtgttactagattaagtaacaacaagattgttgatgatcttggggagagcaaattccatggagtgctggggatagaaggcacagtgtgacaaggagataccagtgaagacggcaaatacagccagatccctagctttggtagccctatgtgaactggcctttcttccttttgttctctgtcctccccgccaccgccgccgccccccccaccccccacccccacacacacactctccgtctctcacagacacctttgtgggaatatgctctagctcttgctttttgtctcttgcacgcatgatcactcactcttgctctctcctctctagcccaactgaactgcttgactactttgtgaactcccagcaggtcgcactgtcacataggcctccatgctgagttcctacacctgtctgtttaatttggcaacctgtttacttctttttgtctccctgttaggcaattcttggtgggtggtaggggctgagtctttatcatggagtgctagtacctagcagagtcctcatgcatgtggtgatacataagataggacagaacagtgaccagaggtatttattctagttggagcttgtaacagacattagatactgcaagatgatggagagatttggtttgatttttagatgtgttgaatttgaggtgaccgtggtatatgcaggtagaagtgtgcccccagggtcattggagatttgctactgaaattcagtctgtctaatccctccttgctctggggctcaagagactttccttcttcaattttttcatcatcccagacagaaaccctagtttgtcctgatagaagtaagggatgaactgtgatttaaactcttaggctcctgtttgcttgtccacagaatttgtcactaggagaggttagcccccaggaaataactaaatgtcaatctgtagcattcatttttaaaagtcactggaaattttcttcttgaagttagattttggaattgtagggatgcttttaagacttcgtttctagaatcatttctaaaactattatcagcattaaatggcagggaataatcttttaatgaaacagatacagtaaaaaccagttcttttagaggttaagagcagtttttaaaattttccttaagttttataaaagttgttattgtaaaatatacataacatacaatttgaaatttaccattgaactttttctaagtgtacagttcagtaacattaagtacgttcacttatgttttgtgcaacagtcaccactattcatttccagacctttttcatcatcccaaacagaaactctgtatgcatcaaacaaaaactccccattccctttctctccagtcctggtatccgctattctgctttctttttctatgaatttgcctaatctaggtctgtcatataagttgagtcataacaatatttgtctctttttttctggtttatttcacatagcatcatgtttttgaagttgatttatgttgtagcatgtatcagaattttcttcttttttaaggatgaataatatttgattggatggctgtaccacaatttatttatccattcattcaccgatagacacttgggttacttccacccaacccaacccattattcacggcccagccattgtgaaaattggtgtacaagtatgtttgagtccctgctttcagttatttggggcaaatacctaggctttagtaagttttatgagcacatatcctgagagggtatttagatatccagtagcatttttcttatgaaatagtaatttcaaccagcatgttaacatagatttttgcaagtttttaaggagatttattttgtacaagttctaaagcagtcttggatcatgatacaaagataccttcaaaagctgcattataattttttttttctgtaaataagtcccttggccaaataaaaatgcaaaactgctttatccagcttgtacctattggctttgtccgaggaaaccagttgcctaatttctttcccttgccttatgtttgttgcagccagcccagggctgtttccggctgcagtgttgaacacaggaaccacagtgtgttgctggttgtgtgcgcaagtcacgatcaaaagcgcatgctttggaaactatgatgtgaggacctgtcttagaggataattcataggaaaaagttgaagcatattgccatcgaagcctttaatgtggggtcttctttctgtttcaatccctctccccgcccccggcaataaatcctttcttatctatcctaggcaataagatgtatttgaaaacaaaattactccagatcatctttactgccttgaagactaatacctttctttcatatgaatttgctcagtcagcagattttgtatctctgatggaagtaatcattttttcattgtattagtcttggtaaaatataaaatattaacatatagtatatttcatatatgtctttccatgaaatattttgtgataatgcagggataatattttgatatttttgtggaggtgggatctccatatgtttttcaggttggtcttgaactactaggctcaagcaatcctcctgcctcagcctcccagagtgttgggattacaggcgtgagccactgcgcccagccttaagtaactattttatttactacttgtaccttgcacgtaaatggttaaatttaatgtattaaatttttatttcataacatacctattctgttattaagcttgcaatacatatttggttttttcctttaaaatatggggaaatgtggaaaacaatgatctccaacattataatgttagactaatatttttagataggccggacacagtggctcacgcctgtaatcccagcactttgggaggccgaggcgggcagatcacaaggtcaggagatcgagaccatcctggctaacacggtgaaaccccgtctctactaaaaaatagaaaaaattagccggatgtggtggcaggcgcctgtagtcccagctactcaggaggctgaggcaggagaatggcgtgaacctgggaggcggagcttgcagtgagccaaggttgtgccattgcactccagcctgggcgacagagcgagactcttgtctcacaaaaaaaaaaaaaaaaaaaaaaaatttagagaaagatacaaattaagtcctatttcaacatatttccataaagggaaaaatgaacatttctgtaagcatggaatacaagtttttttgcatataatttttaaatttgaaattttggatagcaaaaaaattctaacaacctttggtgttttgtgatctgtaagaattgcatgtgagaaggtgttagcagtttgcatagccagagcttatgggtaaaggtagaaggcagcaattcccgaaatgtggctcatggaccatgggagattcctgagaccctgtcatggggtccatagggtcatacggttttcatagtactactaacattacttgtctttttcattttcgcaccttttttctcatggtggcaaagcaatggtggttaaaacctctggtgcgccctcacctgaatcaaggcagtggcaccaggcggtcctggtaatcatggtgttctccatcaccaggcacccagcttatcttctgaaatgccatttacacttagaatgttcttgacgaagcagtaaaagtttcttttgttaagttttaacccttgagtacactaagtgataaaatggaaatttttaatgataaaatggaaaatttccacaaagcacttctgctgtattccaaagtaccattggttatcttgaggaaaccacttgtgcagtcatttgagatgctaactgaactagatttgtttaaaattggaataccatttttacttgaaagaatgacttttgggcatatttggcagatagtttctcaaaaacgaatcaagtgagcctgtcacttaaagggaaaaaaagtgtttttatcaatgataaaatttgagctttcaagtgaaaatagaatttttgaaaatttgtatttgctaccataagccccaagaatggtactaacaatatgatttttcagatattgtataatgaaaagagacaacatctggaagagcggcataactcagcaaatcagtatcttccaaattaccaatgcatgatgttacaaaatcatccatgggtaaaagattcacacaaagttcaggatagtccagtggattttaatgtaatatagtaaaattcaaaaaaatccattgagatagtttcaaattccacattgcagtaaacctttaagaaattaccacttgttgaattttagtgtagtatcaaagaagaatattgatagttatctgaaaaggctatgaagtactccttcttttccaactatccatctgtgtaaagctggatttttttccccatggagttcagttcaaacaacatatggcagtagatggaatgcagaagccgatatgagaatccagctatcttccatttaagctagacattaaagaggtttgcaaacatgtgaagaatgttccttgtctcgcttaatttttttgttctgttttgttttggaaaatagatatttgccctttaaaaaatgttatttatgttaacatgtaatggttttattgtgtataaataatattttaactttttctcagttttaatttaatacggtaaatatcactaacccacatgtgctaaagctctttgggagtcctcaattttaagagtgtaaattgttctgcaaccacaaagttagagaagtgctggtctaaggcaatgtctgtgcagtgttagaatagtagttgcttggttttggggtggacaagaatgctttcattgtatagctggaaggctgacacatagaacacgttatagaacagtactctctgtgtctcagtttggcatgatttttagcaggatatgtgttataagcacttgctggtaaagtagctagaaatagatgtttgactgtagagcagttactaaaatccagcatggttctaaaaatcttagggtttagagtttagtcttgtatatgagagacatttctggtaactctttgtctattaaggtaaaggcttgcaggaatgtagttaaagaattagtggtcttcataatgaatatataaaatatttcaactcaacagctggcctatactgatacatcagttgacaaagtcttcaagactgttttcaatacatttggctaacctgattttggtgtgtctcaaatgcatgtatttagtttctttctgtgtttcagtaagaattcctttatctcagaatagagtagttcctgtctttcatgtccgcccagagcctctgggaacagacacctcagtaggagggcctgaagaatgacacatttctgttgatgctttggtagagtctgaaatgtaggatagggagagactgtgaaataagattgctgggctttgatttcctattattggccagacttacccaccctttttccttggaataccttttcttccctgtctgctccattgatcgtagtcttaccccagatccccaaaccccagctcctgtagtaaaatctgtgtctatttctgaaatgctgatgaacgcttgctttctttgtgtgggcaaagaacagaatagaggatgatacaggaggggcccttttcctccctgtcgttaccagcagtgaaaacctttagacatttttgaaaccgctctgtgctcatttttatgagcttgtagagtaggtgaaaagtgagcctacttcaggagaccaagggcataaacaaatatgggataaagcagtctagcagagggaaaatgaagagtttgtaaattagccttaaggctggccacattttttaaaaagaccctagggaagaatttcccatgggttgaataaacgaaccagagttgctacccagggtaagatgatggcttaccttcatatatgtctactggtataatgtaagattttatattaagccatttttaaatctgtaaatattgggtgattaaaagaggaaaataccaattttagtcacctggaaacagggtcatctgtggcagtgcctctttggctatgtcaatgatgggcaacatgaaagatggaaagagtatttctggtaatatttctgtttttgaaagcaaaacaatataaaaatacagactttttaaacttttttgagacagggtctcgctctgtcacccaggctgaagtgcagtggcacgatcatggctcattgcaacctgaaacttgtgggctcaaaggatcctcctacctcagcctcccaagtagctggaactacaggcgcgccccaccgtgcctggctgatttttttttttttaatttttcatagagtcacatctcatttgttgcccaggctggtcttgaactcctgggctcaagtaatcctcccacctcggactcctagagtgtcaaaattacaggcatgagccaccacacccagccaaaacctagacccttgaaaaataaaaattaatttggccttcaagtttatctgggcccaaagaggattttataggtaatagaaagatataaaggattgcccagggaggattacatagctaattactgtataattacagatagaaacttcagtttgtcatccagttttgggcagatattgaagtcaatttgagagactctggaattaggcctcctaagatcagaagtgcatctggctcttgatcttaaaaaacactaataatcacagagattcacagttctccagccctgggcaacattgtgaaaccctgtctctacaaaaaatacaaaaattagcaggctgtggtggctcacacctgcagtcctggctgcttgggaggctgaggtgggaggattgcttgagtccaggagttggaggtttcactgagccaagaccgtgccactgcactccagcttaagcaacaggtgaaaccctgtctccaaaaagaaacaacaacaaaaacttttataatgatagtttgaattgaaaatagtatatgaaatttcaaataacatcataaaataatctataacttctagttatgtgatatttggtaaagtttgccaaattgttagaactttttaagatcttagtataaattataaaataccatgtacaatattaggggtgaactttaatcagattttcttgtataggtttatttgaaagctaaaacaaaacttaagttagaagaaaccattaaacatctgaacagtttttttgaaatcaggcatttagttctgcagtgggggacatgctcactgccaggatatggaggtgagatctggcaaccttagtcacactcttatattttgcacatggtcaaaccttcatctagaaaaacagactatgaagaaagtcagtagctacagctcctcagaggctggagcacagcacagaagatctgtcagggaggagctggtttttgaaaatttaatccaggccaggtgtggtggcttacgcatgtaatcctggcattttgggaggctgaggtgggtggatcacctgaggtcaggagtttgagaccagcctgggcaacgtgacaaaaccctgtctctaataaaaataccaaaaattagctgggcatggtggcggactcctgtgattccagctacttgggaggctgaggcaggagaattttgcttgaacccaggaggcggaggttgcagtgagccgagatcgcaccgttgcactccagactgggcgacagagcgagactctgtctcaaaaaataaaataaaataaaataaaaattccagacttccagaagtctgaggttaagagtttctagagagtctccattgatttgagagatgtagcaaaataattaaacaatagtatcagactttaaggcagtgaatttgggaagtgtagatatttaatctgccttgagggtagtgacaatatgcttcaaaatacaaaggatacaaaaacaaagtcatccaagtaagacaccatcagaagaaaagttcctcagaagaaagccgctcttgtttttttatagctctggagtctggagaaaactttaaattgccttttaaaaatacctgctgacctttaatcataaaaaagaaaagctgctcaatctcactttaatttttaaattttaattacaattttaatgcaaataaaaaccatactgagataccagttttcatctctcagatgggtaaaaattcaaaagttagacaatactcactttggaaagtaggagcattgagttcattacggatgagagtgtgaaatggtataacctctctgtagggcactttggcaacatctatcaaattgcaagtgcatttcccctttgagccagcaatctgactttgaggaatgttatacaaacaggtcatttcatgtgtgtgcaatgcaggtataatttacaaggcccattattacagaattacttgttaacagcagagtttttggaaacaaccccagtgtccacctgtaaggaacttgttcttaaaaaacaaaacaaaacaaaacaaaaactgtggggcatctacacaatggactatcatgctgatgtttaaaagaaaattttaaaaaggaagttctccacatcctgatacagaaagatttctaggctatattgtaaaaggggggtagagggagatactgagcagtatatttaatattctacctatttcataagaagtggtgagaaataatgttcttatattgtatgtttactccaaaaggctagataagaaactaaaaaatgtggttatttaaaagttgttatctaaaaatgactgagagggtgggggttgggtgatgactagatgggagtaagacctctgtgtatgtactttttaatatacttttgatttttgtatgaatatataacctagtcataattttttttaattttaagaaaatgttccttcttgttttcagaattttggaagatgtgtgcaaagattatgtcacacagcaagaaacataattttagaataaagagaaactgatgaagttcattttcctaatacatgatacatgatagctcagatatctcttggtatgtgagccttgtctacataatctggttgttcaaaagaggaccctggacagccacagctgcatcattgctggatgggacccaagagagaggctcgagtggccctcatgtctcctaccttccctttctccactccccggctgactgaaatttaggaaaaggtagcacccctgtgaggtgctgtgaaacagaattcatgatccaaaacatatattcttgtattcatctgcctctagtagttttaattgtattcaaattgtcttaccatctcaaagcctggtgtggggggaagagagaaggatacaatatacctatcattccagcttcataattttaaaaagtctaccttttttttggtgtatccctcccatgttttattttcttagagtattttaaagtaaatcttaaatcatattatttcacctgttaaaagataaacttatgtttaacttttggagagtttttttgagcagtgtctcatgaatcaggcagcaccagatcacaagtggatcacagctccttggagggggcctgagggcaaaacttttataaagcttttgcagaagcaaaagaaagaaaatacttgattggttaaagtagaaagtctctagtagagattagttggcagtttctgattggtaaagcccctggttaggtttgattggcagtttctgatgggttgagttactctgagttggatttcagttggcttccttaggaacccaagacactggaaccatctcagcctaatggactccccagttcattttttttttaacatacccataaatacttcaggttgtatctgtaataattaaggatcacgccgggtgcagtggatccttagcctgtaatcccagcactttgagaggccgaggcgggtggatcacttgaggtcacgagtttgagaccagcctggccaacatgatgaaaccccgtctcttactaaaaatacaaaaaattagctgggcgtggtgggggggcgcctgtaaccccagcttctcaggaggctgaagcaggaaaattgcttgaacctaggaggtggaggttgcagtgagccgagatcgtgccattgcactccagcctgggcaacaagagtgaaactccgtctcaaaaaaaaaaaaaaaagctgaggatccaaaagcctgccattatagaccacagcagtgtctcatgaaagtttattatatgtcttattttttacaacgattaaaggaaatgtaatgtcctcctctgtatgcatcagtctttcctcacgaggttaatttccagtcagcatcagaaaaggttgagcatctctcaccttaaaaaaaaaagataatcttttaagacctcccttatccttatatttaccctccagctgccgttcttttccctgcacttttcaaaatactgtcttcatttccttagctttaacttctcacccaatttcaatctgactccatcctcaccactttacccagtggtcactccagttgtctttcttgacctctcagcagcattcatggttggcaacgtctccctcctaatgcagtgagtgtgaattgagtatttaatgtgttatgttctttatatgaattcctcatttaatcctttaacaactgtttgaggttgtcattccccattttacagatgaaaagctgaagcttagagaggctaagtaactggcttagctactagtaagtggtagagcaagggattaaattcaggccacatttaattctgctgcctttctgaaataacctactattctgggttttccttctctgtctctctttcatcttggttttctttgcagttccttcttctacctgatctttcaatttggagatttcccaggccttgatcctaggtcctcttttcactgctgtgaggcattcacacacacctatgacttcagttaccatgtggaaggtgatgagctctcagtatatatacatcttcagctcagaacggtttcaatatccacttgtctcctcagtacattcaaaccttagcttaaaatctgttcctctggccaggcgcagtggctcacgcctgtaatcccaacactttgggaggccaaggtgggtggattgcttgaggtcaggagttggagaccagcctgaccaacatggtaaaaccccatctctactaaaaatacaaaaattagccaggtgtggtgcatgcctgtaatcccagctactcgagagactgaggcaagagaatcgcttgaacccaggaggcggaggttgcagtgaaacaagatcatgccactgcactccagactgggtaacagagcaagactctgtctcaaaaaaaaaaaaatctgttcctcctatgttacttttttttttttttccactaaatggtacaaagccagctaagcagaaacctagggatcactgcaattcttccctctgctggttcccataaacaatcaccaggtcctgtttattgtgtcctgtgtctctctaaatcatcttcctccctaaggaaagctcccctgttcttagactgcatctacctaatatacattatcatagtaccctatacttctctttctctcttttgtaacattcttcatgattatattcattcagttatgttcatttttttatttctttagggtgaaattgttcatttctttagaaaagacatttaggcagagaccaaggcactcttatttattactgtatatcccagtggctagcagagtgcctggcatgtaagcagtattaaatactttgctgaatggaaattaaacaacaacaacaacaaaaagcctgctaagatttgttttaggaaaatccctgacaaataagaatgggcaatgtggagggtgaactcatggagacagcctttaaaacaatatttccaatagccgagccatagaagggagctaacaaattggcagtgggattaggagaaatagggtagttcgggatgtggaagtaagagaaagaaagggctgtcaagaatgcagcagatttttagctttggcagctgaggggatggtgacaccattccttgagaggatcagctaagatggagagagtatttgtggtggacttgttgactttgaagaacctcctgtaggccatctagatggagaaaatcaataggcagttagaaaaatggaaacggggaattcaggagatgcaggctttacctcatcaccgagcaaaaccagtaaaatactattagagattgaaatgtaactggataaaagtctgattattgagacttttgccattggcacagatctggtagatattttgatactttttaaattgggggtggatgttgtaaacatatacagagatgggatttttacattgatgtcattttacatgccgtaaatatttactaataatagctgtaaacctaccaatttattcttcatgttaaactagcaaatctcattttaattgtgttattttgttaatgctaatttataccttttttccttcttaaagataaaaacaaagctcagtggggtttatagaactccattagactgtaagctccattaggactcactgcatgtgatttaaatttttttcctcttatttctctagggcctattccctggtggattccagtcaagtgtctacatttctgatttccattcttcttatagtctatggtagtttcaggtaagatattctcaaatggggttgatataagttggaggtggaagaaggaagcattgctctgaaagtgctggtaccaaaacttactctgtgaagaaaaacaggacttcggcaggatttgactcagaatagagagttctgctatttgttctttaattggctgctgttaaacacttcttcattgtgcttatgagtttagcatgttaatgcttacatgtaaaaactaattgcttaaaatgctggttctgaaattaatcacctaatgcactctttattaagaaggttaaggagagagtctttgacaatgattctagagtctcaaagggaacaaagagtttaaatggaaggacaatttgaaatatgaaaaaaaaactactaaatatccatgtaataaaatgacaaagagaacatttcattttttttttctaaccaaaaatgaaagtgtagtcacaaaactttagtaggcttacgaagaccagggaaaccaaagtaaaactgtacccaggatgctaataaagttcttaatctttggccgggcacagtgccatatgcctataatcccagcactttgggaggctgagacaggaggattgcttgagcccaggagttcaagactagcctgggcaacatagcaagaccccgtctctacaaaaaatattttttaaagaagttagccaggcatggtggtagtgcctatggtcccagctactcaggagactgaggcagaagaaggatcacttaagcccaggagattgaggatacaataagctatgatcacactgctgcactccagcttgggcaacagagccagactatgtctcaaaaaaaaaaaaatttttttatgttgtcctaaaatgcttgtaagtaagtagattatgtccttatggaaatttacatcatatttttcttaatccaaaggcttgacatccaaggttgagccatacaaaattgctgatggttgactattaatattttggcccacagaaacaatttcatatggttcatcttactattaatagggttgtgccttgtagcattaccaggtattctctctgataaccttggagatgctgagactagatcctgctgaggttctcatctcagcaggcagccataggaataggagggaaaatatagacactagagacacactccctttttccactatcctcagtcgagaggaactttaatggttgtataactcaaatagtttagtggctgatgaacctaccagaaaatgctgctcaaggaattataagttgagaacttgaaaggaagtaatagggataagtgaaatacccaggcgtaaagatttttaactatgcagtgttatatctgaattttaatggctactttgtaaaatcacagacttgcagtctttacctcaatactgagtagaacaagtaaaatattacgggtaatttcagtatacaccgataaaaggttttttttggtgtttttttttttgagacggagtctcactctgttgcccaggctggagtgcagtagcatgatgtcagctcactgcaagctccacctcctgggtccacgccattcttctgtctcggcctcctgaatagctgggactacaggcgcccgccaccacgcctggctaattttttgtatttttagtagagatggggtttcaccgtgttagccaggatggtctctatctcctgaccttgtgatccaccggccttggcctgccaaagtgctgggattacaggcgtgagccactgcgcccagccaaaagtgttaatcactgagatgtctactgagaactccagattcataaccactctcagaagcattaatcaaaccagaggaacttagaaccttatcagtgtaatcttgatattttgcatctctaccctgtggacaagtattttatttttttccctttgagtatataatgcattaatatttcaaaggactttgcaattaaacacagaagaagccatctttagactcaaccctaatactactttcagtagtgcagactaccttccatttggcatatgtttgtatactgtatacattttcatagttgaaatcatttatattctgattctttgcaccagacaaatactttctacaaattatcttcatatcattttagtaatttgacatttcgttgtgttactcatcttattccactcttgttggacaagtggactgttacagtgatgatagctttatggagtatttgcttttattgaattatatcaccaagataaatatccagaagtggaaatacttcgacagagagtatgaaatggctcttactacatattactgtattgtttttctgaagggctatatcattttaggattgagcaagttttaaaccaaattttatgtaataagtgtatcatagaattatatagatggaaaggatttctctggtgaacctccctgtttacaaatgaggaaactggccaggcatggtccctctcacctgtaatcccagcactttgggaggctgaagcaggcagatgccctgagcccaggagttcaagaccaggctggacaacatggtgaaaccccatctaccaaatatgcaaaaattagctgggcatggcggcgctacctgggaggctgggaggaatgtttgagcccaggaggcggaggttgcagtgagcagtgatcataccattgcactccagcctgggtatcagagtgagaccctggttcaagaaaacaaaaaacaaaaaaaaaaaaaaaagaaaagaaactaagaaactgaagcccaaaatgaaaatgttgatgtaacttgacaaagattatgcaaccacttggtaacaaagtctggattgaaacagttttcaggacctccagctcagaaccttttatcttttataatttaataaggcatttctgcaaaaagtaaatcatgatgcctttaattatacatttaaattgaactcactgaataagttggtgttttttcctcttctgttttatggaagagatttatgtaattttgtctttaaatgtttgataggattcaccagtgaagccacctacagttgggcttctctttgtgggaagatatttttggtttttgtttttttcctgctgagtttaccacctttcccttgttctttttctttctctttttttctttttttttttttgagtcggagtttcgctcttgttgcccaggctggagtgcagtggcgcaatctctgctcaccacaacctccgcctcccaggctcaagcgattctcctgcctcagcctcccgagtagttgggattacaggcatatgccaccatgcccggctgatttttgtatttttagtagagatggtgtttctgcatgttggtcaggctggtctcgaactcctgacctcgtgatctgcccgcctcggcctcccaaagtgctgggattacaggcatgagccaccgagcccagcctcccgttttctttgtaattgttaggggctattttttttattgtggtaaaatatatataacataaaatgtaccatttaaaccattttttagtgtacccttcggtgacaggtaagggctttctgaaacgcattgtctttttattatagccattctagtagtaaggtgtgaagtggtatctcatagtggtttgggttgtatttccctgatattgggatgttggaaagttgatgagcatcttttcctgtgcttattaaccatccgtttatcttctttggtgaaatgtctagtcaaaaattctctctcagtcatatgatttgcaactataaatttttcccagtctctggcttgccttctcattttcttaatagtgtcccttggaatataaacattttaattttgttaaagccactttaccaatttcacgttttatggatcatgcttttgatgatgtgccaaaagcatgatccataaaatgtgaaactggtaaattggtacatgggtacaaggattttctcctatgttttctttctttctttctttcttttttttttttaatggagtctcgctctgtcgcccaggctggagtgcagtggtgtgatctcagctcgctgcaagctctgcctcccggcttcacgccattctcctgcctcagcctcccgagtagctggaactaggcacccgtcaccatgcccagctaattttttgtattttttagtagagacgtggtttcacagtgtttgccaagatggtctcgatctcctgacctcgtgatccacccacctcagcctcccaaaatactgggattacaggcgtgagccaccgcgcctggctctcctacgttttctttaagaagttttatagttttgcttcttacatttaaaattatgattcattttgagttaatttttatgtatggcatgaggtacaaatttaatttcatctttataaatgtggttatccacttgtcccagtaccatttgatgaaaagactatacttaccagttgaattaccttggcaccgttgtcaaaaatgcattgctgacatggtggcatgtacctgtaatcccagcgactcgcgagctaaggtgggaggatcacctgagccccaggtgtttggggttatggtgaactatgatcgcgccactgcactcaagccagggtgacatagcaagaccctgtctcttaaaaaaaaaaaaaaaatcgaccataaaagtaaagatagttattaggtctggtctgtatgtctcttcttatgccagtgccaatgttttgattgttgtcgcgtttaaagtaagtgttgttcttttacaaatttttctggctactctggatcctttgcatttccatataaattttaggttcagctggtcagtttctaccaaaaaaaaaaaaaaaaagcctgcagggatttcgataggcattgtgaatctatagatcagtttgaggaaaattgctatcttaatgatgttcacttccaatccatggatgtggaatgtgtctccgtttatttagatattctttaatttagatgttttagatattctttaatttctattaatagtgttttgtaattttcagtgtgcaaggcttgcactattttgttaaatttattcctaagtatttttttactttttgatgttatttttgatgaatttttttcttcattttggattgttcattgctaagtatatagaactacaattaatttttgtgtattgacctcaaatactgtagctttgctgaactcatttattagtgctggtagttttttgtctatgattccttagaattttctgcacataggatgatgtggtctgcaaataaaggcagttttgctgctgctttcaattctgaaagactttgtctttttccctttttctcccttattgtacagtgtcgaatagaagtgccaaaggcacacatccatccttgccctgttcctaatccttcagggaaagcatttcccattaagtatgtagttagttgtacatttttcataaatgccctttatcaggttgaagaaatttctcttatttctagtttgtggagagttttatcatgaatgggtattggattttatcatgtgttcttatgcttctattgagttgatcctgtggtttttgtccatttaatttatatagtatattttaacagctttattgagagataaataccataaagtttggtcacttaaagtatacaattcagtgggttttagtttatttacaaaattgttcagccgtcactgtaatccaattttagcacattatcatcccaaaagaaaatttgtaccagttagcagtcattcccattcctctttccctgcccgccagccctaggcaaccatgaatctaccttttatctctatagatttgcctattctggacctctcgtataagtggtgtcatacagtatgtgaccttttgttactggcttctttcacttagcatgtttttgaagtttatctgtgttgtagcatgttatcagtatttcattcctttttattactgaataatactttttgtttttccattcattggctgatagacgtttgggttgtttcccttttttggcttttatgaataatgttactgtgaacatttgtgtacaagtttctgtgcagacataacatatttattgccctcaagcagatacctagtagcagaattgctgggtctaatggtaactcttagtcttaacattttaagaaatgcttctgttttccaaggcagctatgctattgtacattcccactagcaatgtatgaggtttccaatttctccacttcttcaccaacacttgttattatctatctttatgattatagctattctactgttctggtgggtatgaagtggtatctcattataattttggtttgcattttcttaatgcctactgatgttgagcatcttttcatgtgcccatttgccatctatgtctcttctttggtgtcttttcaactcttctgtccatttttaaattgggttttctttttcttgttgaattttgagtgttctttctttattgtgaaaatgggtttttgttataagtgcctctgggtttgtcttttcactttctgtatgcttataattgttatctatttcttgacttttataaaatgttcctctttatctctagtaacagtttctgtcttaacattgtccaaaaaaggctatttagattttcttgagttagtttttggtcatttgtattataactcaagagtaactagttccttttttgtaaaggcaagcacctaccaatgctttcttaggtaatgagggcagttcatttacgtatacccaaacctactctaggaagacaacatcaggttagtaagcctgcagagatgctgagttctttaataagaactatacttgatatgattgtgatgcccttcattctaagtgcatataattgtagttagaccatggttcaccagaacaagtgtcactatggttcacaattgtcatgatgttctaattgtgtgtaatatgttgattaacttttgagctaccctttttgtcattccataactcgtcctacttgaagaaaacatcatacacagaagcctgaacttgttagatgacgtagggaatgattttgtccattgcagcgtgtgtagacaagtttttttatatatttaagaatttcatcaattcactattaaatgttcaatttataaaaccactgtaagttttctaggaacacatatttaacttaacctaactttaaccatgtaatgtttaccttgaaccagtgagtccccgcttcattgtactcactttcaatagtagaattatcaaaaaactttctttttaaaattttttataaattaaaattttattattttttcattttttcactcctttctggagctgagaaaaaaataatgttaaggttaaaaattccaatttgcttttctcctccagtaattcacagtgtcctcaggtatcagaatgcaaatggatgaacgagtataactttcaataaactgatctgctctcccctccattttgcttcctacaattgtttatttgtgctcttcactgcccgatttcagagcatgtactaacttttgcaagttacttcaaggaaaaataaaatggggccaaagaaaactaaaagtatgagtggagacaaaatagagccaaaaaagaaatgtaaaaatgcataccataatgccagcactcctgttactagtgtttcacaaggaccaccataagctttgtagcagccagatttaaaaagaaagaatgtaaaactcagcttccttccatcaaaagaactcagttgttcaggtgaatcgcaactgttcttggccttaagatcagacagacttttatcctaacgaccttcataaagaggatataatgttaagttcattcatctcacagtaggcattcaaataagtgtttgttgaatgaattgtagtaccttcaatataagttggtggcattgcatgaaaatgtatttcagcaaaagcagttttgccaaaattgaaggtgcacagtgggcaacaggatgttgttgtttagataaccatcttactgctaagtgtggtctaaggttatattttggaatatctggagaatgaatgggctgttaattcttaaactggttattcttgaatgttgatctgttaataaatattggtagcagaccaggcacggtggctcacgcttgtaatcccagcatgttcagaggccaaggtgggaggatcacgtgaggtcaggagttccaagaccagcctggccaacatggcgaaactccatctctactcaaaatacaaaaattagccaggcgtgttgatgcatgcctgtaatcccagctactcaggaggctgaggcaggagaatcgcttgaactgggaggcagaggttgcagtgagccgagattgcgccactgcactccagcctgggccacaaactgagactccatctcaaaaaggaaaaaaaaaaaaaatatatatatatatatatacacacacacacacacacatatatgtgtatatatatacatatatatgtatatatatacacacatacatacatacatacatatataaaagcagcagcccaaaaatgtattatgttgccagctaaatacagacctagttgtcttaacagcactcatggtgcattcgtatttttatcagaatgaaggaacctaatacctaaatataagcccatgtttccccttgtcctgaggcaggcagtggaagttcctaaaggcaggcctagaatcttcctcagaaaatcctttttaatccactctaggacataaagaaatgagtagttgatttcctaaagttctgttccttgcaactgaattaattctagcctgaaacaaatttagggcaaatataaccagatctctacctcagccacactaaaatcttattaaggcactcacagaatattaatatacttcttgatatagtgtctgtaataaacttcatgtgaaatgtacatcaaagtgaccaaaacaccaaactggaatttatacttacacccaatttaaagttgaagaatgttgatgagttgtcattctaactgacactaattagctgacagggtcagtggccatctggaccttacccagttcaaggctaaaccatatcattcacctataaagcctgctggtcttaatatttctctgtagtaagacagctcatgtgcagcttatctaaaaatgataccagatcaagtttacttggggagaaatactctgtaggtttttttgtttgtttgtttttatgagaaaaaagcagtatatactaatgtggaaagatgtagcgcgtcaagcagtgagcccattacttggtgtaacagggccaagggaaaacttcctctgtgccccctgaatcctcgctgaaaaatccactgacaaatagcagattaatagaaaaggcatacagatttgttaatgtgcacaaaagtcttacaaaatataagatctcaaaaaaaaaaaatggccagatggctgatgcttttataccaccttgaggttacagaaagaatgagggcttggagtgtggcaagacaggttatggtggtaaatcaggttatggtggtgagacagattatgagagagagagaagaggaggcccagctagcacaggtggtcctgtcatgtagatgaaacctcacaggtcgcagccctgagagagaatagatggaatatgtttctttctgaccttctaaggtgtcagactctcaattaatctttcctgtgtctggacaaggtagggcctcagagaaatgcctccacctcatcaatgcatattttctctacagatgcaaatctgccccacacagcttctctcagctattcttgtatttccagcccttctgaaaaccatctgaaatatgtcagagaagtatatttttgggtgaaatatttttgtttccttcataattttgccaaggcagcaggcataagctggaatttgtggtcaccccactcatggagtttttctgtgaatcaaaagaaaccttgcctgtaaagcacctaacagtgcctgacagtatgagctcaatcaagcttaactattatcatcattttaaccccctggatgttctcagctgctgagtcagagactgtttcttcctgcccaggttcttagtctttctttcttagtgtaggttctatgtaagtatcaataattggacatttgttgacctcctacaccttgacccataactacttcctgttcagtcatagttgatgaaaagacaaaaaaaaatagcatataatatgctataatttagatggattttttttctgtgatggtaaatggttgtctgtgatgaaaaagccatagctcaagtccttctgttgatcatttaaacattgatttctttttcttgttttgttttttgtttttttgttttgagaccgagtttcattcttttgcccagggtggagtgaagtggtgtgatctcagttcactgcaacctccacctcccgggttcaagcagttttcttacctcagccccctgagtagctgggattacaggtgtgcgccaccaggcccagctagcttttgtatttttagtagagacggggtttcaccatgttgtccaggctggtctcgaacttctaacctcaggtgatccaccagcctcagcctcctgaagtgctaggattacaagcatgaaccaccgcacctgacctaaacattgatttcagtacctagacttgcaaatagccaggatacaatttggatggaatgtatatttataacgttatattaacatcatattatgttactgtatagcaataacaagattgtgaaggcaggtcaagatggaagagaatgaagagtagtcttctgtgaagatgcagcgaactgttctaggtccaacctagcaatctgatgtctatgcacttaataaattaccaaataagctaagttaaaggcctataattgaaaatagtcctggatagctttggaggcagagtcttttgcaaaggctttatttaaacagcttaagtttgctgtcagctgtgcagtgtgagtaactttaccggaccccagtcatagtggcatgggatctgctaagcccaggccctttaagcttgttgtataaagctggaagatatgaatcttcccagcttgagctaataggtaaggccctactaactcactgtgccccatttctgttttgtgcagcggtgacccatggtctgcttctaacaaccaaacaaggcttgattttagctaagcttgtttgaggcagtgagaagttcaaagtcttctaattacacagagaactagaagaatgcttgctctccttaccagtcctccaccctcccccaccatctgatagtacctcattcctgcctaaggctttcctgtccctgctgcagttcttgtcagttagatgctaagaaaatggaccagctaaaactggtttgaagttgaccactactttctgctacagaagatccctagcttaccaacggtttgacttaatgatggttcaacttaagatttttccacttcatgatggtacaaaggcagtatgatttcagtagaaagcatacttcaagtacccatacaaccattctgtttttcactctcagtacagtattcagtaagttacttgaaatattcagcactttattacaaaacaggcctttgtgttagatgattttgcccaactgtaggctaatgtacgtgttctgagcacgtttaaggtaggctgggctaaactatgatgttcagtaggttagatgtatgaatattaaacgcattttgaacttgagatttttccacttacctgggcttattgggatataactccattgtaagtcaaggagcagctgtatttgaaaaaaggggaaaatcttgccttaaaacatccaggatggagttataaatagttctcaactaataacaaattgaaattgagttatataacccttcatcctgtcccgcggggggttctcagcacctattctcactaacccagtctcatgggagaggctccgtagcagctgtgcctagggttaaaccaaagagatgactggcaaccttccaatccagaatagcgatataatgccaacagaaaaagtaagagaagctggcaatctgtgtagccccaagggtagagatgtagataaaaattcctgcacatttaacctgctgtcaccagattctgagaagcagaatataacaagtgtagttattgttattccattcataagtgaatttgaaaaactcaatttaaattaatatatgtgtttccaaaacatgcccacagggaaggagcagtcttcatgttccattgactccagagacgttcccattaaatgcatcaccaaccctagagtttaggtcctgcacattgttagctctgctgtgcgaaaacatgaattaaagcttaaaagatcatagaagtgaaaccatgtactagaaactaccacaggtgcgttggcaggggaaatatatgcaaaatactacatctagtttgttgtggaactaattaggaaaaagtttttcaggagccagttgccatagctattcctctaagggtgactgaggtatgagcagtaagtgtacgttttaatctctgctaatgtgtcttcctctgatggctggagaaatatgtctcaaatactgtatatgaatcttctaaaatccaaggcttttttaaaataaaaaaacccccaggaaagccaacacatcagacacctgaccatatttcagaagaggagtcttaaccatgtttcagggagtccaccacatctaaaagtcgctgtgttttggtcctgctggggagctgtcacccactggggctgccctccagtggaacagtttgctaaacagttcgttggccagatttatatgagaacagggtgacatgtaactaaccagtctctacttcatagattatcctccccagaccccccattctaattgaggcttccttggtaccagtaacagagaagggagttttagtgaatgaaagtacaggaaacaagagtggcagctagagtcaggctgttagtagaggggcaagtctttcaaatccagtaagaaattttgagtcatagaggtgggaaactacgaagttaagatcattatcagtgtgacctgagcccagtcatttggttaagtttcttccaggaaggattatgacctacctcttcattataggataggatcctctgctttcctaaagaaagggatacaattcatcaatgttttggtacccccagggacatgaacaagaaattttaaaaggccttttccttcacttaaaaatctgtccagttcaggacctatttaaaagaactacctagagccacttgtacttccagccaagatagagaaacagagactgaattaccatcccacatgaaacaactttaaaaacaataaaaaaaacatgtaaaccctcataacacagcagttttcaagatatttttcatcagacaacaaaggacagtattcctgagagttgaggaatagttttcccgtcatacttattttcccgtcaaactatcttaagatagtttccactcatggtgcagagagaaagatttctgaagttgaagagatggaactgagagtccaaagagacggctagaggcagctagagttaatagaacagagtacaaaagaaaagagagctgcaaaatgaaaaaacccagagatctacacagaatccttgaacattcatcccaatttttttgtttgttgttttttgtttgtttgttttgagttggagtctcactctgtcatccaggctggagtgcagtggcacaatctcggctcactgccacctccgcctcccgggttcaagaaattctgcctcagcctcctgggtagctcggattacaggcacccaccaccacacctggctaatttttgtatttttggtagagacagggtttcaccatgttggccaggctggtctcgaactcctgacctcgtgattcgcccgcctcagcctctcaaagtgctgggattacaggcgtgaaccactgcacccaccctcaccacagtattaattagtgtatgcatatgtggaaatcatctaaagtggaggaaagaataatgtgaaaggattagaagggagagtacctgcttccaaaagcctgattggaaaaacttacaattcatttggcattggatagagtactcagatcttgcctcaatgatagagaataattaccctagactgagcactgcttcagacccacctaataaatcatggaaacaaaaataaagccaggtatctaacagcatccctgatcaaagctcaaaattaataggaataaaaaatatttagataaggtaaaattcacaatgtctagcatacgtgcagagatgaccagacaggcaaaaaaggaaaacatgacccaggatgaggaaaataatcagtcaatcaaaactgacccagaactgacacagatgttagtatgagcaaagtacatcaaaacagatataattgtattccatatatacaaaaagttagatagatacatggagattatttttattttatttttgagacagagttgctctgtcgtccaggctggagtgcagtggcgtgatctcagctcactgcaacctctgccttccgggttcaagcaattctcctgcctcagcctcccaagtagctgggactataggtttgtgccaccatgcctggctaatttttgtattttcagtagagacggggtttcaccatgttggccaggctggtttcaaactcctgtcgtcaagtgatccacccaccttagcctcccaaagtgctgggatcacagtcgtgaaccactgtgcctggccaacatggagattataaagaagaacgaaatcaaactttcagaaatgaagacaacaatgtctgagatgaaaaatacactggatgggattaacagcaattagaaactgcagaagaaaagattagtgaacttgaaggcacagtaatggaaattaatccaaaatgaagtacagaaaagaataatttttttaaacatgaaaagatcataatggagctatcattgaacattagagagaaacctccagtggcctactgtatgggtaatggagtccctgaaagaggagaagaaagggagggacagaataatacatgaagaaataatggccaagttttttctaaatttgataactataatctgcagattcaaaactgcagattataagcacaaaaaacatgaagaaaactacaccaagacacataatcagtagctcaaaatgagtggtaaaagaaaatccccaaggctgccagagggggcaaaaaagcatgttaggtacagaggagaaaagatgagggtgatgtcagatttgaaaatacaagtgaaaagtcaatgtaacggtagctttaaagtacaggaagaaaaaaactgtcactgtaagattctacagcaaaaatatcttttaaaaatgaaggcaaagtaaagatgtttttgacataccatacactacctgaaagaattcatctcatcaccagctgtcttacactaaaaaatgttaaaggaagtcttttgagcagaatgaaaatggtaccagccttaaatctgtatttacacaagggagttaagatcaccagaaatgaacatccatcgataaaagtttttttctatttacagttgtgtaaaagataattgactggagctgggcacagtggtgtgtacctgtaatcccagctacttggcaggttgaagcagaaggattgattgctcaagcccagatgtttgagaccagcctgggcaacatagcaagatgaatgaaagaatgaatgataattgacaacataaacaaacattatatattgtgaggtttataagataacatgtaagagttaaatgcatggccacagtagcacaaaggttgagggagggaaataaatataaactattgtaaggagtttatactatacatgaatgttacaatataactggaaggtagactgtgttaaagatgtatactatagaccctacagcagccactaaaattaaagagcaaagagttatagctcataggacaacaaaggagatcaaattggatcataaaaaatgctatattaatccaaacaaagtcaggttaaggggaaataaaataggacaagtaggaaacaaatagtaagatgataggctcaaacttaattgtatcactgatcacattcaatgaaattggtctacacacctctttaaaacagcagttgtccaggtgcagtgtctcacgcctctaatcccagcactttgggaggccagggcaggcggatcatgaggtcaggagttcgagaccagcctggccaacatagtgaaaccccgtctctactaaaaatacaaaaattagcagggtgtggtggcatgcgcctgtagtcccagctactcgggaggctgaggcaggagaattgcttgaacctgggaggcagaggttgcagtaagccaagactacactgctgcactccagcctgggtgacagattgagactctgtctcaaaaaaataaaaataaaaataaaacagcaattgtgaaattgaataaaaaagcaagacccaaatatatgctgcttacaagaagcacactataaagccaaaaaaggttaatccctgttgtctagtggttaggattaaaaaaaaaatagttaaaagtaaaaggttaggaaaagatatgctgcttatactcatctacagaaagctggaatggctgtattaatataagacaaagcagctttcagagtaaagaatactaccacagacaagaaggttattttgtaatgacaaaggggtcaattaagcaagagagcataacaatcacaaatgtttatgtatctaataaaagatcttcaaaatacatgaagcaaaaactgagagaactgcaaggagaaataaattcacaaatatagctgaagatttcagtaccactctcaataatagaataattaggcagaaaatcagtgaagatacagtggatttcaacaatactcttaatcaatttgacctaattgacatttatagaatgttccatccaacaacagaacacacgctctttctcaagtgtatgtggaatatttactaatgcagaccatatatggggacatgaaacaaatctcaatacatttaaaaggattcaggtatgaaatctgatctgcattagcccaggctgccatgaaatacccatagactgggtggcttaaacagcaaatttattttttcagagttctggagattggaattctcaggtcagggtgtcaacatggttagattctgttttccaaagtgtctgcaccagttcacattcccactagtagtgtatgaaggttccagttttacatccttgtgtccttgccaacacttagttatctgacttttttattatagccatcctgctatgtgtgaagtggtttctcatggtggtggttttgttttgaggagacagtgtctcactttgttgctcaggctggagtgcagtggtgccatcagccttgacctcctgggctcaagtgatctcctacctcagcctggcgagtagctgaaactgtaggcacatgccaccacacccagctaattcttttattttttatagagacagggtctcactgtgttgcccacatgggtctcaagtgagcctcttgcctcagcctctcaaagtgctgggattccaggcgtgagccaccgcttccagccagtttctcatggttttgacttgtatttccctgatgactaacggtgttgaacatcttttcatgggctcattggctatttgtgtatcttctttgaagaaatgtctcttcagatcctttgttcattttaaaatcaggttgtcttttttattattgaggtgtaagagttctttatatatcctagacacaagtcccttatcagatacatgatttgcaaagattttctcccatcctatgggttgtcttttgactttttggttagtgtcctttgaagcacgtaagttttttaagtttttctctgttttttagcatcatatctaagaatctactccaaatccaaggtcacagagatttaccatgtgtttttatctaaaagctgtatagttttagaagtcagttcctctgtcctaccagccacatttcagtgatcacatgatgtggctgatgtccacagcacttgtcagtgcagataaagaccatcataacagaaagttcttttgcaaaaaaacaactttttttttttttttttttttttgagacagtctcactctgttgccaggccggagtgcagtggcgcaatcttggctcactgcaacctctgcctcctggggtcaagcaattatcctgcctcagcctcccaagtagctggaactaccggcacgcaccaccacgcccagcaaatttttgtatttttagtagaaacggggtttcaccatgttggccaggatggtctcgatcttctgacctcgtgatctgcccgcctggggctcccaaagtgctgggattacaggcgtgagccactgcacccacaaacaccttctttacaggaaaacactagcagaaaattagctaagaacttggacagatacttcacaaaaaaaagaaagaaatgagcaagcttttgtacacaacattattcactggttaaagaattctaaatcaaagtgacgtgccatttttagttccccagatagacagtgactacttccttcaggtcttgactctgaagtcactgtcagtgaggccttcctgttcatcctgtctaaaatttcaaaccctaacccctgcatttcctagttttcctccttagcacctgccatgaacacgctatgtattgaacttatttttctggtctattacgtctccccccttgaatataaaatccagtcttgtgtttgctatttattgtccctgtagtacctagaacagttccagatatagaagacactcaaattttttttgttgttgaatcacagctgacagggtatagggaaatgagtgctctcatacactgctgagagagtgaactgatgcagcctttttgcgaacagttgtgtggtatgtaaaagtctcaaaatgtgcttgccctttgacatttctccttctaggcttttatcataaggaagtaattaaggatatgatatgctcagagataggagtggaagattcagctgcattgggatgctttcatctgcagtcaggaaaactcttgaactgacacattggaaggactgaagattgttttttaaaatgttacaagagctatttttcagagttgttcaaaagagaccttctttcctaattccttggcatttaaaaatattgtcatatgacttttctgaccttcttttgtaagcaaaactacaacttaactacaaaatttttttccacaggtcccttaatatggactttgaaaatcaagataaggagaaagacagtaatagttcttctgggtctttcaatggcaacagcaccaataatagtaagatattttatgtcaattaacttctgtacatatagttttcttaatttggctgtttctatacctccagttaataatttactgggttcaaggatttatgattggtataaaaaaacattgaattatacttaaaatgagtgaattttacggtatgtaattgtacctcaataacgttaataaaaatgtttgatgcttatagaaagatttgaatttgaagtgacttgatttgataatattaatacatttatattgagatctgccatgtactcaacattctgttagatcttttgaaagatgcaaaagtacaagagaaatttttgccaagatgttctttaaaaagtgccaagatatccaggcgcagtgtctcccacctgtaattccagcactttgggaggccaaggtaggcagatcacttgaggttgggagttcaagatcagcttgaccaacatggagaaaccctatctactaaaaatacaaaattagccaggtgtggtggcgcatgcctctaattccagctactactgaggctgaggcaggagaatcgcttgaacccaggaggcagaggctgcagtgagccgagatcgtgccattgcactccagcctgggcaacaagagcgaaactccgtctcaaaaaaaaaaaaaagtgccaagatagagagggcaaatacctcttcacctcctatatatggggcaagtaccttttttcggtgaccctcaccatagcctcagaatccctctgaacatagagctattatcagaggaagctctacagatgaaatcattttgatatccatgtagaaagagcataaagagacccgcaagtcaggtgagcagcaatgggtcagataaggtttctttacaagagaaggtgggtttgacttagtgaatgtggattggtggagaagtcgtcatttcaggttaggggaacatataataacaggcacagagatcacgacctatagaacagggtaaggtcgccacctaagagagaggaaatgctagagatctaattaaaaggtagatcaaatattgattggaggaccatggatgttaaattgaaaagagatcacttattgtgtatcttagtttctccagttattatagcacgctgtcaacctagttgtatttgcccagttttcaccgggcacagacccagtcacatgggtttcattgtccctggcagtgccaaagtgggcatgataaagacggtaagtcgactcatttaaatataatgagtcttttcttaaatttatgacatggatccttgtatgatataaaattccataccagtagttattactagtgcaaggaaccacataaaacctggtgcaaaatctgatttttagattaaattattacatagcagcttatcttctgtcaacattttaagccaaatcagtttatactcctgaaactctttttaaaagtcctgtattatgtagcacatatgcaagtgatgttcttaaaccaaattataaatctgctgtacattgcatcacagaaacctaaagaaatctacctatattattatgtctaagtttacctcaaaaacaaacaaaaacaagaaatggttgtgccagtccgtacagtggaaagaagttacctggtaatacagctcttttttttttttttttttttttttttgagacggagtcttgctctgtcattcaggctggagtgcaatgacgtgatctcagctcactgcaacctctgtcacctgggttcaggcaattctccagcctcagcccctggggtagctgggattacaggcgctcgccaccatgcctggctaatttttgtatttttagtagagatggggtttcacagtgttggccaggctggtctcaaactcctgatctcaagtgatccatccacttcggccttccaaagtgctgggattataggcatgagccactgcacccagccaacataagcttttttattttttgttcatgaagcacagtctaaagagtggtagaatacttcttttttaaatgctttttttctttttttttttgagacagagtctcactgtcacccaggctggagtgcagaggtgcagtctctgctgactgcatcctccgcctcccgggttcaagtgattctcctgcctctgcctcccgagtagctgggattacaggcacccaccaccacacctggctaatttttgtatttttagtagagatggggtttcaccatgttgccctggctggtcttgaactcctgacctcaagtgatcctccagtgttggcctcccaaagtgctgggattataggcatgagccactgcacccaacctaaatggtctttcttaactctgccagctatgttgtactaaattatccttgacaacatttcttcagtgcctgctctgagcagtggatgccaataggataaggacagattagcatagactgcaaaattcacttcctcaaagaagaacataatgaagaagccattacaaagacggccgaccagtacttgattatggaatataaaattattacagattgaaaggatgacatggaaaacaggatgaatttatcaagaatcaaagaaataatagccagaaagatgaacagagaaacagagaggtgtaggtgctaaggagatggaagtcctggatgattaacaatgtggaacaattggggagaaggttttgagaaaaagaaagtataaatttagtgttaagattttgtcaggagtgtttcagactgattgaaggagacagtaatcagaagtttttaaaagattgtagctgcccactcccaaaataataagaaacaaggaatttgtaaagagataggagagcaggagaagttgtaggtgtagccagcatcattggtggggtacgtgggtgaagggttactcttacgattacatgctttgaatatgtcagaaatgatttgactgtccttgattataataggagctaggagaaggagaagcattaagtgagactcaacagagggttagatgggccatgtgactcatgccccaaaaaatcagaacttaaaaatggagaaatcagtttgtaattgaaagtttctcgctgcagggtgccctagggtatttgaccaaaagactgggtaattattacttcagattataataatgttccacctatctgggcaactcgaaacacatggaagtaagaggaagagttgatcaggcctgccaggaactatggcactcaactcattagaaagcagaaaagtaaaagtgaagacagtaatgaaaaagcactacatgcccaccaccagaatagctaaaattaaaaaccttgaccattcccagtgctgatgaggatgcacagcaacagcaaagagccctcttgcgttactggagagcatgcgttagcacagtcactttggaaggcagtttgacattttacctactaaaggtgacagtataaatacccttggacccagcagtgtcactcctagttatatatccagcaaatacagtcacatgtgcatcaagtcatgtgcaagagtgcctagagcagcagcatttgtaataaccaaaaaattggaaacaacccaaatgtcaaccgtagaatggataaattttactgtattcatacagtgaaaacaagtgaactgctgtagctacataaaacagcatggataattctcacaaatcatattgagtcaaagaagccagacacaaaaaaataactacataactcaatgcatataaaatttaggaaacaggcaaactagtatttaaggatgcgtgcttgggtggaaaacgtgtcataaaagtcaggatagcggttcccttcaggagaatgagagagagagagaaagtagtgattgagagggacacaaaggaagatttctggggttggtttgtttcttgacttgagtggtattaaatatgtaataattcatttttgtgcttttctgggtgtgatgcttcaccataaaaaaggttagaaagtgacaggagtgagggtggagggcaagagttccctccaggtcctctgatttcccctgaccttgttctaacttctctgcctgcccccaagaagccaatatagaaatttattttcccatggcacatcagtccttcatttaagtagtattaagtggaattttaaaaagccatgtacacccctgcccaattatctgacatcttaaagacttttactaaacttcagttataatttatttgagttataaagattgatggagatgtatagttgggatcctcatctttagtagaggtatacatcttaatcttcttgcttagattgtaaacttcatgagatctggaaatgactttcttttaatccctcctgttgcttactatataataagtgttcagcaaatagtcaaaagcatcgttcttacagggaggtgtaaaatcagtaattttcttaatagttattggttttattgctcagtgtctattccataccagacgtacatttagcctgtagccatgttcattgaatgttaaaaatgatgttgctgtacaaaatttttaattccattaccaagcctatttcctatgttgatttttgccttaaagataatgcaactgcacttgcatatgtcctcctaattatggctagtctgttttgctttgctcagttttgctttgtttttaagttactggagtttggctaaaatttctaattaattacctctttctttcccattcaagacctttatctccagaactttaggaaatggagtactgaagtcatggacattgttttaggtagcatattgtcaggaactaaaggcgctttacttgccctgtgacatcgcctcctggttcaaaaatctgtggtttaaaaaaaaaaaaatctgtgcattctatctaatacgccagaaaggtcctttgtattcagtttcgcatgtaattgcagactgaacttttaaaatttagctttattataaacaaatgcatctcttatatacctcaccactacagtctttattctagctagccatttaattttctcttcatactttgaatcagtataatctgtctatagactccctgatgctttgttcctatgataaagttatttatctgagaaacattattttctgtagtgaaaggcactgaaaatctgtagcttcctctagctgttctttgaactactgtagagcacttacatttaaaaactatttaggtaaaatttagttagagatttcatagagttttgtctaatggatacacttcccgaagtgatccttgggccaagctgaatggatttgactagggtcaggacagactgcttccaagataatttctgtttgtcatgacacatagttcacttttcctaaattgaattgtcctattcctaagtgaattacttcactcatctgcctagtccctgagaagcattttgttttatagatttagtcaatcaaaaaccctaaataactcttttggggacaggcaaatttaaatacctaagagaaattttgttgatcattgtaaccctttgtgtcttgctatgtttatcctggttacatattttatttgtagccttaatataatgaagagacctttccttttttttttttttttttgccttggactcctgggctcaagtgatcctcccacttcagcctcccaagtagctggaactacaggctcaagataacatgcctaatttttttttttttttaattttctgtagagatagggtctccttagtttgcccaggctggtcttgaactcctggcctcaagtgatcctcctgcctcagcctttcaaagtgctgggattacaggcatgagccaccacacccagcctttttcttctattatttcattattatagatcatatgaagatttctttgattccttttgtgcgcttttatgacatctcaatagagttaatttggaagtgagacaagataaaactggtaattttttttttcattcagtggttattagagtttgccatgttttccttctctaccaaaaatactctattaatggttctcaaccctagatgcaaaatacagttttgtgaggagcttttagctgggcctaactcctgtgatttcatttaatttgtctgggattggacctgggctttgtaatttttttaaagctctaatgggaagccaagaattgagaacccttgcgctaaatcctactctagcccaagagattattttcccgtattcatctcctattctggtaccttaaaatgttcccataaaataaatttttttttttgtaaatattaatagatagaaacgggggtctcgctgtgttgcccaggctggtcttgaactcctggtcccaagccatccttccacttcagcctcccaaagtcctgggattacaggcgtgagctaccacatctggccaaataaaatttttctgatttgctgttttcagctatgacttgttgtcctccttctcccccatcagccaagtcagttctcaactattagcaacaacgagaaagagtgaaaatgagtaccttaaacccacaggtgatgagaagtccttttagtcaatgggtttaaaccacctcttttaccaaacctatattcaagaccacaaatttacccaaatggactaatctgggtttttactacctcttaatgttctcggtggtggtttggatcctgtcatccagatggttaacaccaggaggtagtagttcacttcaacaaatattcctgagtgtctgctgtaatgaaaggcaccatgaagagaacaaggagctcataatctcgttgggaaagaaagactcatagggcctggataatccatgtcctacgtataatccgtagaactgtctgcatttttgcaagttaatgtatatgaagtgcataggcacagtgcctggtgcataataagttattaatctgtctgtttttctctttcaggcatccaaacaattgactctacccaggctctgttccttccaattggagcatctgtctctcttttagtaatgttcttcttctttgactcagttcaagtagtttttacaatatgtacagcaggtaaatatgagtttctctgtctagtcttaacatactaaaaggaaaatttttcacctttatcattgttcaaaaattaagatttatataccatgtcatgtaagtttttccttataaatcttggcttcgccttctccgtctcaaccacgccacccttccccaactcctccttgaacctcttgatccacgtcatctgttgagacctgcccacacaatctgaaagaaaggctggagacgtcaaagtgcaggaattctatgacaccagagcagtattgctgtgctttggctgtggcgctttttctagattaccagaaggttgagcttggcatagaggccattgtcagcctctacccacgttcttgcaggtagaaacatggatagctaatcaaagtgattggactgtcagctctttgatgtgttttcaagctaagtattgatggaaatgtaaaaaaaaatcggcaaaatgctacaagacttgttaggaggtcatcccctggcctgctgtttatcttttagaaaacttacctatgctttcccctacttcaaatcaggtacttttttttaataatgaagagattttttgtgcagtattaaaggaagacatttttcttctctagtcaattaaccgtatccacttgtctagtgtttggcggaatgaagtttctataagtcatgccatttttcttataattgttttaaaaaattataccttttctttctctagttcttgcaacgatagcttttgcttttcttctcctcccgatgtgccagtatttaacaagaccctgctcacctcagaacaagtaaggacttgggactttcctcttaaattataaacttgtatatatttttctgtcatatttgatagcattattaggattctcaatttctgttattggctggagcacagaaatgccaaaagaccaggaagtgacacatttgatctttaaagccagaagctagtacttccttttgtaccttctcatgtcagaggaaatacaaacaaaacttaggaagtctgagtcattgtaatgtgcttcctacttagatcattgaaagatgagcagttttcttttgaaacggtgctttcattcctttactgtgagttgatgaaatatgagaatagtggttgaactcaaacgttcttctttgcctttggtcttcggtggcctagatatgctacctacttgcgtttaatcctagtgttcacaccttaactctgaaagtcattgctgcacggaaacaaaattctgtgctaatggagatgctgaacgcacttaggaaaccagtcattggtggcagctgatgctcgcaggaattagtgataaccaaaagatttacaatcttctaaatagagtgataccatctttggtaaatgagttgaattgttggcatttcttcattttgttttcctcataagaatagaatttcctccatacttattagcttttccagaggtcaatattatcacttcaaacttctaaatgcccatgttgataattggtcccaaaaagacattatcagttggtgcagaagtatattcctgtgagctttccataggtttctccaaaaaaggattgggtattttggatttccagctatcttggtattatctgctattctaatccagccatcacgaaataccaaaggagaatttggttactgaataaagtgtgcccactgtccaataagtgttgtgtgttttccaggatttcctttggttgctgtggacgtttcactgctgctgagttgctgtcattctctctgtctgtcatgctcgtcctcatctgggttctcactggccattggcttctcatggatggtgagtgactaatttgtgacaaattgtaattttactttatagagttttatagatactttaggatattcacagagctgtacaaccatcactacaataaacttttagagcattttcacacccacccccgccaaaacaaatgagcggtcattccccttacccacctccccagccccaggtatccactagtctctactttctgtttctatggatttctccattctggacattttccataaatggaatcatacattatgtggccttttgtgtctgacttgtttcacttagcatgttttcaaggttcatctgtgttgtaacctgtatcagcacttcctttttatggctgaatactgttccattgtatggatacactaattttatttattcgtttaccggttgtttccactttttaggctattatgaatgatgcttctttgaatattaatgtacaagtttttgtgcagactatgcttttttatataaatggaagcttcgcacaatggctcatgcctgtaatcccagcacattgggaggctgaggcaggaggatcacttgagaccaagagttcaagaccagtctggacaacatagcaagatcccatttctacaaaaataaaaatcatctgggcatggtacacctgcagtcccagctacttgggaggctgaggcgggaggatcccttgagcccaggagttcaagattacagagagctatgatcatgctactgcactccagcctcagcaacagagtgagaccctgtctctttaaaaagtaacaataagggctgggcattgtggttcatgcctgtaatgggaggctgaggcaggcggatcacaaggtcaggagatcaagaccatcctggctaaaatggctaaaatggtgagaccccgtctctactaaaaatacaaaaaattagctgggagtggtggtaggcacctgtagtcccagctactcgggaggctgaggcaggagaactccggaggtgtgaacccgggaggcggagcttgcagtgagccaagatcgagccactgcactccggcctgggcaacagagcaagactccgtctcaaaaaaaaaaaaaaaaaaacaaaaaaaaaaaacgtaacaataaggagatgggattagactgtaatataatgcatcatattatgctctatattatatatgtagtatatgtaatataacatgttatatataacctgcattatgtacgtgatatacatcatacactttaatgatataaatacatgtctatatcattacataaaagtatatcatatcctttttaataactccagagtattaaggatgaatacctagacatgaaattcctagaacagaattcttgcattaaaaaaatctatacctattattatattgcctttcagataggctatagtagtttatactccaacctgtagcatatgagaatttctcttcattgatgataaggatgaagtaataatgacaataatacctaggatgaatggagtgctttttattgattaggcagtctgctaggtgctttacatggatcatctcttttaatcctcagaacaactctttgaagtaggtactgctgtttgtttccattttcaaaagagtaaacaaaggttcagagaactagctcatcccagccacagaccccttatatagaattcatacttaccaccaaagcatcttggaggctgtttctgaaaatcacccataattttcctggtttttcccttaaaacctttttttgggggagggagtttcgcttttgttgcccaggctggagtgcaatggtgtgatcttggctcgctgcagccttcgtctcccggattccaactattctgcctcagcctcccaagtagctgggattgtgggcacacgccaccatgcccagctaatttttgttttttttttttttttaatttttgtattttttagtagagacggggtttcaccatgttggtcaggctagtctcgaacccctgacctcaggtgatccacccgcctcagcctcccaaagttctgggattacaggcgtgagccaccacgcccagctttttttttttttttttttaaatagagacagggtgtcttcatgttgcccaggctggtcttgaactcctggacccaggcgatcctcccgcctcggcctcccaaagtgcacaggcatgagccactgtgcctggcctcccccagctttttttgttttgtttggagacagggccttactctgttgctcaggctggagtgcagtggcatgatcagtgcttacccaactcttgaactcaagcagtcctcccacctctgcctctcaagtacacagacacaagccaccatacccagacaattttttttattattattttatagagatgggtctcactatgttacccaggctggtcttgaactcctggcctcaagcagtcctcccaaagtgctgggatggggccagtgcattggctcccagcactttgagaggccaggatgggaggattgcttgaggcgaggagttcaagaccagcctgggcaacatagtgagactgcatctctacaaagcactgggattacaagcatgtactgagccacgaggcccagccccttgagatgtttttaaacttttcttttaaaccgtatcattctgtttccacttctttttttttttttgagatggagtctcactctgttgcccaggctggagtccagtggcacgatctcagctcactgcaacctccgcctcctaggttcaagtgattctcctgcctcagcctcctgagtaactgggattacaggtgcccaccaccacaccttgctaatttttttttttttttttttttttttttttttgggatttttagtagagacaaggtttcgccacgttggccaggctggtcttgaactcctgacctcaggtgatccacccgcctcagcctcccaaggtgctgggattacaggcgtgagcccaccgcagctggccttcacttcctttatatgcagtccttacatttccacagttcacttttgtaatctcaaaaaatttttatctaactgctctgccccacaaagtaaaattctttaaaaggggttgtgaactatcaccttttcctttcttttggtggttccaaagagaagaaggttaaaatataaagacagtcaattttatactacttgtaattccaaagaatttttaagggaagaatttgaaaatctggggtacaggtatggattgcatctattcctgttacctactccaaataaccacaaagctactccagactttggagacagagttctttggaaccagtgccaggtctgggaggctcctctgcactccaccaggcagtgtttccctgcagctctggggctggctcagaggtgttggggttgatgttcatcattgtctgagcccagagccacccagagtgatgcttactgtcactgcctcaagtttggagtagctaagttagtcaaacagtttctaagtactgatcttataggctatatatactttgtatgactgatcttaagtttgctgcatagtatttggtccattgtttggggtttttatttttaatttgttttagagaaaggttcttgctctgttgtccaggctgcaatatggtaacatgatcctaactcactgtgacctcaagctcctgggcttaagtaattgtttggatttttttttagaagacatttgcatcaaatatatgaattaactcaaaaccaaggatgttctggtcaatttggatagaatttgacaaaaatgattgtattttttttctggatccagaatcagaatcatcttaataagaaagaaattttaaactttaaggaaaacaaaaaacttgtccttctgcatctaggaattttttttcttcgtaagtgactttgaccagtacaatgatttgaatgtctgtgtgtcaagttagttagtaaagtgtcataagaaactgagtattctgtggaaataaactagcaagtggattgcaaattgtaaagcatacaaatataagttatacttacaattttaaaatacatttgttaaaaagacaagattatagtgatggagaacagctcagtggttggcagggtttgtgtggaggagtagggtgactataaagaaaaaacaggggttttgggggtgatgtgaccattctctatgctgagcatggtggtgactctgtaaatgcatgtgggaactttcatagaactgctacatctaaagagaaactgtcaattttactgttcaggccgggcgcggtggctcatgcttgtaatcccagcactttgggaggctgaggcaggcgcatcacctgaggtcaggagttcgagaccagcctggccaacatggtgaaaccccgtctctactaaaagttcaaaaattagccaggtgtggtggtgtgcgcctgtaatcccagctactcagaatggtgagacaggagaatcgcttcaacccaggaggtggaggttgcagtgagccgagatcacaccactgcactccagcctgggcaacagagtaagactccatctcaaaaaaaaaaaaaaaaaaaaaaaaaattgtttttcagtcattttggaaataaaatgttaaatatgtttttattttttacaaatatgtaaatctgttttcatagtagttattcaatgctttttttgagtgtctaccatataccaagctattaaaacagttccttgagtttgcagaccaagttaccctctagactatacagacctttgatgacgcagacaggaaaggcaaagtcaaaatcacccgtgcccgtctgtgtagtaattcacctttgctgattctgacaggtttggtcatttgtttagcatcttgtattcccttataaaaacatgtgctgtgattgtttgcttcagtactagagaacccactatgcatataagcagtctgaagtgcaatggctaccagacctgatttcccaaatcaagtattaattagtgctttcagtagcttgtgatttgtgttacgatacttcagtgcttccggaagttgatgacattgcattcaaagtaatacagcaagttgcttgcccagcttatggtaaaagggtggtatggtaaaagggtgggtaagtgctgattctataaggactagttattattaagagtgataaagtgacagctatgtgcattagacttttccggagagtagcatttgttgaattctgcaaacaataatttgttaacttaaagtagggaagaagtgatgcatgtataaacagagcatatagggaattctgaaaaactttagtaaaacctaatcttttaaaaatatgtgttatacaatattaaggaatcttgatcatgataattattggggcacagagaataaattttagtccaaatcaatctcatagcttcttttatgagtatatcccttaaatcttacctagtccagtggcttcctgatgaggaaacaggcagatgtttctcctgctgttacttctgaacagaaactatttagaaattccagttagttggttagaatctaaaccagattttttcagtgcatgtaagttggctgtttggatgactgtgaaccacatattcctaagagagactgttttatgatggtgtctttaaatgacagattgagaggccacccccataatgatacacttaaatccacctaaacaaatgtggaatgagacaatgaaagcaccaggtgctactggtttaaagtaatgtaaagcagtaatcacctaagcaggatgattagtttcaatgctagcagatgcaaagcccatattatgacaaatgatattttaactaccttgaagtctcagtccccaatgtggtctgagtttctcagtaatcccactgctaactttttgatggctctcctttcttgaacctctttattcacatgtccagacacacatgatactatttacatgttttgctgagggtttaaaagtgcttagtaagccgctgacccaaaaaagatgagctgtttctcaaaacaataagcagtgtggtctttctacccttagctctgtcctatcttagcattgcagagaacagaaaaaatgcctgtttactaatagtatgttaccaaaaaaaaaaagttcagcatggtggaaggtgacattcttttcacagccattggaaacatacactttagagcaagtcgggagaattttattcgttgtacttctgcagacaggtctggaatgggtttatcagactcactaaaggaggaatggggtgagcacctctctgtaagacatactaaagggtctgttttacaatgcgagtcccttcctctagactgtacagttgacagaaaattggccataaagaacaaacttttttccccagtggccgctatcagaagtacatttccattggaaaattcacttcatagttgaaaagttttgctgaatgttcagtgaggctccccgaaaccctaattagaattttaccacatttttctgtcattattgcagtttcccagtattacttatccacagatctcttcttcctgccagtttgcactggttgaaacgcccttgtgaccaaggatggaatttttcctcaaagagagcctttgagcttttcgtttgtttctcagactagtgtttgacttgttttctgctgtcacagtagtctggctttctagccatgttgtgtaatacactgtagtgtcttgctctctgctgtgaatattatctttcagacttctctgcagaatctgaaatcatcttgtaagcagtgatatttggtggctgggttttttttttaattagtgtttcttaactgaagtctgttctttgaagttaatttagagtgaaaacaggataataaattattttcagggctacactaagaagtattaacattaagaatggacttcgggattttcccgaactgaagtctagggctgttttatctactctcagtttcatctggcaaattaacctttcaaatttgggaagacttgaaagagttggacctatgggtgatggtatgttagctaaaagctgatgaatattgagtacacacccctagtgatcaaggatcatagaacctggtttacagtctatcccctgcctagttcagggactaacagaatcttgacagatgtctgattcagtcccctcgttttatagcaattgctactaacctatgattagaacatgtttagggccagaaatctaacaattgatattttgttttaaaatgctacactcaaccgggcacggtggctcacacctgtaatcccaactctttgggaggcgaaggtgggcagatcagttgaggtcaggagttggagaccagcctggccaacatggtgaaaccccatctctactaaaaataaaaaaattaaccaaggtgtgctggcatgcacctgtagtcccagctacttgggaggctgaggcaggagaatcacttgaacctggaaggcaggggttgcagtgagctgagattgcaccactgcactccaacctgggcaacagagtgagactctgcctctaaataaataaataaataaaatgctacactcttggtgcgctgactccacatagggcatagatatctagagagcctgtatcgcgaatgtgagcactgcttagaaaccttacaggttatgtcatcctcgtagagaacatttgagctcggtttggtgtcactgtctttgtccctgactcactggttgtagaagacaatgtaatacagagatatcagtgataaattgaaaataactctagctaaatggctaagattaatcatttacttcccccaacacttttggttaatgtacatttaaccaaaagttaagtgtgttggtaaacctataagagagagtctcaggagtgtctaaagccgcaagggaaagagagcacctcccttcactttagccttgaaaagccctgaggaggaggtaagattttttaagggttacttgaatgacagaatgaaaggcaggcaaactagattgagagcatgttctgggaatacgacattgcttgtggcagtattcgctgggtcagagtggtatttattccacatgcctctaagagccttctctgagacagtcaaaaggatgccttctgcctcttcatacacggaacttagactagagtggggaggacctagatggtctaattggaaagagggtgttcagcttaacgcagatggagagaagggataggctgaggaataggaacccgttcagacagatgccaaggcagagccagcatggtgctcagctccactctgtggaggttgtgcctcctgagtttatgcaactttataattagacttgattcgtcatagagaagggaacctggtgaccttcaggcaggaaattatgtgaacagatgtttgacagtggcagtgaacagtacatgggaaagagtaagagggagggagggaaaggagacacagcaaagtaggaagtgggtggaggtgtgagcaaggtctgcagtaacagtaaaggataacacctcagaatggctgcagatttcatgtgtatgatgagaggctgtgatgtgttgaagatgaacccagactttcttatttggaaggttaggatagaatgacactgtctggagtcatggaaaacccagtcactgagcagtctgttccatgtttagtttagacgcaggtggaggaggattagcatgagatgaatgacaaagcagcaggtggatgctcagaccttgtgacctttcaaggctcctgcgcagttaggatgaagtgattctatggcaaattgagtacaaaagttcaggaagggccagacgcggcggcccatgcctgtaatcccagcacttcgggaggctgaggcaggtggatcacctgaagttagtagttcaagaccagcctgaccaatatggtgaaaccccatctctattaaaaatgcaaaaattagttgggcatggtggcgggcgctggtagtcacttgagagtcacttgaacctgggaggcacaggttgccgtgagccaagcttgtgccactgcactcagcgtgggcgacagagcaagactccatctccaaaaagaaaaggtcaggaagggacaggtcgtctacatgtgtcacagaggcgaataaacttaccccgaggagcctggcctcttgcttctctgttcagtctgtttccctgccccgcttttggttactggtgagctgcatcattcagtcctctgaccctcactccccgcagactcctgtctcccgtctgtccatcctaggccttctgttactttcttcgtgcccttgatgccttgcattccatgtattcacctgtaagtccatgaacagatcaccctagccagtatctatacacaaacctgtgtctcacctgtgctctggcccgatgggcttcccacctgctgctgaccactgttgttcctccagccagatgagctgctccctggtaatgtcctggttattgactcatgacacaaccaaatctttgtttcctaaagatgatgatcatgggaggtcctgtcctttcaaatatgcgtgtgagttgatcagagcaggggctctgggtacatctctcagtgtcctaaacatcatgtttcagtcatccctttgcagctctgaatgctctgagctttgtcaagcctcactgactaatacatttcattaggttcatttcaaatgacatgcatttgtatacattttaccaggttggttgtatgaatttatttaaaaattaaaggagaccttagtataataaacattctatatgattataaagtcaggaattagatcttgaccacatctctccagaactcacactgcagctcaccctgtaactcagtgagcgcttgataacagtgatgatagtggagatgaagatatatattttgctcttcctaggttgaatactgtctttccaactcctctgagttgtagggatgaggcagctttttctcctctgtgtttatattagcaccgtgcacacagtaggaacccatgaaacagtaatttagttgatgtgtccagggtctgccaagctgctgtatttatccactttattacatatattgacaatttaccaccagttctatgaaaatgaaatatatctgttcatatggctttttactttccttagaataatttgaaatttgaagttaatagaacacagttttgcattcattcagcaagtatttattgaatgtctactctgtcaagtgctagggatccacagaaagaatcagacatggtttctgtttcccaggagcacgtggtcagctagcacagggaataaacttaccagtatgtaaatattcacaaggtcatagaatggatgagtgagttgagagacattcaacgttctatggcacatcacatagaagaagcaactgggccgggcgcggtggctcatgcctgtaatcccagcactttgggaggccggggtgggtggatcacctgaggtcaggagtttgagaccagcctgaccaacatggtgaaaccctgtctctactaaaaatgcaaaaattagctgggtgtggtgatggatgcctgtaatcccagctactcgggaggctgagacaggagaatcacttgaacccaggaggtggaagctgcagtaagctgagattgcaccattgtactgcagcctgggcaacgagcaaaactctgtctcaaaaaaacaaaaaaagagcagcagcaactgactggttggatcaggaaagactctgagaaaggactcctgacctggctcttccagaatgaggatggattttccatatgaaggagccgggggcaggaccttctgggtagagcgtgaaaagaacacagtatgtgtggagagcgggaaattgtgttgaactgtctagaaaacagagccacaggaatgcgtgttgagggcttgggctgtacagtggagagtgccctccctggccagggagttggacattcatcccaccacaagaccccatgaagagtttctcaacagctctgtgtcctcatcaaacctgtgtttgcagaacagtggaggaagagagctgaaggaggggagaggccctgcacctgccaggccctggcctagactacaagggtgagcactgagccatgctctcggggaaccttcactggagttgagggcagtgagaatgtttaaaaaaaagaagaagaaattatgtatatcagaagttgagaaatgaaaaataagacaagggcaggaagtatgatcttaaatgtaattgcaggaaagtccacctgtcattgagaagctagtacttgcgtgaagaactgtgaaagacgaggagcggagccagttgggttctgggaggagattgttcaggcagagggcacagtaaatgcagagcactgaagcggcggcgtggccgaagcggcggcatggggggtagagtgaggaggctgctgtggctggcaaaggaagtagcaggaggtgacctgaagggtcaccgtcacagcaggaccttgtcagccagtatgaagactgtggcttttactctatgggaagttgtttaagagttttgagctaggggccccataaaacctgccttagggtttaagaagctgcttctgtctgcactgtgaagaagagacttgttaggggttaagttggaggcagagaggccagggaggaggtcattgcagcaatgcacgccaggagaggatggcggcttaagccaggcagggtgtaaaagagagacgggtcaaaaacgacatcacagatttccgtctgcacaattggaagcaaagagtaaatgcttggagacagaagactgcactgttaagagctgagtttggacatgttagatttgagaggccaactagacagccaagtatatatgtctcttaggccacaggatgtatgagtctggagctccaagaagagattcaggctggaaattaaaatgtgtgagttgatgacatataagatagatagtgtcaagagccttgagattggacgagatcactgagagaggaaaagatctgaggaaaggcccgtggagttctgggaattgaggaggagctacagagaagcctgaaaaggccagtgagtggggaggaacaggagagcacattgtcctgagaatcaagggaaaaggagggagccattagctgggcgggttgctgcctaaaggtcgggtaagaggaggacaggtcgattactgtgtctagcaatgaggggatccttggcaagcccccaggagcagtgtcagtggagtagcagggatgaaagccctgctggaagtgatcgagcactcaaatgataacatctaatttatgggaaatatatgggatagaggaaaagccaaccactgcaatagagaagcacagaaaaatccagatgactccagtttcagcaagtcattaaaaaaaggactttaggctgggcatggtggctcacacctgtaatcccagcactttgggagaacagggtgagaggattgcttgagatcagcctgggccacatagcaagacctcatctctacaaaaaatacaaaaattatccaggtgtggtggcacatgccggtggtcccagctactcaggaggctgagtattgcttgagcccaggaggcagaggctgaagtgagccaagatcgcatgactgcactccagcctgggcaacagggcaagaccctgtctcaaaaaaaataaaagtggtggggtggactatgtcagattggaaaccagcacagacaaaccatctgcaaaagatgttttggggtctatagagaaatttgattaaatgaggtgaaaattcacccaaatggaaactgggggttgttggctttggtggagggggggaacagattgtgtgatctcattagattaaaaaaaaaaagtatgtaaaaaattattggctgggtgcagtggctcatgcctgtaatcccaacactttgggaggccaaggcaggtggatcacctgaggtcaagaattcgagaccagcctggccaacatggtgaaaccccatctctactaaaaacacaaaaattagctgggcgtagtggtgggtgcctgtaatcccagctactcgggaggttgaggcaggagaatcatttgaactcaggagacagaggttgcagtgagtcgagattgtgccactgcactccagcctgggtgatacagcgagactccatctccaaaaagaaaaacaaaattctaggaagatattgaacagtggtaatctctgaaaagtgggaatgtaatttttttattttgctttactgtattctctagttttctataacgcagttaatgaattgctgggatgatgcctccagtgaatgaaagggggtgctatctagggtgtgagttcactttaaagcagggagcaaggacaacacatccacaacattggagggaaggcaggaaaagagagcttggaggtcttggactggtttcctgggtctccaacagccgagcactatgtctaggaggaggaaagcaatcaccccaaattccacaagtccaaacaggctgaagaagcgggtgttttgcaccagttgcatgtaagtttctgaagctggagcttagggctgcctgatttttgagggaattgcaaactctgtgaagggccatagcttgtggaaagaggatgagcctggagtccacactgactgctgtctgctgtaccctgtctcctccccagcactggccatgggcctctgtgtcgccatgatcgcctttgtccgcctgccgagcctcaaggtctcctgcctgcttctctcagggcttctcatctatgatgtcttttgggtaagcgtttatgtccttggagctcctccccttctttgtgttgaagtgaagcattcatgcctgaaaactattaactagaagtatccaaagtcgggcttgcccagctgctgatcactctctctccagtccttaactgtatcatgggtgtgcagtccgatccttttgtttgctgaaaagtcgtacagtaggtagtgtgtgtgtgtgactcctaggatagaagaggtaacaggctgacaagattcgctgcagtgggggccaccctgtcagggagtaatctctgggtgtggagagtgcagaaattggcaagtacacaggaagagcaaagattttctcaaatcatacagtcaacgaaagcattgcagtcacagcattctgagactctgctcttaagagcaaggagggctgatgctgaaagcaggttgcttccaactccctctgttaaaggcatctctccaactcggcaggtatttttctcagcctacatcttcaatagcaacgtcatggtgaaggtggccactcagccggctgacaatccccttgacgttctatcccggaagctccacctggggcccaatgttgggcgtgatgttcctcgcctgtctctgcctggaaaactggtcttcccaaggtaagacctcatgctatgacaggaccacactgtcttcctgtgcctatctgttcccggccttgatcagtctcttatgtcatcagcattctgatcccaacctggggccattatctccatgctgcagaagaggaaatgaggatgagattcttggcttgccaagaaggatcactgagtgatccaggcggtgccttttattattgattaatgtcagcaaacagccatgccttactgctgtttccactgtttagagttggctggagggagttaggagaatctcgatccttttaacttgtaagatatttataaaaataagttctaatggtagaattatacaactcctggtaatataatcttggcagaatgaatgtgctgctttaatcttccacctgtaatagtagccaggtgcttatttgaagtctcaacagtgaatgtgtcacaaatgatgaattgtttgacatttctagaggaagcagcacttatgcaaatcacttcagcagtcacttccaaggggctctcctgaaacaggggggccaaggtggagacctctagtgccagtactgttgcagctttttctctctacactcttaaaactaatgttccatcagaagagatttccatctgccatgcagataagctctttgactccttaaaaagctaacaaactttgcacaaaaggaatagaaactggattgtagagtgtgacgtcactaacctgtgaaactgcattccagctccactggcagccacttctccatgttgggcatcggagacatcgttatgcctggtctcctactatgctttgtccttcgctatgacaactacaaaaagcaagccagtggggactcctgtggggcccctggacctgccaacatctccgggcgcatgcagaaggtctcctactttcactgcaccctcatcggatactttgtaggtaagagaaccagagagactgcagatgatcctcgctctggctgtcctccaacctttggaattaaatcaggtcttctagctacagttactggatggaaggagagcaggaattctgggtgctgtaatagacagcctggcccgtgagatgctaagtgttttgtgtactggataggccagttccctctccagctgtgtatctgaagaacgttgtaggaaaagcaggtcagtcctcaaagccaaggacacacagcacacagtgcagtggattagtctgtgcttaaatcttcctctagagttgaatgactgtcgtatttatttcctactttattcaatagatacttacttacattcattagttctacatttctgccactctgacctaggccaagttttgtagccagctcatgtgtaggcagacaggagatgattgtgatggggctgggaaaagcagtaacctgcccgcacatgcaactgctcccgcacagtgactggaaaggagcttttgcactccgtacctcctcctcaaccccagcactgtcctcgtcccacagcagttcattcacatgggttcatttcagtccacaaactcagaggggcaaggcaagtggcattatccccattagacagatgagcaagctgaggctcagagaggtggaaggtctgaactacatttatgttagctattgtgagtagcagagttggaacttgaacccaggtcttctgcctcccaagtccagcatcacaggagacagaggcacacttggagctggaaggagggtttgaacccaggaacctgagcaaggagtgagacttgggtcagtcatgtgtccttggagttgtaggtgttttttaaagctgtgctgatccacatttcttcaactgcccaagctgggcatttcacaccccaaccatagaatggacgacagcacattagatctgtacagttgcaggactttgcccagcagcagccaggtgacacgggttccctctcgtgtctcacagatgcctctctctcctcacaggcctgctcactgctactgtggcgtctcgcattcaccgggccgcccagcccgcccttctctatttggtgccatttactttattgccactcctcacgatggcctatttaaaggtgagagcagcagttataaacctgtgaaagcaataacttggattggcctgtgcctcggtttgcactctcctcgctggaggtgattctgcttaagcccctgagtgagcttgtgatctcgactgtgtgtgtgtgtgtgtgtgtgtgtgtgtgtgtgtgcgcgcgcgcgctaccctggcgttagcaaacgcttccagattcgtgcagccactgacagaaaatgctgatgagctagaccactacaccacctggtcgaggaataactaattgaaagccccagagcccagctgagggtacttcctgcttctgttcaaagcagtgccctcctgccacctaacagcttaacactacgttaaagtttgggaataattaagattgaatagtgttgaggcagcatatgataaaaccagagttcaagagcacattatttcccagatatctattctcagccccgttttacagatgaggaagcagatacagaggtcaacttacttgcccagctcacttgactcactacctctagagagttgataaaagcccttttcttgctcagggagcctaaaagcaccccttctagggagtcctcctaaaaatagtgggttatttttgaatgggtaagatttaaatgctctttggtttcccacagaagcaatctgatctcagatcaagcatcagaaaggggccaggggcatggtggctcacgcctgtaacccccgcaccttgggaggctgaggcaggcgggttaagagttcaggaccagcctggccaatatggtgaaaccctgtctctactaaaaacacaaaaatgaactgggcatggtggtgagtgcctgtaatcccagctactcaggaagctgaggcaagagaatcgcttgaacccaggagtcggaggttgcagtgagctgagatctcgccactgcactcactccagcctaggtgacagagtgagaacccatctcaaaaaaaaaaaatatcagaaaggggccaagcgcagcagctcatgcctgtaatcctagcactttggaaggtcgaggcaggagaattgcccgagcccaggagtttgagaccagcctggccaatatataggaagacttcatacctggaaaaaaaattttttttttttaaagaatcagacagctgtgtgtgcctcatgtttaaatctgtaacttagaaagtcccttgtttcccagggcgacctccggcggatgtggtctgagcctttccactccaagtccagcagctcccgattcctggaagtatgatggatcacgtggaaagtgaccagatggccgtcatagtccttttctctcaactcatggtttgtttcctcttagagctggcctggtactcagaaatgtacctgtgtttaaggaactgccgtgtgactggatttggcatttaaagggagctcgtttgcaggagagaggtgctggagccctgtttggttccttctcttcctgcggatgtagaggtggggccccttccaagagggacaggcctctccccagcgcgccttcctcccacgtttttatggatctgcaccagactgttaccttctgggggagatggagatttgactgtttaaaaactgaaaacagcgaggagtctttctagaacttttgaacactaaaaggatgaaaaaaattagcaaaccgaagtttcttcaatgacccctcgagaactttgggaccagtttcctataggggactcagtttcagagaactgagacagaagctcttctgtcgttatattcttctttcctttttttggatttattaaatattttctgtggtgtgaagtgacttattaaatccacagacattgagtgacttcttacaacatccacataagaatttgttgtaatgagttcatgtccacccagatgttgtgttggcagtgaacaagggcacggtttttatacatacgtacatatatatatataaacacacacatagatatatatgaataaacaaaaatgaaatcctgctaagatcacgctgtgtagctgacaggggcttgctgtcgttttgagcatgtcgagcagtttactgtggcttccttgtatatggataagctgctgtccttccccttcacaactgaccccgcagttacaaactagtatagcatttgtgctgattgatgatagactcatggacttcaggagcccttacttggttttgatcagtgtagcaaattagggatgaagagttcaaaccttttggccctttctttcttttctaggcttctccctcgcagggtgttccgtagtttcttctcgagccaatgcatgtattatagcagcaggtgtctttgtgctttctcatcatagtaacgtactacttgtaaatacatttttctattttctatttttttgtatttttttttttgacattttgtttcattggtgtgctgtatattttccatgccctcactcctttaagaaaaaaaaaaaaaaggaaaaaagcaacacaatcctgtccttgctgttgtgattatagtcttggtttacctgtggtgacaaccgggtgttggggacacatgtcaaatgcccctctgagatgggccctaaattccagtaactggggaaagaaccagctgctgtgtcctgagagcctggccctgtgctgtggtctctgctgcaagcccagatttctgggagtaactagtgttaggtctgctgacctttacctaagcagcccctgcctggtaagaaggtgcccattgttcagaggcaaagagaagcctgcggttggcatgaggatgcctgacaacaaaggctggagaagggccctgagttccagcctctccccaagggtccccgccccagtggctgcctctgtcttgacctgtgtaatgaattagtgtgctgtgtcactgtggcttgaagtcactgtggatcaagctcacagggggcacccatcctgttgtcaacagagtctgaagcagtcagggtgttggattcctctgttgttgtcatcaattcctgctgaggggtttctggggttttgtttttaataaatgactcctttgtagcctttgtcacataatcttcactttggttgttggtaccaaacagagctcccagccatctcctccctgttctggaagactgatgggaagactctgtctgtccccagacctggtcatctgcagctctggcccagtcatagatacatcaaagaactgaagcttctgctgtccacagaactcaaaactgcctctgcattgggtgaagactaaaaatccacttgcggactctcccttccttccttctcagccctcgaggatgcatatagctaattaagcaggcccagagacagagaggggggctccaaaatgactcggattaagggcaagtgccagtgatgggtagaaataacgttatccttcatgcctgtaatcccagcactttgggaggccgaggcaggtggatcacaaggttgggagctcgagaccaacctggccaacatggtgaaaccccgtctctactaaaaacacaaaaattagctgggcatggtggcaggcgcctgtaatcccagctatttgggaggctgaggcagaagaatcgcttgaacctggaaggcggaggttgcagtgagcagagattgcgccactgcactcaagtctgggcgacagggtgagactccatctcaaaaaaaaaaaaaaaaaggaaatgttatcctggcagtgggtcattttaatttttctgtctttgttttcataagaaaattaaattccagacagaaggaacgtcgttattttgtcattctcacttctgtgcaggttttggggggaaatacccacacagggctgtgaatgcaccctggattccagttgctaatcttcaaagcccttaaaacactcccttaaaactttggcagagaaacagcaaatactctactcgtctcggagggttgagtgggtggctgcagttaaagcacacattagacttcccttccagtgctcgtttgctccccgctgcctgatacacttaggtccgcctcttattctgttttctcaaataccatggtttaggggttttctaggaagtctgctgcattaggcatggcatgctcatgaaatttcagcagattccttcctcactgatctgaagtcctttttcctcacaaagagactgtgtgttactagaactcccgctttttcataactcttttttctagtttgagctaatgaagatatgacagtaaagtctgtccaaagcctagtgtgttccattgctgttattacagtgcatacgctttctgaatgtgacagtgacagctccccgcataggaacggttcggtggcttgggactaagctactgtctgaattacttttgtagcaggctcacaggccttgggtaaacaggtaagttaggtcacccacaagaaaaacaaaagtactcgttctctgtgagggtggaggggaagggagttccattttgccaatcaagtgttaaaaatagaacctgctgtgtctgcttagcagctctcacgttactgctcaccagatcccatgttgtgtgtacgtttctgttttgtaaagcctagcgtttacgtcagagcctgggaatgcagcactcgtgtctatacatgggagtacatgccttagggacatcatttatacaacccccttctctacagagctatgtcagcggtacaggctcagaaggaagccatctcggtctctttctggtcttcagtgcacagtggccaggacagcctcccccacttcaccgaatcacatttcttcagcagtttccaacagtgaaatcatttctaggacaatggctgctaacacgtgtcagctgaagcactgcagatcgagtcatccaactcaagcttcttcctcttattggaagggataaaccaggtaagactttttaatccagaaattattcctattccctgcaatgtatagggtgctttctatctgcaaaactctaaactcaaatttctgcaggttcagattccaactgtctcatgcgcagagactctcccatcacaaaattcttcccgctccagccatcatctgtttcctcctcagcctttcccttgaaatccagagccctttcctgtccgttagaggcaatcagtcatgtttcagtgaagcttgaggcactgggccccccagtgaacaaaaccagacatcctgaccccctactcctgcggtctgtgcagggcttgctttagcatgcttggcttgtggggagggggtgtggcagccattcccacacaaggtcacgcagggatgccacagtgcgttcaagagtagaatccacagccttctctccgtaactctgggccttgctgtaaatagcagaggcttgggctggggatcctgtatcactggacgggatgtgccaatgaagagaaggctgagaagcaagttggtgtaggagaagcccagtgctcctggtggacacaggcctgcattcaaccaaatgtctgaagacaagcgaaagcctacagccccaagcgcaatgatctttcgtcactacaggtttcagaagtcttaccgcacggagccagtggttagcaggtgcttgatacaaacatcctgcagggaggctgtgaagattctaactgcagcacttacggaggagcactttagcgtgcggtagatttcctagataacctgaggtcttaagaattcatgcggcagactccgcttcgcttctggttcctttcatttggagtctgcctaaccagtttttctcttaagttccaagacatcttcttcctgttgagtagaacctgtaaaacacgccacctgtctgcaggcgaacagaggctctgaaggttccaaaatagctaagcccacgagctgtctccagcccccatggagtcctgggattctcaccagatccaaagatgacaggaatgggaaccagttaggcagaggaagcaagacttgagagactgggagtggggaagccgccaggcagtgggcagcaggcctgcgcttgtgaggaatgggagacaggaagtgggtgtccacaggacagagacggagggggacagcacgatggtcactgcattcaaccaaatgtctgaagacaagcgatccagccccgggatcccgacaccagttgctctgtctcaccagagagcctctctccaggcggaccacctgtcagcctgctactgccacctttcactctgcccacctggagctgctggagtgtagccaccacgtgagcttctagcttttgtgtttgagcctttgccattagagattgaatttcctcacacctgcggttgctgtcgtgccttgatggggtttttatccccaggcagatagtaacatatcctgtgacagctccctggggaaggcggaaaccaatttcagagaaagaggctgagcgcttgctagtgcagggaggaactaagatgacgaagcatcgcacggatgagtcgtggccttgccggcttgacggcgggtagaatgcagtgccaccctccccaagaccaccatctggccaggagccccggccccacctttcctccttcccttgtgcctcctggcacttcccgcagccctcccctgttgagtgtaggcgttctgcccggggcagtcgctgtgagagaggccatggcctggactagggtgatgcgaagaacagaacttgctaccagattggatgcagggttggggactccacagtgactccacacttcttaacctgaacaatgaattgccaaaatagataacagaagaaattggggaagaagagttgttctagccaatagagcagctaaagccaaaaaaaaaaaaagtcttcagtgatgtaaagccttgcagagtatgcgagatgacctggacagtgagaggcaggaggaagactgctctgtggtgctctgagtgtgaaggcatttgtcatgcgcatcccccacacagccaccatggggctctggttagggatggagccccctgagtccgagctgcttcatctgaaatggggatgaaggtgcctcatagaaagtattgagtaaatatgaggcgctcttctggtttactgtgttctcatatatttcacacacaatgctcagagagttggaatacagttaaaatcattagatctgtacgctgtcattattcaaaccaccacagctcccggttcatcattaggaatactggttctctcccctctgctgaggggtgatttcccccacccagggtcttgaaattttcttctacacactgaaagccttagcacaaagctccatatgcagagggggatggtgggtgaccctgcccatgcagttcctcattttggcttcttaaggccaagaagatcaacctctacccagattctgcacacaaaccagtgttgacgtttttatttttctgtactttttttttccataataaacactgcatgtgccctctttaacttcagtgtactttaaagtcttactgcttgttttgagggaaaagtttactacactgtgaagctcccattctgtcagtcttttgtgggcctgtattagttgatacatctaggtttttcttgaacacccttggaacaaaagactcatgggccagggccgggctcggtggctcacgcctgtaatcccaacactttgggaggccgaggtgggtggatcacctgaggtcgggagttcgagaccagcctgaccaacatggagaaatcccgtctctactaaaaatacaaaattagccgggtgtgctggcatatggctgtagtcccagctactcgggaggctgaggcaggagaatcgcttgaacctgggaggtgaaggttgcagtgagccgagatcgcaccactgcactccagcctgggtgacagagcgagactccttctcaaaaaaaaagactcatgggccaaactcctatcctgtgttaaaataaaacacagtgtcattctaagccacttggctcaggtcagtccactgaataggagagggacagtagccagactagagagagtgaaagaggagattccagccacgcatttggaaaattctcagtcctccaggacacagtgaagcaatcagggctgaggcaccgtctgatgaagcagatcaataactggtgggatgacccatgaccctccccaaaagtcgctgatgaaggagctgatgctaccttgaagggatgggcccgggcttcgtcctcagccctgtcctgtcccacatccctcttgatcatttggccagggacacagttgccaggcttcatttgaggagaacgtgaagcaaggagaagggacatactcatgacctaaagaaagctcagaggcctggggtgtcaaagcagatctggggagatctgctggagagagccccagccaatgatggccacacaccgggtgtcagtcatgcctcccaagagccctttaataaaggcaggtgccattactgtcaccattgtcacaaaggaactcgccaagaccccaagatcacaaattgctaagtggcagaataagctctaaacactgtccctaatcattatattccatcctcatcccaggattagaaatgatctccaccccagaaaatacaggtaaggcataaacactgatggctctagggcctactcttagttccaaatacatttaaatcctactcttagttccaaatacatttaaatccatccactgcctgtagcaaataaagattcttgcaacagcgtctgcctgggtctccctaactgcagagtgtgttccatgctgtgggccagaatggtggcctgtcatctcagatcttcagtctcattatgtaacggcagattttatcatccattttatgtacccaaagtttcaagggcagctaatttgccccagatcttcctgcttccagagactgagctcattgcccagattatgagaaaataatcacagccaggttttgtagacacgacttgtttagcatacatacagaactgtggggagtttctgtaaacagggaaggaccatgcaaacagcatcgtattggagatggagatccaccaaccctagtaggtggcaggaaagagctggggttttggctgccaagccctgggctgacccagctgctgtccagaaggggcatgccgacaccttcctctccaataatgctgcagcagtgttgaccattactcatgagagggtatcacctcacacaaactaggagttcctaggaggaggggaccaggatgcatgcctcctagcaagccaggcttaaactagaatctttgagacattcaaagcaactggatttcattgttaaaattatgactaccctattgctgattgatttttttttttttaagacagggtcttactgtgttgcctaggctggaatgcactggtgcagccatagcttactgcaacctcctactcttgagctcaagcaatcctgcctcccaaagtgctgggattacaggcatgagccaccacacccaacccactgctgatattaaaacaagccataaaaacataaaaacaactgtcagctgctgttctgatccccagtaatactgggctgttattcaaaccaatcctctggctaaaaacaactttaaaatatacatgaaatacagaaaataccatgtataagccctgcctaaatctgatttctgaaatacacagagggcagactctaaacagcccagctaaggccaaaagaaataaagacaaatttcagctgctgcccaccagaggaggatcaaagggttttttttgcttgtgttttgccttttcttttcttttctttttttttttttttttggagactgagtctcgctctgtcacccaggctggagtgcagtggtgcaatctcggctcactgcaagctccgcctcccgggttcacgccattctcctgcctcagcctccagagtagctgggactacaggcgcccaccaccatgcccggctaattttttgtattttttttagtagagacggggtttcaccgtgttagacaggatggtctcgatctcctgacctcgtgatccacccacctcggcctcccaaagtgctgggattacaggcgtgagccactgagcccggccgccttccttttcttaaatttgagacaaagtctgtgtctgtcacccacactgcagtgcagtggtacaatcatagctcactgcagccttgatctcctaagctcaagcaatcctctcagctcagcctcccaagtattaatagctgggactacaggcacataccaccaactacttgggaggtttttatttgtagagatggggtcttgctgtgttgcccagactggtctcaaactcctggcctcaagccatcctttcgccttggcctcccaaaatgctaggattacaggcatgaggcactgtccctggctggaatcaaagttttaaatcttgagttcagccgttaaatgcctgctgtaaaaaaaacaaaacaaaacaaaaaaaaaacacttcaccagattttctgcaattatataattcaaaactgctatacatatgaacaagaaaatgtgatctatgctcaagaagcaattgacagaaactgactctgatatgactgacatgttggaattaacattcaagatgtttaaagtaattataaccatgctccaggatgtaaaggaaaatatgctcataatgagcaaataggaattgtcagcagataaatcatgacaaaaagaaccaaataaaaattctagaacttaaaaatacaacacatgaagtcaattcactagataggattaacagcacattggcagattaaagaatcattaaactggcaatagagctgggattagtaaacctgtgaggggtcaggtaatatttttagctttgtgggtcaaaaatcccctttataactactcatttctgccatcatagtgtggaagcaagcagccactgtaaatgagaataaacattccacctgtggccagtttcccaaaccctgaaatatccaatctaaaaaacagaaaagatacagaaaaaatgatcagagcctcagttatctgtgaacagtgtcaagcagtcttaacatatatatagttggagtcacagaatgagggaagagagaatgaggcagaaaggtttaaaaaaaaaaatggccaaatatggggaaagagtcaagaaacatggcaaatctcaagcaaaataaataaaggaacatcacacccagggacttcatagtctgaaaactaaacatagaaagtcttgaaagcaacaagaaaaaaaatgacacactgcataggggaacaacaatagatttacatgaatttcagcaaaattctcatcagaaatagtgaagactagaggacaatggaatgacacctttagaaaaagtaaaatgtgtcaacccagaattctatatccagtgacaatatctttcaagaatgaaagtgagggccaggtgcagtggctcatggctgtaatcccaacactttgggaggccaaggcaggaggactgcttgagctcaggagtttaagaccagcctgggcaacatagaaccaatctctacaaaaactacaaaaaaaaattagccaagtatggtggcatgcacctgtagtcctagctacttgagaggctgaggtgggaggatggcttgagcccaggggtttgagagtgcagtgaactaactataggcaccactgcagtccaggctaggtgacagagcaagactgtctcaaaaaaaaaagaaaaaaaaaaaaaggacaactcaaaaattgggaggaagtatttgtaaatcatatatctgataaggatttagtattccaaatatataaagaattcttgggccgggcgcggtggcttacgcctgtaatcccagcactttgggaggccgagacgggcggatcacaaggtcaggagatcgagaccatcctggctaacacgtgaaaccccgtctctactaaaaatacaaaaaattagccgggagcggtggcgggcgcctgtagtcccagctactcgggaggctgaggcaggagaatggcgtgaacccgggaggcggagcttgcagtgagctaagatcgtgccactgcactccagcctgggcgatagagcgagactccgtcccaaaaaaaaaaaaaaaaaagaattcttacaactcaacaataaaaaagacaatccagttatttaaatgggcaaaagatacaaatagaaatttctccaaaaaatatatacaaatgggctgggcgcggtggctcacatctgtaatcccagcactttgggaagctgaagtgggcagatcacgaggtcaggagatcgagaccatcctggccaacctggtgaaaccccgtctccactgaaaatacaaaaattagctaggcgtggtggtgcgtgcctgtaatcccagctactcgggaggctgaggcaggagaatcacttgaaccagggaggcagaggttgcagtgagccaagatcgtgccactgcactccagcctggcaacagagccagattccatctcaaaaaaaaaaaaatacacacacacacacacacacacacacacacacacaaatgaccaataagcacatgaaagggatgttcagcaccattagagaaatgcaaatcaaaaccacagtgagacatcacttcacacccactaggatgacaataactttttaaagacaataacaagagttagcaaagatgtacagaaaatggagccctcataacattgttggggtcgggcagggtggctcacacctgtaatcccagcactttgggaggccaggtgggcagatcacttgaggccaggggttcgagagcagcctggccaacacagcgaaagcccgtctctactaaaaaatacaaacattagccaggagtggtggtgggcacctgtaatcccagctactagggaggctgaggcacgagactcacttgaacccgggaggtggaagttgcagtgagccaagatcgcgccaccacactccagggtgacagaatgagacttcatctcaaaaaataaatagaaatttaaaaaaaaattaaaaaaaaaaccaccattgctggtgggattataaaatggtgcagctgctttggaaaatggcttcacagttccaccaaaggtaccatagttaccatatgatctagcagtttcattcatagttacagtttacaagaattaaaaatctgtatctaccaaaaacttatacatacatgtgcatagcagtattaataaccaaaaagaagaaacaaccaaaattgtcattaactgaacaaaatgtgtatgtgtacagattattattcaggaatgaaatgaataaagatgaggaccataacctatactgtatattttcttatgcatcctaagctagaaaccagggttacctttggagagggaattgggagtcatagaggctgcctacaattttgaacacataccaatatttttattcaaaaattaaaaattaaaatcttcaaaatgtaacactgctgtaaactcttaccatcaaactacataagcaaaactgcaacacgagaaatcgatagaaataaaaatgtaattgaagaataacacaatttctttcagtctctgacaatgcaagtagaaaaagaatgtgtatagagagaaaaagctcatagtgcctaagacagatcgatcatctgttctccccagcaccactaatgaagttctcccttttcttccggagtgataccaccattcatccagctggacaggacagagcccttctccctccatccccatgaccaggaaatgcatcactgactcttgtttgtttaacctgcctgccattccagggatccatccatttctttccatctcctgtctccacccagatccaaga
